United States Patent Application Publication US 2018/0126003 A1 - sequence listing, part 100

SEQ ID NO: 181284 - DNA, 6270 bp, Artificial Sequence
  derived and/or modified sequence
atggaggatacacaggccatagactgggacgtagaggaagaggaggagacggaacagtctagcgaaagcctccggtgcaatgtcgagccagttggccggctgcacatttttagtggagcacatgggccggagaaagactttcctcttcacctgggaaagaatgttgttgggaggatgccagattgtagtgtggcgctgcctttcccctcgatctctaagcaacacgctgagatagagatcctcgcctgggacaaagcccccattttaagggattgtggctctctcaatggcacgcaaatcctcaggccccctaaagtgctgagcccgggtgtgagtcatcgtttgcgtgatcaggagctgattctttttgccgatcttctctgtcaataccatcgcctcgacgtgagtttaccattcgtttcaagaggccccttgaccgtggaagagactccaagggttcagggggagacacagcctcagcggctcctgcttgccgaggactctgaagaagaagtggacttcttatccgaacgacggatggtcaagaagtcccggactacttctagtagcgtcatcgtgcccgagtccgatgaggaggggcattcccccgtccttggtgggctcggtccgcctttcgctttcaacctcaactcagatacagatgttgaggaagggcagcagccagctacagaggaggcgtcttccgcggcgcgcagaggcgccactgtcgaggccaaacagtccgaagctgaagtagtgacagagattcaactggagaaggaccaaccactggttaaggagagagacaatgacacaaaggttaagcgaggggcaggtaatggcgtcgtcccagccggggtgattctcgaacggagtcagcctccaggcgaggactctgacactgatgtggatgacgatagccggcctccaggacgacctgcagaagtgcacctggagcgggcacagccattcggctttatagattctgacaccgacgcagaggaggagagaatccccgctacacctgtggtgatacctatgaagaaacgcaagatatttcacggtgttggcaccaggggccctggcgctcctggcctcgcccacttgcaagaaagtcaggctgggtccgacaccgacgtggaagaaggcaaggcgcctcaggcagtgcctctggagaagtctcaagcatctatggtaatcaatagcgatactgacgacgaggaggaagtctctgccgccctcactctcgcccaccttaaagaatctcagccagcaatatggaaccgagacgctgaagaggatatgcctcaacgggtcgtgcttctgcagcgctctcaaaccaccactgaacgcgacagcgacacagacgtggaagaagaagagctgcccgttgaaaatagagaggccgtgcttaaagaccacacaaagatacgcgctcttgttagagcacactccgaaaaggatcaacctccattcggggactctgatgactccgtcgaggctgacaaatccagtcctggcatacatttagagcggtcccaagcctctacaacagtagacataaacacccaggtggagaaggaggtccccccaggaagtgccattatccatattaagaaacaccaagtgagcgtggaaggcactaaccagacagatgtaaaggctgttggggggcccgccaagttacttgtagtgtcccttgaggaggcatggcccctccatggggattgcgaaaccgatgcagaggagggcactagcctgacagctagcgtagtcgcagacgtccgcaagagccagttgccagcggagggtgatgccggagccgaatgggcggcagctgtactcaagcaagagcgagcccatgaggttggcgctcaggggggcccccccgtggcccaggtggaacaggatctaccaataagccgagagaacctgaccgatttggttgttgatacagacactctgggcgaatctacccagccgcagcgggagggcgctcaggtgcccaccggtagggaacgagagcaacacgttgggggcacaaaagactccgaggataactacggggattccgaggatttagatctgcaggcaacgcagtgctttctggaaaaccagggtctcgaagcggtgcaatctatggaggatgagcctactcaagccttcatgctgactccaccccaagaactaggtccatcacactgctcctttcaaacaaccggtacacttgacgaaccttgggaagtactggcaactcagcctttctgcctccgggagtccgaggatagcgagacccagccattcgacacacacctggaagcctacggaccctgcctgtcaccccccagagcaatcccaggcgaccagcatcccgaaagtcctgtgcatacagagccaatgggaatacaggggagaggacgtcagacggtcgacaaagtcatgggcatccccaaagagaccgccgaacgggtgggccccgagcggggcccactggagcgtgaaactgagaaactcctgccggagcggcagaccgacgtcaccggtgaggaggaactcacaaaagggaaacaggatagggaacagaaacaactgctcgctagggacacccagaggcaggagtcggataagaacggcgagagtgccagccccgaacgagaccgagaatccttaaaggtggaaattgagacaagtgaagaaattcaggagaaacaagtgcagaagcagacactgccgtccaaagccttcgagagggaagttgagaggcccgtggccaatcgcgagtgtgatccggcagagctggaggaaaaagtccccaaggtaatcctcgagcgtgacacccaacggggcgagccagaggggggttcccaagaccagaagggtcaagcctcttctccaacacctgagcccggggtcggagccggagacctgcccgggccaacttcagctcctgtacccagcggaagtcagtctggcgggcggggaagccctgtgagcccgcgccgtcaccaaaaagggctcctgaattgcaagatgccacctgctgaaaaagcctctagaatccgggcagccgaaaaggtgagtagaggagaccaggagtctcccgatgcctgcctcccaccaactgttccagaagcaccagcccccccacaaaagccccttaactcccagagtcagaaacacttggctccacccccactgctgtctcccctgcttccatcaatcaaacccactgtgcgtaagacgaggcaggatggatcacaagaagctcccgaggcaccactgtcgtcagaactggagcctttccaccctaagcccaaaattcgaacacgcaagagcagcagaatgacaccatttcctgccacgtccgccgcacccgaaccacacccctcgacctcaactgcccaaccagtcacaccaaagcctacctcccaggctacacgcagccgcactaatcgatccagcgtgaagacccctgaacctgtggtgccaactgcgcccgagcttcagccaagcacaagcaccgaccagcccgtcacttctgagccgacttcgcaggtaacgcgcggtagaaaatctagaagttcagtcaagacccccgaaacagtcgtgccaacagccctggagctgcagccttctacttccacagacagacccgtgacttccgagccgacatcccaagcgaccagagggcgcaagaaccgcagtagtgtgaagactcccgagcctgtggtgcctaccgcacccgagctgcagccttctacttccaccgatcagcccgtaaccagcgagcctacttatcaagccacccggggccggaaaaatcgttccagcgtcaagacccccgaaccagtggttcctaccgcaccggaactgagacctagcacgagcactgatcggcctgttacacctaagcccacttcccgtaccaccaggtcacggaccaacatgtcgtccgtcaaaacccctgagacagtggtgcccacagcccctgaactgcaaatcagcacctctacagaccagcccgtgacccctaagcccactagccgtacaacaaggtcaagaacaaatatgtcgtcagttaagaaccccgagtcaacagtgcccattgcccctgaattgccccccagcaccagcactgagcagccagtaacccccgagcctaccagtagagccactagagggcggaagaataggagcagcggcaagactcccgagacattagtgcctaccgcccctaagctcgaaccttcaaccagtacagaccagcccgtcaccccagagcctacatcgcaggcaacaaggggaaggaccaatcgtagctcagtgaagaccccggaaaccgtggtcccgaccgcccccgaactacaaccctcaacgtccaccgatcagccggtgacacccgagcccacatctcaggccaccagaggccggaccgatcggtccagtgtaaagaccccagagacagtggtgcccaccgccccagaactgcaggcctcagctagtacagatcagcctgtcacatctgagccaacaagccggacaactcggggccgcaagaatcgtagctccgtgaaaacccctgaaacagtcgtgccggcagcccccgaacttcagcctagcactagtaccgaccaacctgtcacaccagaacccacaagtagagcgacccgggggaggacaaaccgctccagcgtcaagacacccgagagcattgtgcccattgcacccgagcttcagcctagtaccagcaggaatcaactcgttaccccggagcctacttcacgtgccacccgctgcaggaccaaccggagttcagtcaaaacgcccgagccagtggttcctaccgccccggagccccatcccactacaagtaccgaccagcctgtcacccccaagctaacctcacgtgcgactaggaggaagaccaacaggagtagcgtgaagacacctaaaccagttgaacccgccgcctcagacctggaacctttcacacccaccgaccagagcgtcacgcccgaagcaattgctcagggtgggcagagcaaaaccctgaggagcagcaccgtgagggcaatgccggtgcctacaactcctgagttccagagtcctgtaactacagatcagcctatcagcccagaaccaataacccaacccagctgcataaagaggcagcgggcagcaggtaatcctgggtctctggccgctccaattgatcacaaaccctgcagtgctcctcttgagccaaaaagccaagcaagcaggaaccagagatggggagccgttcgagccgcggagtctctgaccgccatccctgagcctgcatcaccacagttgcttgaaacccccatccacgcgtcccagatccagaaagtggaacctgccggccgttcccgattcacgccagaactgcagcccaaagctagtcaatctaggaaacggtcactggcaacaatggacagcccaccccaccagaagcagccccagagaggcgaggtaagccaaaagaccgttattattaaagaagaggaggaggatactgccgaaaagcccgggaaggaagaagatgtcgttactccaaagcctgggaaacggaaaagagaccaggctgaggaagagcccaatagaatcccctcccgctcccttcgccgcactaagctgaaccaggagtcgacagcaccaaaagtactcttcactggcgtggtggatgctagaggcgagcgcgcggtcctggctctgggtgggtcattagcgggctcagccgccgaagcgtcacatttagttaccgacagaatcaggaggacagtgaagttcttatgtgctctcggacgcggaatcccgattctttctctggactggctgcaccagtcccgtaaggctggatttttcctgcccccagatgagtacgtcgtgactgaccccgagcaggagaagaactttggtttctccctccaggatgctttgagccgcgctcgggagcgcagactgttggaaggatacgaaatatacgtaactcccggcgtgcagcctccccctcctcaaatgggcgagattatttcctgctgcgggggaacctacctcccttccatgccgaggagctacaaaccacaaagggtggtcattacttgcccgcaggatttcccgcactgttccattccccttcgagttggactgccgctcttatccccggagttcttgttgacgggagttttaaagcaggaagccaaacctgaagctttcgtgctctccccactggagatgtcaagcacctag

SEQ ID NO: 181285 - DNA, 6270 bp, Artificial Sequence
  derived and/or modified sequence
atggaagacacacaggccatcgattgggatgtggaagaagaggaggaaacagaacaatcttcagaatccctgcgatgtaatgtcgagccagtcggtcgcctacatatcttttccggagcgcatggcccagagaaggactttccgctccacctgggcaaaaacgttgttggccgtatgcccgattgttccgtggccctcccctttccttccatttccaagcagcacgcagagatcgaaattctggcctgggacaaggccccaattttgagggactgcggttctctgaacggtactcagattctgcgtcccccgaaggtcttaagtccaggcgtgtcccatcggctgcgcgatcaggaactgatcctattcgccgatctcctttgccagtaccatcgcctcgacgtctcactgccgttcgtctctcggggacctctgaccgtggaagagaccccccgtgtgcagggggaaacccagccccagcggctactgttagctgaagactccgaagaggaggttgattttctttccgaacggaggatggtgaaaaaatcgagaacaacaagttcctcagtcattgtaccagaatcagacgaagaaggccattcacctgtcctggggggcttgggacccccctttgcatttaacttgaattctgatacagacgtggaggaggggcagcaacccgccaccgaggaagccagttcagctgctcgacgtggggccactgtggaggctaaacagtctgaggccgaagtagttacagaaattcagctggaaaaggatcagccattggtgaaggagagggataatgacactaaggtcaaacggggtgcgggcaatggagttgtgccagctggggtgattctggagaggtcccaaccccccggagaagattccgacaccgatgtggatgatgattcccgcccccccggcaggcccgccgaagtccatctggaacgtgcccagcctttcggcttcatcgactctgacacagacgccgaggaagaaaggattcccgctacgcctgtcgtcatccccatgaaaaaacggaaaatctttcacggtgttggtacccgaggcccgggggctcctgggctggcacacctgcaggagtctcaagctggatccgacaccgacgtggaggaggggaaagcgccccaagctgtgccgctggaaaagagtcaagcatcgatggttatcaactccgatactgacgatgaggaagaggtatctgccgctctgaccctggctcacctcaaggagtctcagcctgcaatttggaatcgtgacgccgaagaggatatgccccaacgggtggtattattacagcgatctcagacgaccaccgaaagagacagtgataccgatgtggaggaagaagaactgcctgtggaaaatcgggaggccgtgctgaaagaccacacaaagattcgcgccctggttcgggctcattccgaaaaggaccagcctccctttggcgactctgacgactccgtggaggccgataagtcatcccccggaatccacctggagcgaagtcaggcgagcaccactgtggacattaacacccaggtggaaaaggaagtcccccctgggtcagccattatccatatcaaaaaacaccaggtgagcgtggagggaacgaaccagaccgacgttaaggccgtgggaggacccgctaagttgctggtggtaagtcttgaggaggcatggcctctgcacggagattgcgagacagatgcagaggagggaactagtctcaccgcgagcgttgtcgccgacgtgagaaaaagtcaattgcctgcggagggggatgcaggtgccgaatgggctgcagcagtgctaaagcaggagagagcccacgaggttggtgctcagggtggtcctccggtggctcaggtggaacaggatctcccgattagccgcgagaacctcacagatctggtggtcgacaccgatacactgggggagagcactcaaccacaaagagaaggcgcccaagtccctaccggtagagaacgcgagcaacatgtgggcgggactaaggattcggaggataactacggggatagtgaagatctcgatctccaagccacgcagtgcttcctagagaatcagggcctggaggctgtccagtccatggaggacgagcccacacaagcgttcatgctcaccccgccacaggagttgggaccgtctcactgctcttttcagaccaccggcaccttggatgagccctgggaagtcctggccactcaaccattttgcttaagagaatcagaagacagcgagacacagccatttgatactcacctggaggcgtatggaccctgtctctcaccaccccgggctattcccggtgaccaacaccccgaatctccagttcacaccgagcctatgggcattcaggggcgagggcgccaaacagtcgataaagttatgggtatccccaaagagacagctgagcgcgtcgggcccgagcgaggcccccttgaacgcgagactgaaaagctgctgcccgagagacagacggacgttacaggcgaagaagaactaacgaaaggaaagcaggatcgggaacagaagcagctgttggcccgcgatacacagcggcaagaatccgacaaaaacggtgaatccgcgtctcccgagcgggacagggaatctctgaaggtagagatcgagaccagtgaagagattcaagagaaacaggtgcagaaacagacgctaccctccaaggcatttgaaagggaggttgaacgccccgtggccaacagagaatgcgacccagccgaactggaagagaaggtgccaaaagtaatcctggaacgagatacacaacggggcgagccagaaggcgggtctcaagaccagaaagggcaagccagttcgcctactcccgaaccgggagtaggagccggggatctgcctggacctacctcggcacctgtaccgtccggcagccaatcaggcggtcggggttctcctgtgtcacctcggcgacaccagaaaggattgctcaactgtaaaatgccgccggctgagaaagcaagcaggatcagagctgccgagaaggtgagccggggcgaccaggaatcaccagacgcgtgcctgccccccactgtgcccgaagcacccgcaccccctcaaaagcccctaaacagccagagtcaaaagcacttggcaccaccgcctctccttagccccctcctgccctccattaagcctaccgtacgcaagacacgacaggacggctcgcaggaagcacctgaagcaccattatcctctgagctggaaccatttcacccaaagcccaaaatcaggacacgcaagtcgtctaggatgacgccgtttccagcaacaagcgcagcccccgagccacatcctagcacctcgaccgcccaaccggtgactcccaagccaacaagccaggctaccaggagccggacgaacagaagctccgttaaaaccccggaacccgtcgtccccaccgcacccgagctgcagccaagtacctctacagaccaaccggtcacaagcgaacctacctctcaggtcacacggggaagaaagtcacgatcatccgttaaaacgcccgaaacagtggtaccgaccgctctggaactacagcctagcacttctacggacagaccggttactagtgaacccactagtcaagcaaccagaggcaggaaaaatagaagcagtgtgaaaacccctgaacctgtggtgcctactgctcctgagctacagccctctacctccactgaccagcctgtgaccagtgaaccaacctaccaggcaacaagagggcgcaaaaatagatccagcgtaaagactcccgaaccagttgtgccgactgctcccgagctgcggccatctacgagcaccgatcggccagtgacgcccaaaccaacaagtaggactacacggtcacgcactaatatgtcgtccgtgaagactccggaaacagtggtacccaccgcacccgaattgcagataagcaccagcacagatcagcctgtcacccctaagcctacttcaaggactactaggagccgaaccaacatgtctagtgtgaaaaatcccgagagcacggtgccgatcgcccccgagctccccccctccaccagtactgagcaacctgtcacccccgaacccacttcaagagccaccaggggccggaagaatcgctcctcaggaaagacacctgagaccctggtacctacagcaccaaagctggaacctagtaccagcaccgaccaaccagtcacacccgaacccacaagccaggctacgcggggaagaacaaatcggtcctcagtgaaaacgccggaaaccgtcgtacctacagcacccgaacttcagcctagcactagtactgaccaaccagtgactccagagccaacctcacaggccacacggggaagaactgacagatctagtgtgaaaacccccgaaactgtcgtccctacagctccagagttacaagcctcggctagcacagatcagccggtaacatccgaacctacttctcgcacaactcggggacgaaagaaccgctcatcagtgaagaccccagagacagtggtgcctgcagcccccgagctgcaaccctccacttccacagatcagcctgtaacccctgagcctacctcacgggcgacacggggccgcaccaatcggagttccgttaagacaccggagagcatagtaccaattgctcctgaattacagcccagcacgagccggaatcaacttgtgacgccagagcctacatcaagggccacccgctgtcgaacgaatcgcagctctgttaagacaccagagcccgtcgtgcccaccgcccctgagccacaccctactacctctacggatcagcccgtaactccaaaactgacgagtagagccacccgtagaaagaccaacaggtcctctgtcaagacccctaagcccgtggaacccgccgcttctgatctggagcctttcaccccaacagaccaatctgtcacccctgaggcgatcgcgcaaggcggacagagcaagacacttcgtagcagcactgtgcgggccatgccagtgcctacaacacccgagttccagagcccggtaaccacggaccagccaatcagccctgaaccaatcactcaaccgagctgcataaaacgccagcgagctgctgggaatcctggctctctggcagctccgatcgatcacaagccgtgcagcgctcccctagagcctaagagtcaagcctcacgtaaccagagatggggggcggtccgggccgcagagagtctcacagcaatcccagagcctgccagtccccaactcctcgaaactccgatccatgcctctcagattcagaaggtcgaaccagccggacgtagccgctttacacctgaacttcagccaaaggccagccagtcccgaaaaagatcacttgcgaccatggattcaccccctcaccagaagcagcctcagcgtggagaagtgagccagaagactgttattattaaggaagaggaggaggacactgcagagaaacctggcaaggaagaggatgtggtcaccccaaagcctggtaagagaaagagggatcaggctgaagaagaacctaataggatccctagcaggagtctgcgaagaacaaaactcaaccaggagagcactgctccaaaggtgttatttactggggtggttgacgctagaggagagcgcgcagtattagccctaggcggatcactcgcaggctcagccgctgaagcctcccacctggttactgacaggatccggcgcacagtgaaatttctgtgcgctttaggacggggaatccccatcctcagcttagactggctgcaccagagccgaaaggctggtttttttttgccccccgacgagtatgtggtcactgatcccgaacaggagaaaaactttggcttctctcttcaggacgccctgtctagagcgcgtgagcggcgcttgctggaagggtacgaaatttatgtaacgccaggagtgcagcccccccccccccagatgggagagataatctcatgctgtggggggacctatttgccatcaatgccgcggtcttataagccccagagggtggtgatcacctgcccgcaggattttccacattgtagtattcctctgcgagtggggctgccactgcttagcccggagtttctgctcacaggcgtgctgaagcaagaagccaaacctgaggcctttgtcctcagtcctctggaaatgtccagcacatag

SEQ ID NO: 181286 - DNA, 6270 bp, Artificial Sequence
  derived and/or modified sequence
atggaggacacccaagctatcgattgggacgtcgaagaagaagaagaaaccgagcagtcttccgaatcccttcgatgtaacgtggaaccagtcggccggttgcacatcttctctggagcccacgggccagagaaggactttcctctccatttggggaaaaacgttgtcggaaggatgcccgactgtagcgtggcactaccttttcccagcatttccaaacaacacgccgaaatagagatcctggcctgggataaggcccccatcctccgagactgtggatccctcaacggcacccaaatcctccgtccacccaaagtactgtctcctggagtgagccatcggctgcgcgatcaggagctgatcctgtttgctgatctactatgccagtatcaccggctggacgtgagcctgccatttgtcagcagaggacctcttacagtggaggagacacctagggtgcagggcgagacacagccgcagaggctcctgctggccgaggattctgaggaggaagtggactttctgagtgagcgcaggatggtgaagaagtcccgaacaactagctcttctgtcatcgtgccagaaagcgacgaagaaggtcactctcctgtccttgggggtctcggccctccctttgcattcaatctcaactctgacacagacgtggaggagggtcaacaacccgctacagaggaagccagctcagcggcccggcgtggggcaaccgtagaggccaaacagagcgaggccgaggtggtgaccgagattcagctggagaaggatcagcctctggtgaaagaaagagataacgatacaaaggtgaagcgcggagctggcaacggagtggtccccgcgggggtgatccttgagaggtctcagcctccaggagaggatagcgataccgacgtggacgacgactctcgcccaccaggcaggccagctgaggtgcacctggagcgggcccagccattcgggtttatcgactctgacacagacgctgaggaagagcggatccctgcgacacccgttgtaatcccaatgaagaaacgcaagatttttcacggagttggcaccaggggccccggggcacccgggctcgcgcaccttcaggaatcccaggcagggtccgacacggacgtcgaagaaggtaaagccccccaggccgtgcctctggagaagagtcaggcttccatggtgatcaactccgataccgacgatgaagaagaggtctccgccgctcttacgctggcccacctgaaggagtctcagccagctatctggaatcgggacgccgaggaagacatgccccaaagagtggtcctgctgcagcggtcacagaccactacagaacgagatagtgacactgatgttgaggaggaagagctccctgtggagaacagggaggccgtgttgaaggatcacaccaagatacgggcgctggtacgcgctcactccgaaaaagatcagcctccatttggcgacagcgacgacagtgtcgaggccgataagtcatctccaggcattcacttagagcgcagccaggcttctaccactgtggacattaacacgcaggtggagaaggaggtgcccccagggtcagccatcattcacatcaagaagcatcaggtgtcagtggaaggcaccaaccaaactgacgtcaaggccgtgggcgggcctgccaagttgctggttgtcagtctcgaagaggcctggccactgcacggggattgtgagacggacgccgaggaggggactagtctaactgcatccgtggttgcagatgttagaaaatcccagctgcctgctgaaggtgacgctggtgcagagtgggctgctgctgtgctgaaacaggagcgggcacacgaggttggcgcccagggcggtccaccagtggcacaagtcgaacaggacctgccaatatctcgcgaaaacctaactgatttagtcgtggacaccgatactctcggcgagagtacacaacctcaaagggaaggcgctcaggtacccactggcagggagagggagcagcacgttgggggaactaaagacagcgaggacaactatggtgactctgaagatcttgatctccaggctacacagtgctttttagagaaccagggccttgaggctgtccagagcatggaggacgaacctacccaggctttcatgctgacaccccctcaggaactagggccttcccactgtagtttccagacgacgggaacactcgatgagccatgggaagtcctggctacacagcctttctgccttagggagtccgaggattctgaaacccagccgtttgatacacacctggaagcctacggcccctgtctgagtccaccgcgagccatccccggagaccagcaccctgaatccccggtgcacactgaacccatgggcattcaaggccgcggtaggcaaacagtcgataaagtaatgggcatccctaaagagactgcagaaagagtgggaccagagcgaggcccgttggagcgtgaaaccgaaaagctgctgccggagaggcagacagacgtgaccggggaggaggaattgacaaaagggaaacaggacagggagcagaagcagttgctcgctagggatacacagcgacaagagtctgacaaaaatggcgagtctgctagccctgagagggacagagagagcctgaaagtggagattgagactagcgaggagatacaggagaaacaggtgcaaaagcagactctgcctagtaaggcctttgagcgcgaggtggaaaggcctgtggccaatcgggaatgtgatcctgccgagttggaagagaaagtgccaaaggtgatcctggaaagggatacccagaggggtgagcccgaagggggttcccaggaccaaaaaggacaagcttcttctcctacacctgaaccgggcgtcggcgccggtgacctgccagggcctaccagtgcaccagtaccgtcagggtcacagtccggcgggagagggagccctgtctccccccgaagacatcagaagggcttgctcaattgtaaaatgcctccagccgagaaagcttccagaattagagctgcagagaaggtatcccggggcgatcaggagtccccggacgcctgcctgcctccgaccgtgccagaggcacctgccccccctcagaaacctcttaatagccaaagccagaagcaccttgcaccacctccactcctctcaccgctgctgccatctataaaacccaccgtgcgaaagacaagacaggatggaagccaagaggcaccagaagcccccttgtcgagcgagctggagccattccatcctaagccaaagattcgcactcgaaaatcgtcccgaatgacaccctttcccgccacttctgcggctcctgaaccacacccctctacctccactgcccaacccgtcacccctaagccaacgagccaggcaacgaggagcagaaccaaccgttcatcagttaagacaccagaacctgtcgtgcctaccgcccctgagctgcagccttctacgagcacagatcagcctgtgacgtccgaacccacgtcgcaggtgacacgcggacgtaaatcacgcagctctgtgaaaactcccgagacggtggtgcccacagccttggaactgcagccgtcaacttcaactgataggccagtgaccagcgagcccacgagccaggctactcggggcagaaagaataggagtagtgtgaaaacccctgagccagtggtccccactgcaccggaactgcagccatcgacaagcaccgaccaacccgtaacatccgagcctacatatcaggcaacacggggaagaaaaaacaggagctcagtgaagactccggaacccgttgtgcccacagccccagagctgcgcccgtcaacatccaccgacagacctgtgacccctaagccgacatcacgcaccacacggagtcgaacaaacatgtcaagcgtgaaaacccccgagaccgtggtgcccaccgcacctgaattgcagatctctacttccactgaccagcctgtgacccctaagcctactagtagaactacacggtcccgaacaaatatgagttcagtgaaaaaccctgagagtactgtacccatcgctccagaattaccaccctccacctcaacagagcagcctgtcacccccgagcccacgtccagggccactagaggtcgcaagaataggtccagcggcaaaacaccagaaacgctggtcccaacggcaccgaagctggaaccgagcacttctacggatcagccagtcacacctgagccaacctcacaagccaccaggggaagaaccaatcgctcctccgttaagactcccgagactgtcgttccgacagcacctgaattgcagccttcgacttccaccgaccagccagtgaccccggaaccaacctcacaagccacacgcggaagaacagaccggtctagcgtgaaaaccccagaaaccgtcgtgcctaccgctcccgagcttcaggcgagcgcgtccactgaccagcctgtcacctcagaaccaaccagcaggactactcgaggccgcaagaacaggtcttccgtcaaaacgcccgagactgtggtgcctgccgcacccgagttacagccaagtacctctaccgatcagcctgttactcctgaaccgaccagtagggctacgagggggaggacgaatcgaagttcagtaaagactccagagtcaattgtccccattgcaccggagttgcaaccttctacaagccgtaatcaactggtaacacccgagccaacctccagagccactcggtgcaggacgaaccgctcctccgtaaagactcctgagccagttgtgcccaccgccccagaaccccacccaaccacttccacagatcaaccggtgacccccaagctcactagccgggcaactaggcgaaagaccaatcgatccagcgtaaaaacacctaagccggtggagccagcggccagcgacctggaacccttcaccccgaccgaccagtcagtcacccctgaagctattgctcagggtggacagagtaagacgctgcggagttctactgttagggccatgcctgtgcccaccactcctgagttccagtcacccgtcaccacggatcagccaatttccccggaacctattacacaacccagttgtatcaagcgccagcgtgccgccggcaatccaggcagcctggcagcacctattgaccacaagccatgctccgcccccctcgagccaaaatcccaggcaagcaggaaccagcgttggggcgcggtcagggccgccgagagccttacggctattcctgagccagctagccctcaattgttagagactcccattcacgcttcccaaattcagaaagtcgaacccgccgggcgcagccgatttacccctgaacttcagccaaaggcgtcgcaaagccgaaagcgctctctcgccactatggatagcccacctcatcaaaaacaacctcagcgcggtgaggtgtcccaaaagaccgttatcattaaggaagaagaggaggataccgcggagaagccaggcaaggaagaggacgtggtgacacccaagcccggcaagcgaaaacgagaccaggctgaagaggaacctaaccgaattccaagccgctcactgaggcggacaaagctcaaccaagaatctaccgctcccaaggttctgtttacaggagtagtggacgcgcgcggggagcgagccgtattagccctgggcgggtctctagctgggagtgccgccgaggcttctcacttggtgactgatcggattcgacggacggttaagttcctttgtgcgcttggccggggcatccccatcctcagcctggactggctgcaccagtcccgaaaagcaggtttcttcctgccacctgatgagtacgtggtgactgatcctgagcaggagaaaaactttggcttcagcctccaggacgcattgtcccgcgccagagagagacgtcttctggaaggatacgagatttacgtgactccgggtgtgcaaccaccaccgcctcagatgggggaaattataagctgttgtggagggacttacctgccttccatgcctcggtcctataaaccacaacgtgtggtgattacgtgtcctcaggacttcccacactgctcaattcctctgcgcgtagggttaccccttctgtcgcccgagtttctgctgactggtgtcctgaagcaggaagctaagccagaggctttcgtgctatccccactagagatgagctccacttag

SEQ ID NO: 181287 - DNA, 6270 bp, Artificial Sequence
  derived and/or modified sequence
atggaagatacacaggcaatcgattgggatgtggaagaagaggaggaaacagaacagtcatctgaaagtcttcgatgtaatgtggagcctgtgggcagacttcatattttcagtggggcccacggacccgaaaaagatttcccactacaccttgggaagaacgtggtcggcagaatgccagattgttctgtggccctgccgttcccaagtatttccaaacagcacgctgaaatagagatcttggcatgggataaggcaccgatactgcgtgactgcggttctcttaatggtacacaaatcctgagacccccaaaggtgctgtctcctggcgtcagtcacaggctaagggatcaggaattgatccttttcgccgacctcctgtgccagtatcacagactggatgtgtcacttcctttcgtgagccgcgggcccctcaccgttgaagagactcctagagtgcagggcgaaacacagccccagcggttgctgttggcagaggattccgaggaggaggttgatttcctgagcgagcgcagaatggttaagaagagtcggacgacatccagctcagttattgtgcctgaaagtgatgaggagggccattcaccggtcttaggtgggctggggccacctttcgccttcaacctcaattccgatacggacgtcgaagaaggccagcagcccgcaacggaagaagcttcatccgccgccagaagaggggccaccgtggaggctaagcagtcggaagccgaggtggtgacagagattcagctcgagaaagaccagccccttgtcaaggagagggacaacgatacaaaagttaaacggggggctggtaacggtgtcgtgcctgctggcgtgatcttggagaggtctcagccccctggtgaggattccgataccgatgtggacgacgattcaagacctcccgggagaccagctgaggtgcacttggagagagcccagccttttggatttatcgactccgacactgatgcggaggaggagaggattcctgcaacccccgtggtcatccccatgaaaaaaagaaaaatctttcacggggtagggacgcggggccccggcgcacctgggctggctcaccttcaggagtcacaagcaggttcagacaccgatgttgaggaggggaaagcaccccaggcagtgcctctggaaaagtctcaagccagtatggttatcaattctgacacagacgatgaagaagaagtcagtgcagctctaaccctcgctcatctgaaggaaagtcagcccgcaatttggaaccgcgacgccgaggaagatatgccacagcgagtcgtgctgctgcagcgctcacagaccaccacagagcgcgacagcgacaccgatgttgaggaagaggagctgcctgtcgagaatcgtgaggcagttctgaaggatcataccaagataagagctctcgtccgcgcccattccgagaaagaccaacctccatttggcgacagtgatgacagcgtagaggctgataaaagctctcctgggatccaccttgaacggagccaagcttccaccactgtggacatcaatacccaagttgagaaggaggtgccccccggcagtgccataatccacatcaaaaagcatcaggtgtcagttgagggaaccaaccagacggacgttaaggccgttggaggtcctgcaaaactcctcgttgtgtctctggaagaggcctggcccctgcatggcgattgcgaaacagacgcggaggagggcacgagtctgacagcttctgtagtagcggacgtgcggaagtctcagttgcccgccgagggcgacgctggggcggagtgggctgccgctgttctgaaacaggagcgtgcacatgaagtgggtgctcaggggggcccacctgttgcccaggtggagcaggacctgccaatctcccgcgagaatctgactgatctggtggtggataccgatacgttaggcgagtctacccagccacagagggaaggcgcccaggtgccaacaggacgcgagagagagcagcacgttggcggaactaaggactctgaggacaactacggggacagcgaagacctggacctccaggcaacgcagtgcttcctggaaaatcaggggcttgaggccgtgcagagtatggaagatgagcccacccaggcttttatgctaactccacctcaggaactgggcccctcacactgcagctttcagacaacaggcacccttgatgaaccctgggaagttctcgcaacacagcccttctgtctgcgcgagtctgaagattccgagacccaacccttcgacacccacctcgaagcatacggaccctgtctcagcccccccagggctatcccgggtgatcagcaccctgagagccctgtgcatactgagcccatgggcatccaaggccggggccggcagacagtggacaaagtgatgggcataccgaaagagacggcggaacgggtcgggcctgagcgaggtcccctcgagcgtgaaactgaaaaacttctgcctgagcgccagactgacgtgactggcgaggaagagctgactaagggaaaacaggaccgcgaacagaaacaacttctcgccagggacacacaacggcaggagtccgataagaacggcgagtcggcctctcccgaacgggaccgtgaatcgctgaaggttgagattgagacgagcgaggaaatccaggaaaagcaggttcaaaaacagacactcccatccaaggcctttgaacgcgaggttgagaggccagtggcaaatagggaatgtgacccagctgaactcgaagagaaggtgcccaaggtgatcctcgaaagggatacgcagcgtggagaacccgaaggaggatctcaagatcagaaggggcaggcttccagcccaacccctgagccaggcgttggggctggtgatctgcccggacctacaagtgcccccgtccccagtggcagccagtccgggggccgcgggagccctgtctctccacggcgccaccaaaaggggctgcttaactgtaaaatgccccctgctgagaaagccagtagaatcagagcagcagagaaggtgtcccggggcgatcaggaaagccctgacgcgtgtttgccccccacagtccctgaagccccagcccccccccagaagccattgaatagtcagagccaaaagcacctggctccgccccccttattgagtccactccttcccagcataaagcctaccgttcggaagaccagacaagatggaagccaggaggcaccagaggcaccactgtcttcagaattggaaccattccatcccaagcccaagataagaactcgaaaatcatcgagaatgaccccgttccccgcaacatctgcagccccagagccacatccttcaacctctacagctcagcctgttaccccaaagcctacttctcaagccacaaggagcagaacaaacagaagtagtgtcaagacccccgaaccagtggtccctacggcgccagagctccagccatccacaagcaccgaccagcccgttacatctgagccaacaagtcaagtgacccggggtcgcaagtcacgctcatctgtgaagacccctgagacggtggtgcctactgccctggagcttcagccatctacttctacggacaggccagtcacaagcgaaccgacctcccaggctacacgcggtcgtaagaaccgttcgtctgtgaagacccctgaacccgtggtgcctaccgcgcccgagttgcagccaagcacttccacagaccagcccgtcacctccgagcctacctaccaggctaccagaggcaggaaaaaccggtcctccgtgaagacccccgagccagtggttcctacagccccagagctgcgtccctcaaccagtacagatcggcctgtgaccccaaaacctaccagcagaaccacgcgcagcaggactaacatgtccagcgtgaagaccccggaaacagttgttcccacggctcccgagctccagatctctacatcaactgaccagcccgtgacaccaaagccaaccagtaggaccactcgctctagaacaaatatgtcttctgtgaagaacccggaatctacagtcccaatcgctccagagctcccaccctcaactagtacagagcagccagtgacaccagagcccaccagccgggcaactaggggccgcaagaataggtcctcaggaaagacacccgagacactggtgcctaccgctccaaagttggaacctagcactagcactgatcagcccgtgacacccgagcctacatcgcaggctaccaggggccgtacaaataggtctagtgtgaagacacccgaaactgtggtgccaaccgcccccgagctgcagccctcaacaagtaccgaccagcctgtcacacccgagccgacctctcaggctacccggggaaggacagatagatcttccgtcaaaactccggaaacagtggtgcctaccgctcctgaactccaagcctctgcttctaccgatcaacctgtgacgtcagaacctacatctagaactacccgtggaagaaaaaaccgaagttcagtgaaaacgccggaaaccgtggtacccgccgccccagagttgcagcccagcacctcaactgatcaaccggtcacacctgagccgacgtccagggccaccaggggacggaccaataggagttccgttaagactccagagagcatcgtccctattgcacctgaactgcagcccagtaccagtcggaaccagttagtgacaccagaacctacaagtcgtgcaacccggtgtaggaccaaccggtctagcgttaagaccccggaacctgtggtcccaacggctccggagccccatcctactactagcaccgaccagcctgtgacacctaagcttacttcaagagccactcgccggaagacaaacaggtctagcgtgaaaacaccaaagccagtggaaccagccgcaagtgatctggagcctttcactcctaccgaccaaagcgtaacccctgaggccattgcccagggaggccagagtaagacgctcaggagctcaacagtgcgcgccatgccagtacccactacccctgaattccagagcccagtcaccacagatcagcccatatcacctgagcctattacgcagccctcttgtatcaaaagacagcgcgctgcaggcaaccccggttctctcgcagcacccatcgaccacaagccgtgcagcgcccctctggaacccaaaagccaggcttcccgtaaccagcgctggggagcagtccgtgccgccgaaagcctgacagccattcccgaacccgcgagtccgcaactcctggaaaccccaatccacgccagccaaatccagaaggttgagcctgcggggaggagtaggtttacaccggagcttcagccaaaggctagtcaaagcaggaagcgctctctcgccactatggactctcccccacaccaaaagcaaccgcaacggggggaagttagccagaagacggttatcataaaggaagaggaagaagacacggccgagaagcccggcaaggaggaagatgtggtgaccccaaagcctggtaaacgcaagagagatcaggcggaggaggagcctaacagaatcccaagtcggagtctaaggcggactaaactcaaccaggagtctaccgcacccaaagttctctttactggcgtcgtcgacgctaggggggaacgagcggtactggcgttagggggatcactcgcgggctccgccgctgaggcctcccatctggtaaccgacagaatcagaagaaccgtaaagtttttgtgtgccctgggcagggggattcctatcctgagcctcgactggcttcaccagagccggaaggcaggtttctttttaccccccgacgaatatgtggtgacagatcccgagcaagagaaaaattttgggttttcattacaggatgccctatcacgtgccagagaacggcgacttctggaggggtatgagatctacgtaactccaggtgtgcaacctcccccaccccagatgggcgaaatcattagctgttgcggtgggacatatctgcctagcatgcccaggtcatacaaaccccagagggtagtcattacatgtcctcaggactttccccattgttcaatccctctgagagtgggacttccccttctgtcaccagaatttttgctcaccggggtgctgaaacaggaggcaaaaccggaggcttttgtgctttccccactcgagatgtcctccacctag

SEQ ID NO: 181288 - DNA, 6270 bp, Artificial Sequence
  derived and/or modified sequence
atggaggacacccaggccatcgactgggatgtggaggaggaggaggagacagagcagagcagcgagagcctgcgctgcaatgtggagcctgtgggccgcctgcacatcttcagcggggcccacggccctgagaaggacttccccctgcacctgggcaagaatgtggtgggccgcatgccagactgcagcgtggccctgcccttccccagcatcagcaagcagcacgccgagattgagatcctggcctgggacaaggcccccatcctgcgggactgtggcagcctgaatggcacccagatcctgcggccccccaaggtgctgagccctggggtgagccaccggctgcgggaccaggagctgatcctgtttgctgacctgctgtgccagtaccaccggctggatgtgtccctgccctttgtgtcccggggccccctgactgtggaggagaccccccgggtgcagggcgagacccagccccagaggctgctgctggccgaggacagcgaggaggaggtggacttcctgtctgagaggaggatggtgaagaagagcaggaccaccagcagcagcgtcatcgtgcctgagagtgatgaggagggccacagccctgtgctgggcggcctgggccccccatttgccttcaacctgaacagcgacacagatgtggaggagggccagcagcctgccacagaggaggccagcagcgctgcccggcggggggccaccgtggaggccaagcagagcgaggccgaggtggtgacagagatccagctggagaaggaccagcccctggtgaaggagcgggacaatgacaccaaggtgaagagaggagctggaaatggagtggtgcctgctggggtcatcctggagaggagccagcccccaggagaagattctgacacagatgtggatgatgacagcaggcctcctggccggcctgctgaggtgcacctggagcgggcccagcccttcggcttcatcgacagcgacacagatgctgaggaggagcgcatcccagccacccctgtggtgatccccatgaagaagaggaagatcttccacggcgtgggcacccggggccctggggcccctggcctggcccacctgcaggagagccaggccggcagtgacacagatgtggaggagggcaaggccccccaggccgtgcccctggagaagagccaggcctccatggtgatcaacagcgacacagatgatgaggaggaggtgtctgctgccctgaccctggcccacctgaaggagagccagcctgccatctggaacagagatgctgaggaggacatgccccagagggtggtgctgctgcagaggagccagaccaccacagagcgggacagcgacacagatgtggaggaggaggagctgcctgtggagaaccgggaggccgtgctgaaggaccacaccaagatccgggccctggtgcgggcccacagcgagaaggaccagcccccatttggagacagtgatgacagcgtggaggccgacaagagcagccctggcatccacctggagaggagccaggccagcaccaccgtggacatcaacacccaggtggagaaggaggtgcccccaggcagcgccatcatccacatcaagaagcaccaggtgtctgtggagggcaccaaccagacagatgtgaaggctgtgggcggccctgccaagctgctggtggtgtccctggaggaggcctggcccctgcacggggactgtgaaacagatgctgaggagggcaccagcctgacagcctctgtggtggctgatgtgaggaagagccagctgcctgcagaaggagatgctggagctgagtgggccgctgctgtgctgaagcaggagcgggcccacgaggtgggcgcccagggcggcccccctgtggcccaggtggagcaggacctgcccatcagccgggagaacctgacagacctggtggtggacacagacaccctgggggagagcacccagccccagcgggagggcgcccaggtgcccaccggccgggagcgggagcagcacgtgggcggcaccaaggacagcgaggacaactacggggacagcgaggacctggacctgcaggccacccagtgcttcctggagaaccagggcctggaggccgtgcagagcatggaggatgagcccacccaggccttcatgctgaccccaccccaggagctgggccccagccactgcagcttccagaccaccggcaccctggatgagccctgggaggtgctggccacccagcccttctgcctgcgggagagtgaagattctgagacccagccctttgacacccacctggaggcctacggcccctgcctgagccccccccgggccatccctggggaccagcaccctgagagccctgtgcacacagagcccatgggcatccagggccggggccggcagacagtggacaaggtgatgggcatccccaaggagacagctgagcgggtgggccctgagcggggccccctggagcgggagacagagaagctgctgcctgagcggcagacagatgtgactggagaggaggagctgaccaagggcaagcaggaccgggagcagaagcagctgctggcccgggacacccagaggcaggagagtgacaagaatggagagagcgccagccctgagcgggaccgggagagcctgaaggtggagattgagaccagcgaggagatccaggagaagcaggtgcagaagcagaccctgcccagcaaggcctttgagcgggaggtggagaggcctgtggccaacagagaatgtgaccctgctgagctggaggagaaggtgcccaaggtgatcctggagcgggacacccagagaggagagcctgagggcggcagccaggaccagaagggccaggccagcagccccaccccagagcccggggtgggcgctggggacctgcccggccccaccagcgcccctgtgcccagcggcagccagagcggcggccggggcagccctgtgagcccccggcggcaccagaagggcctgctgaactgcaagatgcccccagctgagaaggccagccgcatccgggctgctgagaaggtgtccagaggagaccaggagagcccagatgcctgcctgcccccaacagtgcctgaggccccagccccaccccagaagcccctgaacagccagagccagaagcacctggcccccccacccctgctgagccccctgctgcccagcatcaagcccaccgtgaggaagacccggcaggacggcagccaggaggcccctgaggcccccctgagcagcgagctggagcccttccaccccaagcccaagatccgcaccaggaagagcagcaggatgacccccttccctgccaccagcgctgcccctgagccccaccccagcaccagcacagcccagcctgtgacccccaagcccaccagccaggccaccaggagcaggaccaacagaagctctgtgaagaccccagagcctgtggtgcccacagcccctgagctgcagcccagcaccagcacagaccagcctgtgaccagcgagcccaccagccaggtgacccggggcaggaagagccgcagctctgtgaagaccccagagaccgtggtgcccacagccctggagctgcagcccagcaccagcacagacaggcctgtgaccagcgagcccaccagccaggccacccggggcaggaagaacagaagctctgtgaagaccccagagcctgtggtgcccacagcccctgagctgcagcccagcaccagcacagaccagcctgtgaccagcgagcccacctaccaggccacccggggcaggaagaacagaagctctgtgaagaccccagagcctgtggtgcccacagcccctgagctgcggcccagcaccagcacagacaggcctgtgacccccaagcccaccagcaggaccaccaggagcaggaccaacatgagctctgtgaagaccccagagaccgtggtgcccacagcccctgagctgcagatcagcaccagcacagaccagcctgtgacccccaagcccaccagcaggaccaccaggagcaggaccaacatgagctctgtgaagaaccctgagagcacagtgcccatcgcccctgagctgccccccagcaccagcacagagcagcctgtgaccccagagcccaccagccgggccacccggggcaggaagaacagaagcagcggcaagaccccagagaccctggtgcccacagcccccaagctggagcccagcaccagcacagaccagcctgtgaccccagagcccaccagccaggccacccggggccgcaccaacagaagctctgtgaagaccccagagaccgtggtgcccacagcccctgagctgcagcccagcaccagcacagaccagcctgtgaccccagagcccaccagccaggccacccggggccgcacagacaggagctctgtgaagaccccagagaccgtggtgcccacagcccctgagctgcaggccagcgccagcacagaccagcctgtgaccagcgagcccaccagcaggaccacccggggcaggaagaacagaagctctgtgaagaccccagagaccgtggtgcctgctgcccctgagctgcagcccagcaccagcacagaccagcctgtgaccccagagcccaccagccgggccacccggggccgcaccaacagaagctctgtgaagaccccagagagcatcgtgcccatcgcccctgagctgcagcccagcaccagcaggaaccagctggtgaccccagagcccaccagccgggccacccgctgcaggaccaacagaagctctgtgaagaccccagagcctgtggtgcccacagcccctgagccccaccccaccaccagcacagaccagcctgtgacccccaagctgaccagccgggccaccaggaggaagaccaacagaagctctgtgaagacccccaagcctgtggagcctgctgccagtgacctggagcccttcacccccacagaccagagcgtgaccccagaggccatcgcccagggcggccagagcaagaccctgcggagcagcacagtgcgggccatgcctgtgcccaccaccccagagttccagagccctgtgaccacagaccagcccatcagccctgagcccatcacccagcccagctgcatcaagaggcagagagctgctggcaaccctggcagcctggccgcccccatcgaccacaagccctgcagcgcccccctggagcccaagagccaggccagcaggaaccagcgctggggcgctgtgcgggctgctgagagcctgacagccatccctgagcccgccagcccccagctgctggagacccccatccacgccagccagatccagaaggtggagcccgccggccgcagccgcttcaccccagagctgcagcccaaggccagccagagcaggaagaggagcctggccaccatggacagccccccccaccagaagcagccccagagaggagaggtgtcccagaagacagtcatcatcaaggaggaggaggaggacacagctgagaagccaggcaaggaggaggatgtggtgacccccaagccaggcaagaggaagagggaccaggccgaggaggagcccaaccgcatccccagccgcagcctgcggaggaccaagctgaaccaggagagcacagcccccaaggtgctcttcaccggggtggtggatgcccggggggagagagctgtgctggccctgggcggcagcctggccggcagcgctgctgaggccagccacctggtgacagaccgcatccggaggacagtgaagttcctgtgtgccctgggccggggcatccccatcctgagcctggactggctgcaccagagcaggaaggccggcttcttcctgcccccagatgaatatgtggtgacagatcctgagcaggagaagaactttggcttcagcctgcaggatgccctgagccgggcccgggagcggcggctgctggagggctatgagatctacgtgaccccaggagtgcagcccccaccaccccagatgggagagatcatcagctgctgcggcggcacctacctgcccagcatgcccaggagctacaagccccagagggtggtgatcacctgcccccaggacttcccccactgcagcatccccctgcgggtgggcctgcccctgctgagccctgagttcctgctgactggagtgctgaagcaggaggccaagccagaggcctttgtgctgagccccctggagatgagcagcacctag

SEQ ID NO: 181289 - DNA, 3751 bp, Artificial Sequence
  derived and/or modified sequence
caccatgtctaggaggaccgaggaaaggcgctctggccttaccagacacgtcggacgtctatgacacagcccctctatccgttgccggcagctggcgccagactctctggtcgcggtttggaactgcgcgggaagtgggtggtgggcgggcaagcggtagtgggttgtcccttggagctgcccaatcgacgtgcattattctgttggcgcacggcggccttcaattaccgtctcattaactgatctcagcagcctgggagacaccacctatttgaactctaagggggcggggctttgggtgtgcctccgctcgactggctgcggttgtgaaagacagcggcagaagccaatcagcaaataagctctttttcggcacacgcagtcgctccacctgggtcgcgaccgttactggtggcgcgcgcggggacttaaagtagatcatggaggacacccaggctattgactgggatgttgaagaagaggaggagacagagcaatccagtgaatccttgaggtgtaacgtggagccagtagggcggctacatatctttagtggtgcccatggaccagaaaaagatttcccactacacctcgggaagaatgtggtaggccgaatgcctgactgctctgtggccctgccctttccatctatctccaaacaacatgcagagattgaaatcttagcctgggacaaggcacctatcctccgagactgtgggagccttaatggtactcaaatcctgagacctcctaaggttttgagccctggggtgagtcaccgtctgagggaccaggaattgattctctttgctgacttgctctgccagtaccatcgcctggatgtctctctgccctttgtctcccggggccctctgacagtagaagagacacccagagtacagggagaaactcaaccccagaggcttctgttggctgaggactcggaggaggaagtagattttctttctgaaaggcgtatggtaaaaaaatcaaggaccacatcttcctctgtgatagttccagagagtgatgaagaggggcattccccggtcctgggcggccttgggccgccttttgccttcaatttgaacagtgacacagatgtggaagaaggtcagcaaccagccacagaggaggcctcctcagctgccagaagaggtgccactgtagaggcaaagcagtctgaagctgaagttgtaactgaaatccagcttgaaaaggatcagcctttagtgaaggagagggacaatgatacaaaagtcaagaggggtgcagggaatggggtggttccagctggggtgattctggagaggagccaacctcctggagaggacagtgacacagatgtggatgatgacagcaggcctcctggaaggccagctgaggtccatttggaaagggctcagccttttggcttcatcgacagaccaacctgtcacccctaagcccacatctcggaccactaggagcaggacaaatatgtcctctgtgaagaaccctgaatcaactgtccctatagcccctgagctcccaccttccacctccacagagcagcctgtcacccctgagcccacatctcgggctactaggggaagaaaaaatagatcctctggcaagacccctgaaacacttgtccccacagcccctaagctcgagccttccacttccacagaccaacctgtcactcctgagcccacatctcaggccaccaggggcaggacaaataggtcctctgtgaagacccctgaaacagttgtccccacagcccctgagctccagccttccacctccacagaccagcctgttacccctgagcctacgtctcaggctactaggggaagaacagatagatcctctgtcaagactcctgaaacagttgtccccacagcccctgagctacaggcttccgcctccacagaccagcctgtcacctctgagcccacatctcggaccactaggggaagaaaaaatcggtcctctgtcaagacccctgaaacagttgtgcccgcagcccctgagctccagccttccacctccacagaccaacctgtcacccctgagcccacatctcgggccactaggggcaggacaaataggtcctctgtcaagacccctgaatcaattgtccctatagcccctgagcttcagccttccacctccagaaaccagcttgtcacccctgagcccacatctcgggccactaggtgcaggacaaataggtcctctgtcaagacccctgagccagttgtccccacagcccctgagccccatcctaccacctccacagaccagcctgtcacccccaagctcacatctagggccactaggagaaagacaaataggtcctctgtcaagactcccaaaccagttgaaccagcagcctctgatcttgagccttttacccccacagaccagtccgtcacccctgaggccatagctcagggtggtcagagcaaaacactgaggtcttccacagtaagagctatgccggttcctaccacccctgaattccaatctcctgtcaccacagaccagcctatttcccctgagcctattactcaacccagttgcatcaagaggcagagagccgctgggaaccctggctccctcgcagctcccattgaccataagccttgctctgcacccttggaacctaaatcccaggcctcaaggaaccaaagatggggagcagtgagagcagctgaatcccttacagccattcctgagcctgcctctccccagcttcttgagacaccaattcatgcctcccagatccaaaaggtggaaccagcaggtagatctaggttcaccccggagctccagcctaaggcctctcaaagccgcaagaggtctttagctaccatggattcaccaccacatcaaaaacagccccaaagaggggaagtctcccagaagacagtgattatcaaggaagaggaagaagatactgcagagaagccagggaaggaagaggatgtcgtgactccaaaaccaggcaagagaaagagagaccaggcagaggaggagcccaacagaataccaagccgcagcctccgacggaccaaacttaaccaagaatcaacagcccccaaagtgctcttcacaggagtggtggatgctcggggagagcgggctgtgctggcactggggggaagtctggctggttcagcggcagaggcttcccacctggtcactgatcgcatccgccggacagtcaagttcctgtgtgccctggggcggggaatccccattctgtccctggactggctgcatcagtcccgcaaggctggtttcttcttacccccggatgaatatgtggtgaccgaccctgagcaagagaagaactttggctttagccttcaagacgcactgagcagggctcgggagcgaaggctgctagagggctatgagatctatgtgacccctggagtccagccaccaccacctcagatgggagagattattagctgctgtggaggcacatacctacccagcatgcctcggtcctataagcctcagagagttgtgatcacatgccctcaggacttccctcattgctccattccactacgggttgggctgcccctcctctcgcctgagttcctgctgactggagtgctgaagcaggaagccaagccagaggcctttgtcctctcccctttggagatgtcatccacctgagaactccactacccttttccctcccagaccacgaattagaagatatgtggaagaaagaactcagggcgtt

SEQ ID NO: 181290 - DNA, 3751 bp, Artificial Sequence
  derived and/or modified sequence
caccatgtctaggaggaccgaggaaaggcgctctggccttaccagacacgtcggacgtctatgacacagcccctctatccgttgccggcagctggcgccagactctctggtcgcggtttggaactgcgcgggaagtgggtggtgggcgggcaagcggtagtgggttgtcccttggagctgcccaatcgacgtgcattattctgttggcgcacggcggccttcaattaccgtctcattaactgatctcagcagcctgggagacaccacctatttgaactctaagggggcggggctttgggtgtgcctccgctcgactggctgcggttgtgaaagacagcggcagaagccaatcagcaaataagctctttttcggcacacgcagtcgctccacccgggtcgcgaccgttactggtggcgcgcgcggggacttaaagtagatcatggaggacacccaggctattgactgggatgttgaagaagaggaggagacagagcaatccagtgaatccttgaggtgtaacgtggagccagtagggcggctacatatctttagtggtgcccatggaccagaaaaagatttcccactacacctcgggaagaatgtggtaggccgaatgcctgactgctctgtggccctgccctttccatctatctccaaacaacatgcagagattgaaatcttagcctgggacaaggcacctatcctccgagactgtgggagccttaatggtactcaaatcctgagacctcctaaggttttgagccctggggtgagtcaccgtctgagggaccaggaattgattctctttgctgacttgctctgccagtaccatcgcctggatgtctctctgccctttgtctcccggggccctctgacagtagaagagacacccagagtacagggagaaactcaaccccagaggcttctgttggctgaggactcggaggaggaagtagattttctttctgaaaggcgtatggtaaaaaaatcaaggaccacatcttcctctgtgatagttccagagagtgatgaagaggggcattccccggtcctgggcggccttgggccgccttttgccttcaatttgaacagtgacacagatgtggaagaaggtcagcaaccagccacagaggaggcctcctcagctgccagaagaggtgccactgtagaggcaaagcagtctgaagctgaagttgtaactgaaatccagcttgaaaaggatcagcctttagtgaaggagagggacaatgatacaaaagtcaagaggggtgcagggaatggggtggttccagctggggtgattctggagaggagccaacctcctggagaggacagtgacacagatgtggatgatgacagcaggcctcctggaaggccagctgaggtccatttggaaagggctcagccttttggcttcatcgacagaccaacctgtcacccctaagcccacatctcggaccactaggagcaggacaaatatgtcctctgtgaagaaccctgaatcaactgtccctatagcccctgagctcccaccttccacctccacagagcagcctgtcacccctgagcccacatctcgggctactaggggaagaaaaaatagatcctctggcaagacccctgaaacacttgtccccacagcccctaagctcgagccttccacttccacagaccaacctgtcactcctgagcccacatctcaggccaccaggggcaggacaaataggtcctctgtgaagacccctgaaacagttgtccccacagcccctgagctccagccttccacctccacagaccagcctgttacccctgagcctacgtctcaggctactaggggaagaacagatagatcctctgtcaagactcctgaaacagttgtccccacagcccctgagctacaggcttccgcctccacagaccagcctgtcacctctgagcccacatctcggaccactaggggaagaaaaaatcggtcctctgtcaagacccctgaaacagttgtgcccgcagcccctgagctccagccttccacctccacagaccaacctgtcacccctgagcccacatctcgggccactaggggcaggacaaataggtcctctgtcaagacccctgaatcaattgtccctatagcccctgagcttcagccttccacctccagaaaccagcttgtcacccctgagcccacatctcgggccactaggtgcaggacaaataggtcctctgtcaagacccctgagccagttgtccccacagcccctgagccccatcctaccacctccacagaccagcctgtcacccccaagctcacatctagggccactaggagaaagacaaataggtcctctgtcaagactcccaaaccagttgaaccagcagcgtctgatcttgagccttttacccccacagaccagtccgtcacccctgaggccatagctcagggtggtcagagcaaaacactgaggtcttccacagtaagagctatgccggttcctaccacccctgaattccaatctcctgtcaccacagaccagcctatttcccctgagcctattactcaacccagttgcatcaagaggcagagagccgctgggaaccctggctccctcgcagctcccattgaccataagccttgctctgcacccttggaacctaaatcccaggcctcaaggaaccaaagatggggagcagtgagagcagctgaatcccttacagccattcctgagcctgcctctccccagcttcttgagacaccaattcatgcctcccagatccaaaaggtggaaccagcaggtagatctaggttcaccccggagctccagcctaaggcctctcaaagccgcaagaggtctttagctaccatggattcaccaccacatcaaaaacagccccaaagaggggaagtctcccagaagacagtgattatcaaggaagaggaagaagatactgcagagaagccagggaaggaagaggatgtcgtgactccaaaaccaggcaagagaaagagagaccaggcagaggaggagcccaacagaataccaagccgcagcctccgacggaccaaacttaaccaagaatcaacagcccccaaagtgctcttcacaggagtggtggatgctcggggagagcgggctgtgctggcactggggggaagtctggctggttcagcggcagaggcttcccacctggtcactgatcgcatccgccggacagtcaagttcctgtgtgccctggggcggggaatccccattctgtccctggactggctgcatcagtcccgcaaggctggtttcttcttacccccggatgaatatgtggtgaccgaccctgagcaagagaagaactttggctttagccttcaagacgcactgagcagggctcgggagcgaaggctgctagagggctatgagatctatgtgacccctggagtccagccaccaccacctcagatgggagagattattagctgctgtggaggcacatacctacccagcatgcctcggtcctataagcctcagagagttgtgatcacatgccctcaggacttccctcattgctccattccactacgggttgggctgcccctcctctcgcctgagttcctgctgactggagtgctgaagcaggaagccaagccagaggcctttgtcctctcccctttggagatgtcatccacctgagaactccactacccttttccctcccagaccacgaattagaagatatgtggaagaaagaactcagggcgtt

SEQ ID NO: 181291 - DNA, 3751 bp, Artificial Sequence
  derived and/or modified sequence
caccatgtctaggaggaccgaggaaaggcgctctggccttaccagacacgtcggacgtctatgacacagcccctctatccgttgccggcagctggcgccagactctctggtcgcggtttggaactgcgcgggaagtgggtggtgggcgggcaagcggtagtgggttgtcccttggagctgcccaatcgacgtgcattattctgttggcgcacggcggccttcaattaccgtctcattaactgatctcagcagcctgggagacaccacctatttgaactctaagggggcggggctttgggtgtgcctccgctcgactggctgcggttgtgaaagacagcggcagaagccaatcagcaaataagctctttttcggcacacgcagtcgctccacccgggtcgcgaccgttactggtggcgcgcgcggggacttaaagtagatcatggaggacacccaggctattgactgggatgttgaagaagaggaggagacagagcaatccagtgaatccttgaggtgtaacgtggagccagtagggcggctacatatctttagtggtgcccatggaccagaaaaagatttcccactacacctcgggaagaatgtggtaggccgaatgcctgactgctctgtggccctgccctttccatctatctccaaacaacatgcagagattgaaatcttagcctgggacaaggcacctatcctccgagactgtgggagccttaatggtactcaaatcctgagacctcctaaggttttgagccctggggtgagtcaccgtctgagggaccaggaattgattctctttgctgacttgctctgccagtaccatcgcctggatgtctctctgccctttgtctcccggggccctctgacagtagaagagacacccagagtacagggagaaactcaaccccagaggcttctgttggctgaggactcggaggaggaagtagattttctttctgaaaggcgtatggtaaaaaaatcaaggaccacatcttcctctgtgatagttccagagagtgatgaagaggggcattccccggtcctgggcggccttgggccgccttttgccttcaatttgaacagtgacacagatgtggaagaaggtcagcaaccagccacagaggaggcctcctcagctgccagaagaggtgccactgtagaggcaaagcagtctgaagctgaagttgtaactgaaatccagcttgaaaaggatcagcctttagtgaaggagagggacaatgatacaaaagtcaagaggggtgcagggaatggggtggttccagctggggtgattctggagaggagccaacctcctggagaggacagtgacacagatgtggatgatgacagcaggcctcctggaaggccagctgaggtccatttggaaagggctcagccttttggcttcatcgacagaccaacctgtcacccctaagcccacatctcggaccactaggagcaggacaaatatgtcctctgtgaagaaccctgaatcaactgtccctatagcccctgagctcccaccttccacctccacagagcagcctgtcacccctgagcccacatctcgggctactaggggaagaaaaaatagatcctctggcaagacccctgaaacacttgtccccacagcccctaagctcgagccttccacttccacagaccaacctgtcactcctgagcccacatctcaggccaccaggggcaggacaaataggtcctctgtgaagacccctgaaacagttgtccccacagcccctgagctccagccttccacctccacagaccagcctgttacccctgagcctacgtctcaggctactaggggaagaacagatagatcctctgtcaagactcctgaaacagttgtccccacagcccctgagctacaggcttccgcctccacagaccagcctgtcacctctgagcccacatctcggaccactaggggaagaaaaaatcggtcctctgtcaagacccctgaaacagttgtgcccgcagcccctgagctccagccttccacctccacagaccaacctgtcacccctgagcccacatctcgggccactaggggcaggacaaataggtcctctgtcaagacccctgaatcaattgtccctatagcccctgagcttcagccttccacctccagaaaccagcttgtcacccctgagcccacatctcgggccactaggtgcaggacaaataggtcctctgtcaagacccctgagccagttgtccccacagcccctgagccccatcctaccacctccacagaccagcctgtcacccccaagctcacatctagggccactaggagaaagacaaataggtcctctgtcaagactcccaaaccagttgaaccagcagcctctgatcttgagccttttacccccacagaccagtccgtcacccctgaggccatagctcagggtggtcagagcaaaacactgaggtcttccacagtaagagctatgccggttcctaccacccctgaattccaatctcctgtcaccacagaccagcctatttcccctgagcctattactcaacccagttgcatcaagaggcagagagccgctgggaaccctggctccctcgcagctcccattgaccataagccttgctctgcacccttggaacctaaatcccaggcctcaaggaaccaaagatggggagcagtgagagcagctgaatcccttacagccattcctgagcctgcctctccccagcttcttgagacaccaattcatgcctcccagatccaaaaggtggaaccagcaggtagatctaggttcaccccggagctccagcctaaggcctctcaaagccgcaagaggtctttagctaccatggattcaccaccacatcaaaaacagccccaaagaggggaagtctcccagaagacagtgattatcaaggaagaggaagaagatactgcagagaagccagggaaggaagaggatgtcgtgactccaaaaccaggcaagagaaagagagaccaggcagaggaggagcccaacagaataccaagccgcagcctccgacggaccaaacttaaccaagaatcaacagcccccaaagtgctcttcacaggagtggtggatgctcggggagagcgggctgtgctggcactggggggaagtctggctggttcagcggcagaggcttcccacctggtcactgatcgcatccgccggacagtcaagttcctgtgtgccctggggcggggaatccccattctgtccctggactggctgcatcagtcccgcaaggctggtttcttcttacccccggatgaatatgtggtgaccgaccctgagcaagagaagaactttggctttagccttcaagacgcactgagcagggctcgggagcgaaggctgctagagggctatgagatctatgtgacccctggagtccagccaccaccacctcagatgggagagattattagctgctgtggaggcacatacctacccagcatgcctcggtcctataagcctcagagagttgtgatcacatgccctcaggacttccctcattgctccattccactacgggttgggctgcccctcctctcgcctgagttcctgctgactggagtgctgaagcaggaagccaagccagaggcctttgtcctctcccctttggagatgtcatccacctgagaactccactacccttttccctcccagaccacgaattagaagatatgtggaagaaagaactcagggcgtt

SEQ ID NO: 181292 - DNA, 6270 bp, Artificial Sequence
  derived and/or modified sequence
atggaggacacccaggccatcgactgggacgtggaggaggaggaggagacggaacagtcaagcgagtcacttcgttgcaatgtcgagcctgtgggacgcctccacatattttctggagcacatgggcctgagaaggacttcccactccacctgggtaaaaatgtggtggggagaatgcctgactgttccgtcgctcttccgttcccttccatctctaaacagcatgctgaaatagagattctggcatgggataaggcccccattttgagagattgcgggtctctgaacggaacgcagatcctgcgacccccaaaggtgctttcccccggtgtgagccacagactcagagaccaggagctgatcctcttcgcagatcttttgtgccagtaccaccgcctggacgtctccctcccctttgtttccaggggccccctgaccgtggaagagactccaagagtgcagggagaaacccaaccccagagactcttgctggcggaggattcagaggaggaagtagattttctgtcagaacgccgcatggtcaagaagagtaggacaaccagctcctcagttattgtgccagagagcgatgaggaaggccattcgccagtgctgggggggttgggtccaccctttgccttcaatctcaattccgatacagatgtcgaagagggccagcagccagcaacggaagaagccagctctgctgcgagacgcggagctaccgtggaagcgaaacagagcgaggccgaggtcgtaacggaaattcagctggagaaggaccagcccttggttaaagagcgagataatgatacaaaggtcaagcgcggcgctggcaacggggtcgtgccggcgggcgtgatcctggagaggagtcaacctccaggcgaagactccgatactgatgtagatgatgactctaggcctcctgggaggcctgcagaagtccacttggagcgtgcccaaccctttggttttatcgattccgacacggacgccgaggaggaaaggatacctgcgacgcccgtggtgattccaatgaaaaagcgcaaaatttttcacggggtgggtactaggggacctggagccccgggattagctcacctgcaggagagtcaggccggatctgacaccgacgttgaagaaggaaaagcacctcaggcggtccctctcgagaagtctcaagctagtatggtcattaattcagatacagacgacgaagaagaagtctctgcggctctgactctcgcccaccttaaggagtcccagccagcaatatggaacagggatgccgaggaagacatgccacagagggtggttctgcttcaaagatctcagactaccactgaaagggatagcgatacagacgtagaggaggaggaactgccagtggagaacagagaggccgtgttgaaggatcacacaaagattagggctttggtgcgcgcccattcagagaaggaccagcccccatttggggactcagatgacagcgtggaagccgacaaatcgagtccgggaatccacctagagcgctcccaagcctctactactgtggatatcaacacccaggtcgagaaagaagtgcctccagggtcagcaattattcacatcaagaaacatcaggtgtcagttgaaggcacaaaccagaccgatgtcaaagctgttggcggcccagccaaattacttgtggtgtcccttgaagaggcctggcctctgcatggtgattgtgagactgacgccgaagagggaacatcccttactgcctccgtggtcgcagacgtcagaaagtctcagctgcccgccgaaggggatgctggtgccgaatgggcagctgccgttttgaagcaggaacgtgcccatgaggtgggagctcagggcggcccccctgttgcccaggtggagcaggatctcccaatcagccgcgaaaatttaacagatctagtcgtggacactgatacactgggcgaaagcacccagccccagcgggagggcgcgcaagttcccactggcagagaacgtgagcagcatgtgggcggcacaaaggacagcgaagataactacggagattctgaggatctcgatttgcaggccacccagtgctttctggaaaaccaaggcctcgaagccgtgcagtctatggaggatgaacccacacaggcattcatgctaacaccaccccaggagctgggtcctagccattgctcatttcagactactggtacgctggatgagccatgggaggtgctcgccactcagcctttttgcctgcgcgagagcgaggattccgagacacagccattcgacacgcatttggaggcatacggcccatgcctctcccctccacgcgccatcccaggagaccagcatccagaaagccctgtccatacggaaccaatgggtattcaaggcaggggtcggcagacggtcgacaaggtgatgggtatacctaaagaaaccgctgaaagggtgggacccgaaagagggccactggaacgcgagaccgagaaattgctgcccgaacgacaaacggacgtgaccggagaggaggagctcacaaaaggcaagcaggaccgagagcaaaagcagctcctggccagagacacccagagacaggagtccgacaagaatggcgagtctgcttcacccgaaagagatcgcgaatccctgaaggtagaaatcgagaccagcgaagagattcaggagaagcaggtccaaaagcagacactgccgagcaaagcttttgagcgcgaggtggagcgaccagttgcaaaccgcgaatgtgacccagcagaactggaggagaaggtgccaaaagtgattctggagcgagatacacagcggggagaaccagaaggcggctcccaggaccaaaaaggccaggccagcagtcccacaccagagcccggcgtaggcgcaggcgacctgcctggccctacctccgctccagttccttcaggctcccagtctggggggaggggctcacccgtgagtcctcgccggcatcagaagggcctcttaaactgcaagatgccgccagccgagaaggcctccagaatccgggcagccgaaaaagtgagtcgaggcgaccaggagtctccagatgcctgtctgcctccaacagtacccgaggctcccgctcccccccagaaaccgctgaactcccagtcccaaaaacatctggccccaccacctctgctgtctccactcctgccatcaataaaacccaccgtacgaaagaccaggcaggatggttcccaagaggcgcctgaggctcccctgtcctcagaactggaacccttccacccgaagcctaagattagaaccagaaaaagctctaggatgacccctttccccgcaactagtgccgccccagaaccccacccatccacttccaccgcccagccagtcacaccaaagccaacatctcaggccacacggagccggaccaatcggtcatcagtgaagacgcccgagccggtagtccctactgctcctgagcttcagccttccaccagcaccgatcagccagtgacatcagaacccacttctcaggtgacgagggggcggaaaagtcgttcatctgttaagacaccggagaccgttgttcccaccgctctagagcttcagccctcaacaagcacggatcgccccgtgacttctgaaccaaccagtcaggctacccggggcagaaaaaatcgctcctccgtgaagaccccggagcctgtggtccctactgctccggaattgcagccgtccacatccactgaccagccagtcacctctgagccaacgtaccaagcaaccagagggaggaaaaaccgcagctccgtgaagaccccggagcccgtggtgccgacagctcccgagcttcgaccaagcacatccaccgaccgccctgttacacctaaacccacttcacggacaacgagaagtcgaacaaatatgtcttcggtgaaaacaccagaaacagtagtacccacagcacccgagctgcagattagtacctccactgaccagcccgttacgcctaaacccacctctagaaccaccaggtcccggaccaacatgtcatcagtgaagaaccctgaaagtaccgtgccgatcgcacccgagctccccccctctacctcgactgaacagcctgtcacgccagaaccaacctctcgggccacccggggcagaaaaaataggagttctgggaagactcctgaaaccttggtacccaccgctcccaagctggagccaagcacctctaccgatcagcccgttaccccagagccgacttcccaagctacaagggggagaacaaatagaagctcagtaaaaacccccgagaccgtggtccctaccgcccctgagctccagcccagtaccagtaccgaccaaccagtgactcccgaaccaaccagccaggccacccgcggcagaaccgataggtcctcggtcaaaacccctgagacagtggtccccaccgctccggaactccaggcatccgcaagcaccgaccagccagtcacatcagagcctacatcgagaacaactagggggagaaagaaccgtagctctgtcaagactccagagactgttgttcctgccgcccctgaattgcaaccttctacaagtaccgatcagcccgtgactcccgagcctacgtcgagagccaccaggggacggaccaatcgaagcagcgtcaaaacacctgagtctattgtgccaattgctccggagctgcagccatcaacgagcagaaatcagctggtcacccccgaacccacttcccgcgcaacccggtgtcggacaaaccggagcagtgtgaagacgccagagcccgtggtgcccaccgcccctgaacctcaccctacaacatctacagatcagcctgtgacccctaagctgacatcccgggccacgaggcgtaagactaaccgctccagcgttaagacgcccaaaccagttgaaccagcagcaagtgacctggaaccttttacacctacagaccagagtgtaactccagaagcaattgcccagggggggcagagcaagaccctccgtagctccacggtacgagccatgccagtgcccaccacgcccgagtttcagtcccccgttactactgaccaaccaatttccccggagccaatcacacaacctagttgcataaagcgccagagagctgcaggcaatcctggatcgctggccgcacccattgaccacaaaccgtgctcggcacccctggagcccaaatcacaagccagtcgtaaccagcggtggggtgctgttagagcggctgagtccttgactgcaatccccgagcctgcttccccccagttgttggagactccaattcacgccagtcagatccagaaagtcgaacccgccggtcgctccaggtttacccctgagctacagccaaaggcctcgcagtctagaaaaagatctctcgcaacaatggattccccaccacaccaaaagcaacctcagcggggggaggtgagccagaagaccgttattatcaaggaggaggaggaagacacagccgagaagccaggcaaggaggaggatgttgtgacaccgaagcctgggaagagaaaacgagatcaggctgaggaagagcctaacagaataccctcccgttctttgaggcggaccaaacttaatcaagagtctaccgcacccaaggttttgttcacaggcgtggtcgatgcaaggggggagcgagcagtgttggctctcggaggcagcctcgccgggagtgccgctgaggcttcccacctggtcaccgatcggatccggcgcacagtcaagttcctatgcgctttaggtagagggataccaatcctttccttggattggttgcaccagagtagaaaggcaggcttctttctgcctccagatgagtatgtggtgaccgaccccgaacaggaaaaaaacttcggcttctcactccaggacgctttgagccgggctagagagagacggctcctggaagggtatgagatctacgtgaccccaggagtccaaccccctccacctcagatgggtgaaatcatctcctgttgcgggggcacgtacctgcccagcatgccaaggagctacaagccacagagggtcgtaatcacctgtccccaggatttcccgcattgttctattcctctccgcgtgggactgcctctgctatctccggaatttctgctgactggagtccttaaacaggaagcaaagcccgaagcctttgtactgagtcccctggagatgtcaagtacatag

SEQ ID NO: 181293 - DNA, 6270 bp, Artificial Sequence
  derived and/or modified sequence
atggaggacacccaggccatcgactgggacgtggaggaggaggaggaaactgaacagtcctcagagtctctgaggtgcaatgtggaacccgtcgggcgtttgcatatcttctccggcgcacatggccccgagaaggattttcccttacacctgggcaagaatgtagtaggccgcatgccagattgttcagtggcgttaccctttcctagtatctcaaaacagcacgccgagattgaaatactagcatgggacaaggccccaattctgagggactgtggatccttgaatggaacacagatactgcgtccccctaaggtcttatctccaggggtttcccatagattacgggaccaggagctaatccttttcgccgacttactgtgtcagtatcacaggctggatgtcagtctgccttttgtatctcgcggccctctcactgttgaggagacacccagagtccagggtgagacccagccgcagcgtctgctattggctgaagacagcgaggaagaggtcgacttcttgtccgaaagaagaatggtgaaaaagtcgcgcaccacatcctccagtgttatcgtgcctgaatctgacgaagaagggcattcaccggtgctagggggcctgggtccacccttcgctttcaacctcaattctgacacagacgtggaggaagggcagcaaccagcaactgaggaagcgagtagtgcagcccggagaggtgccactgtggaagctaaacaatccgaggccgaggtagtgaccgagatccagctggagaaggatcagcccctcgtgaaggagcgggataatgacacaaaggtaaaacgcggggcaggaaatggcgtcgtcccggccggagtgattctcgagaggagccagcctcccggagaggactccgatacagatgttgacgatgactcaagacctcctggccggcccgccgaggtgcacctcgaacgcgctcaaccatttggatttatcgatagcgatacggacgctgaggaggagcggataccagcaacgccagtcgtcattccgatgaagaagcgaaagatctttcacggggtcggcacccgagggccaggggcacctgggctcgcgcacctccaggaatcccaagccgggtctgacacagacgtggaagaaggcaaggcgccacaggccgtgcccctggagaaatcacaggcgtccatggtgataaattccgacaccgatgacgaggaggaggtttccgccgctttgacattggcccacctgaaagaatcccaaccagccatatggaatcgggatgctgaggaagacatgccgcaaagagtggttctactacaaaggtctcaaacaacaactgaacgagatagtgacacagacgtcgaggaggaagaactgcccgtcgagaacagagaagctgtgctgaaagatcacactaagattagagctcttgtgagagcacattcggagaaagaccaacctccattcggggatagcgacgactctgtggaggccgacaaatcaagcccaggcattcacctggagaggtcacaggcctccactactgtcgatatcaatacccaggttgagaaagaggtgccacctgggtctgccataatacatattaagaaacaccaagtttccgttgaaggaacaaatcaaacagacgtgaaggcagtgggcggacccgctaaattgctagtggtcagtttagaggaggcctggcccctccacggcgattgcgaaacggacgctgaagagggcacctcacttactgcctccgtcgtggcagatgtgcggaaatcacagttacctgccgagggcgacgccggggctgagtgggcagccgccgtgttgaaacaggagcgcgctcacgaagtaggagcacaaggtggtccacccgtggcacaggttgaacaggacctgcctatcagtcgggagaatttgacagacctggtagtggataccgacacattgggtgagagcactcagcctcaacgggagggagcccaggtgcctacaggaagggaaagggagcaacacgtgggaggaaccaaagattcagaagataactacggagactccgaggatttggaccttcaggccacacaatgtttccttgaaaaccaggggctggaagccgtacagagtatggaggacgagccgacacaagcttttatgctcacacctccccaagaacttggaccatctcactgctccttccagacaaccggcacattggatgagccatgggaggtgttggctactcaaccattttgcctgcgcgagtccgaggactctgaaacccagccattcgacacacacctggaggcctatggaccctgcctctcgcctccacgggctattccaggggaccaacatcctgagtctccagttcacactgagccaatggggattcaggggcggggccgccagactgtggacaaggtcatggggatccccaaggagactgccgaacgggtgggaccggaacgaggccccctggaaagagaaaccgagaaactgcttcctgagcgtcaaacagatgtcaccggagaggaggaattgactaaaggcaagcaagatagggaacaaaagcagttattagccagggatacacaacggcaagagagcgacaagaatggggagtcggccagtccggaacgggatcgggaatctctgaaagtcgagattgaaacctcagaggaaattcaggaaaagcaagtgcaaaagcagactctcccctctaaggcatttgaaagggaggtggaacgccctgtcgcaaacagagagtgcgatcctgccgaactggaagaaaaagtgcccaaggtgattctcgagcgagacactcagcgtggagagccggaaggtgggtcccaagatcagaaagggcaggcgagttccccaactccagagcctggggtgggtgccggtgatctgccaggcccaacaagtgcacctgttcccagcggttcacagtctggggggcgggggagccccgtttctcctagaaggcaccagaaaggcctgttgaactgtaaaatgccccccgctgaaaaggccagtcggatacgggctgccgaaaaggtgagtcgaggcgatcaggaatcccccgacgcatgcctgccccccacagttccagaggctcccgccccaccgcagaagccccttaacagccagtcacagaagcatcttgctcctccgccattactgtctccattgttgccttccataaaaccaacagtgaggaagacacgccaggacggcagccaagaggccccagaggcccctctgagcagtgaactcgaaccttttcaccctaagccaaagattcgcacacgaaagtcttcaaggatgaccccattcccggccaccagcgccgcccccgaacctcatccgagtactagtactgctcagcctgtgacgcctaaacctactagccaggccaccaggagtcgaaccaatcgctcttccgtcaagacaccagagcccgtcgtgccgactgcccctgagctgcagccaagtacttcaacggatcagcccgtcactagcgaaccgacgtcacaggtgacacgaggtcgcaagagccgcagttctgtgaagacccccgaaaccgtagtacctactgccttggagctgcagccatctacctcgaccgatagacctgtgacatcagagcccacatctcaggccactagagggcgcaagaaccggagctccgttaagacaccagaacccgttgttccgaccgcacccgaactgcagccatccacctccactgatcagcctgtgacatctgaacctacataccaggctaccagggggcggaaaaacaggtcaagtgtgaaaacccctgagccggtggtccccactgcgcccgagttgcgcccgagcaccagcacagatcgacctgtcacccctaaacccacctcacggactacccggtcccgcactaatatgtctagcgttaaaacgcctgaaactgtagtccccactgcacccgagctccaaattagtacgtccaccgaccagccggtcactcccaagcccactagtcgcaccactcgttcacgcacaaatatgagtagcgtgaagaaccctgagtccacagtgccaattgcgcccgagctacccccctcaacatcaacagagcaaccagttactccggagccaacaagcagggcaacaagagggagaaagaacagatcgagtgggaaaacacccgagacactggtcccaacagctcctaagttggagccatccacctctacggaccagcccgtaacacctgagcctacttcgcaagctacccgcgggcggaccaatcggagttcagtcaaaacccccgagaccgtggtaccaactgcaccagaactgcagccttccacatccacagatcagccagtcacccctgagccaacctctcaggccactagagggaggacagaccgcagctccgtgaagactcctgaaacggttgtcccgacagctcccgaactacaggcaagcgcatcaacagaccaaccagtcacttccgagccaacgagtcgaactacacggggaagaaagaatcggtcttcggtcaagacccccgagacagtcgtaccggctgctcccgagttacaacccagcacaagcaccgatcagcccgtaacccctgagccgaccagccgagcgacaagagggagaacaaacaggtcctctgtcaaaaccccagaatccattgtgcctatcgcaccagaacttcagcctagcacttcaaggaatcagttggtgacccctgaacccaccagtcgggctactcggtgccgcaccaatagatccagtgtcaaaacccccgaacctgtggtcccaacggctccagagccccaccctactacatctacagatcagccagtgacccctaaacttacgagcagagctacaaggagaaaaaccaatcggtcttctgtcaaaactccaaaacctgttgagcctgcagcctccgacctggagccctttaccccaacggatcagtccgtgactcctgaggctattgcgcaggggggtcagtctaaaacgctgcgttcttctacagtccgggccatgcccgtgccaacaacaccagaattccagagcccagtgaccaccgatcagcctatcagcccggagcccattactcagccctcatgcattaagcggcagcgcgctgcaggaaatcccggctcactggcggctcctatcgaccataaaccttgctcagcaccactggaacctaagagccaggcttccaggaaccagcggtggggcgccgtccgagcagccgagagtctcacagcaatccctgaacctgctagcccacaactgctcgagacaccaatccacgcctctcagattcagaaagtggaaccagccggccggagcagattcacccccgaactacagcccaaagctagccaaagccgaaaacgcagcttggccactatggattcccctccccatcagaaacaaccccaacgcggggaagtgagccagaagacggtcatcatcaaggaggaggaagaggataccgctgaaaagcctggcaaagaagaggatgttgtgacacctaagcccggaaagcgcaagagagaccaggccgaagaggaaccaaacaggatcccaagtagaagtctcaggcgcactaagctgaatcaagagtcaacagcaccgaaggtgctgtttaccggggtggtagacgctcggggagaaagagctgtcctggcattgggaggcagccttgctggctcagccgctgaggcttctcatttggtgacagatcggatacgtcggactgtcaagttcctgtgtgccctcggcagaggtattcctattctctccttagactggttacaccaaagtagaaaggccgggtttttcctccctcctgacgaatacgtcgttactgacccagagcaggagaagaattttggattctctctgcaagacgcgctctcacgagctcgggaacgaagactcctggaaggatatgaaatatatgtcaccccaggagttcagcctccacctccccagatgggggagatcatcagctgttgtgggggcacatatctgcctagcatgcctagatcttataagccacaacgggtggtaatcacatgccctcaggacttcccccactgctcaatcccactgagggtggggttgcctctgctcagtcccgaatttttgctgacaggcgtgctgaaacaggaggcaaaaccggaggccttcgtgctgtcccccctggaaatgtcaagcacctag

SEQ ID NO: 181294 - DNA, 6270 bp, Artificial Sequence
  derived and/or modified sequence
atggaggacacccaggccatcgactgggacgtggaggaggaggaggagaccgaacaaagtagcgagtccctacggtgtaacgttgagcccgtgggccgcctacacattttctccggcgcacacggccccgagaaagactttcccctgcatcttggtaagaatgtggtgggccggatgcccgactgctctgtcgccctgccctttccctctatttccaaacagcacgctgagatcgagatccttgcctgggacaaagctcctattctgagagactgcggctccctgaacggtacacagatactgcgccctccaaaagtacttagcccaggggtgtctcacaggctgagagaccaagagctaatattattcgctgatttgctgtgtcagtaccaccggcttgatgtatctctaccttttgtgtcgcggggtcctctgaccgttgaggaaaccccgagagtgcagggggagactcagcctcagcgcttgctgctggccgaagactctgaagaagaggtggatttcctgtctgaacgacgcatggtgaagaagtctagaacgaccagcagttcagttattgtgccagaatccgacgaagaagggcactcccccgtcctgggcggcctcggtcctcccttcgcattcaacctgaactccgatactgatgttgaagaggggcagcagccagctaccgaagaagcctcctcagccgcccggcggggagcgacagtggaagcaaagcagagtgaggcagaagttgtaactgagatccaactggagaaggatcagcccctggtaaaggagcgggataatgacaccaaagtcaaaagaggagctggtaacggagtagtccccgccggggtcattcttgagaggtcccagccccccggagaggactctgatacggatgtggacgatgattcccggccgcctggccgccctgctgaggtccacttggaacgggcacagcccttcggtttcatcgatagtgatactgacgctgaggaggaaaggattcccgccacgcccgtggtaatccccatgaagaagcgcaaaatattccacggggtggggacccgtgggcctggtgcaccaggcttagctcatttgcaggaatctcaggccgggtctgacactgacgtggaggagggaaaggcaccacaggccgtaccgctggagaagtcgcaggcttccatggtgattaactccgacaccgatgacgaagaggaggtgagcgctgctctgaccctggcccacctcaaggagagccagccagccatatggaatagggatgcggaggaggatatgcctcaaagagttgtcttgttacagcggtcccaaacaaccactgagcgggacagtgatactgatgtcgaggaggaggagctgcccgtggagaacagggaggcggtgctcaaagatcacaccaaaatccgggccctggttagggctcactctgaaaaggaccaacccccttttggcgactctgatgattctgtggaggcagataagtcttccccaggaatccacctcgagagaagccaagcatctactacagtggatatcaacacccaggtggagaaagaggttccccctggatctgccatcatacacatcaaaaaacaccaagtgtccgtcgaaggcacgaatcaaacagatgtcaaagcagtcggaggccctgcaaaactccttgtggtgtcccttgaagaggcttggcctttgcacggggactgtgagacagatgctgaggagggtacaagcttgactgccagcgttgttgctgacgttaggaagtctcagttgccggctgaaggcgacgcaggtgcagagtgggccgccgcagtgttgaaacaggaacgcgctcatgaagtaggtgctcagggcggcccccctgtcgcacaggtcgaacaggacctcccaatcagcagggaaaatctgaccgacctcgtagttgacactgacactctaggagaaagcacccaacctcagcgggagggagcacaggtaccaacaggaagggagcgtgagcagcacgtcgggggaaccaaggactcagaggacaactatggtgacagtgaagacctggatctgcaggccactcaatgttttctggagaaccagggccttgaagctgttcagagcatggaggacgaacccacacaggcttttatgctcacccctccacaggaactggggcccagccactgctccttccagaccacggggactcttgacgagccttgggaggtcctggcaactcaacccttttgccttcgcgaatctgaggattcagaaactcaaccgtttgatacacacctcgaagcgtacggtccctgcctctcgccgcctcgcgctatccctggagatcaacatccggaaagccctgtccatactgagcctatgggaatccaggggcgggggagacaaacagtggacaaagtgatgggcatcccgaaggaaactgcagaacgggttggccctgaacgggggccgctagagcgggagactgaaaagctgctgcccgagagacagaccgatgtaacgggagaggaggagctgaccaaggggaagcaggatcgcgaacagaaacagcttttggcaagggacacccagcgtcaggaaagtgacaagaacggagaaagcgccagccctgaacgcgatcgggagagtcttaaagttgaaattgagacaagcgaggagatccaggaaaagcaggtgcagaaacagactctgccttcaaaggcttttgaacgagaggtggagagacccgtggccaaccgtgagtgtgaccctgccgagctggaagagaaagtccccaaagtgattttagaacgggacactcaaaggggagagccagagggcgggtcccaggatcagaaaggtcaagccagttcaccaacacctgaacccggcgtgggcgctggggatctccccggaccaacttccgctcctgtgccctcaggctcccagtctggcggccgtgggagccctgtgagtcctcgtagacaccaaaagggcctgctgaactgtaagatgccacccgctgagaaagcttctagaatacgcgccgcagaaaaagtgtccaggggagatcaggagtcccccgatgcatgtctgccccctactgtacccgaggcccctgcaccaccccaaaagcctctgaactcccagagccaaaagcacttggcacctccaccgttgctctcccccctgcttccgtccattaaaccaactgtgagaaaaactaggcaggatggatcacaggaggccccagaggctcctttgtcaagcgaattggaacctttccacccaaagcccaaaatcagaacccgcaagagttctcggatgaccccattccctgccacttctgcagcccccgagcctcaccctagcacctccaccgcacagcccgtgaccccaaagcctacttctcaagctacgcggagccggactaataggtcaagcgttaaaaccccagagccggtggtgcccaccgctcccgaactacaaccgagtacctcaacggaccaacccgtcaccagcgagcccacatcgcaggtgaccagagggagaaagagtcggtcctctgtaaagactccagagaccgtggtcccgacagcacttgaactgcagccttctacaagtacggaccggcccgttacgtcggagcccaccagccaggcaactcgaggccgaaagaataggagcagtgtaaagactccagaacccgtcgtaccaaccgcgcctgaactccagccaagtacctccaccgatcagccagtcacctcagaacccacatatcaggcaacacgcggaaggaaaaaccggagttccgtgaagactcccgagcccgtggtacccaccgcccccgaactaaggccctccactagcaccgaccgcccagtcacccctaaacctacatctcgtaccactcgatcacggacaaatatgtccagcgtcaaaaccccggaaactgtcgttccgacagcaccggaactccagatttcaacaagcacggaccaaccggttacacccaagcctacctccaggaccaccagatccagaacaaatatgagttcagtgaagaatcctgagtccacagttcctatcgctcctgaactgccaccgtctacatctactgaacaaccggtgaccccggaacctacaagccgggcgactagaggacgcaagaatcgctcttccggcaagacccccgagacccttgttccaacggctcccaaattagagccctctacatccaccgatcaacctgtgacacccgaaccgacatcacaggctacaaggggcaggaccaatcgctccagcgttaagactcctgaaacagtagttccgactgcccccgaactccagccctccacatccactgatcaacctgtaacaccagaaccgactagtcaggctacacgcgggcggacggacaggagcagcgttaaaaccccagaaactgtggtgcccacggctccagagctgcaagcgtccgccagtactgaccaacccgtcacaagtgaacctacatcccgaactaccaggggtagaaaaaatcgatcttcagtgaaaaccccagagacagtggtaccagccgctccagagttgcagcctagcacaagcacagaccagcctgtcactccagaacctacctccagagctaccaggggtcgaaccaacagatcttcagtcaagacacctgagtccatcgtgcctatagcgccagagctgcaaccctctacctctaggaaccagctagtcactcctgaaccaaccagcagagccacccggtgcaggactaatcgttctagcgttaagactcccgaacctgtcgtaccgacggcacctgagccacaccctacaacctccaccgatcagcctgttaccccgaaattgacaagcagagccaccaggcggaagactaatcggtctagcgtgaagactcccaagccggtagaaccagccgcctccgaccttgagcctttcacgccaacagaccaaagcgtgaccccagaagctatcgcccaagggggccagtcaaagaccctgcgatcgtctaccgtgcgcgccatgccagtacctactacaccggaattccagtcccctgttaccactgatcaacccatatccccagaacccatcacccagccatcttgcatcaagcggcagcgcgccgccggtaatcccggctccctggccgcacccatcgaccataagccatgctccgcaccactggagcccaagtcacaggcatctcgcaaccagaggtggggcgctgtcagagctgcagagtcattgacagccattccagaacccgctagcccacagctcctggaaacgccgatacatgcttctcaaatccagaaagtcgagcctgccggacggtcacgcttcacacccgaactccagccaaaagccagtcaatcaaggaaacgctcacttgcaacaatggatagtccgcctcaccagaagcagccgcagaggggagaagtcagtcaaaaaactgttataataaaagaagaagaagaagacacagccgaaaaacccggcaaagaagaagacgtagtgacccctaaaccaggcaagaggaagcgggaccaggcagaggaggagccgaacagaattccatcccggagtcttaggcggaccaaactgaaccaagaaagtacagccccaaaagttctgttcaccggagtggttgacgcaaggggcgagcgggcggtgctagcactcggcggcagcttagcagggtcagctgccgaggcgtctcatctggtaacagataggatcaggcgcactgtgaagttcctctgtgcccttggtcgcggcatccccattctgtcactcgactggcttcaccagtctaggaaggctggattcttcctcccccctgatgaatacgtcgtcaccgaccccgagcaggaaaaaaacttcggctttagtctccaggatgccctgtctagggctcgcgaacgccggctcctggagggttacgagatttacgtgactccgggtgtccaaccccccccaccgcagatgggggagataatttcttgttgtggggggacttacctgccctctatgcccaggtcctacaagccccaacgggtcgtgatcacctgcccacaggactttccacattgtagcattcccttgcgtgtgggactgcccctcctgagtcccgaatttctgctgactggagtgttgaagcaggaggcaaaaccagaggcctttgtcttgagccccctggagatgtccagtacttag

SEQ ID NO: 181295 - DNA, 6270 bp, Artificial Sequence
  derived and/or modified sequence
atggaggacacccaggccatcgactgggacgtggaggaggaggaggagacagagcaaagcagtgaatcactgaggtgtaacgttgagccagtaggccggcttcacattttctctggggcccacggccccgagaaggatttcccactacacctaggcaagaatgttgtgggtcggatgcctgactgtagcgtggccttgccatttcccagtatcagcaagcagcacgcagaaatagagatcctggcctgggataaagcccctattctgagggattgcggcagcctgaatggaacacagatcctgcggcctccaaaggtgttgtccccaggtgtttcccatcgtttgagagaccaggagctgattctctttgccgatttattatgccagtatcataggctggatgtaagccttcccttcgtgtcccgaggcccccttaccgttgaggaaacccctcgtgtgcagggagagacccagccccaaaggcttctcctggctgaggattctgaggaggaagttgactttcttagtgaacgccgtatggtaaaaaaatcacgcaccacttccagttccgtgatcgtcccggagtctgacgaagagggacacagccctgtcctgggcggattgggccccccgtttgcgttcaacctcaacagcgacacagacgtggaggaagggcagcagccagccaccgaggaggctagttctgcagcacgtaggggcgccacagtagaagccaagcagagcgaagctgaggtcgtcaccgaaattcagctggaaaaggatcaacctctggtgaaggaacgtgacaatgatactaaggtgaagcgcggcgccggcaacggtgtagtgccagccggggtaatactggaacggagccaacctcccggcgaagattcagataccgacgttgacgacgattcacggcccccagggaggccagccgaagtgcaccttgagagagcccagcccttcggctttatcgatagtgataccgacgccgaagaagagaggatccctgcaactcctgtggtaataccaatgaagaagaggaaaatcttccatggtgttgggactcgcggaccaggcgcgcccggtctagcccacctgcaggagagtcaggccgggtccgataccgacgtggaggaagggaaggcgccacaggcggttccactcgaaaagtctcaagcctccatggtgatcaattccgatacggacgatgaagaggaagtgtctgccgctctgaccctggcccacctgaaggaatcccaacccgcgatctggaaccgggacgcagaggaggacatgccccagcgcgtggtattgctgcagcgtagtcagacaacaaccgagagagactccgatactgatgtagaggaagaagagcttcctgtggagaacagagaagcagtccttaaggatcatactaagatcagggccctcgtccgcgcccattcagaaaaagatcagcccccgttcggagacagtgacgactctgtcgaggccgacaaatcttctccgggaattcacctcgaacgaagccaagcatctactacagtcgacatcaatacccaggtggaaaaagaggttcctcctggctccgccatcatccacattaaaaagcatcaggtctcagtggaagggaccaatcagacagacgtcaaggccgtgggcgggccggccaagctgctggtcgtgagcctcgaagaagcgtggcccctccacggcgattgtgaaaccgacgcggaggagggtacctctttgacggcatccgtcgttgcggacgtccggaagagccaacttcccgcagagggggatgcgggggccgaatgggcagcggccgtattgaagcaggagagggcccatgaggtgggagcgcaagggggacccccagtcgcacaggtggagcaggacctccccatcagccgcgagaatctgacggacctggttgtggatactgatacccttggggaatccacccagccgcaacgggaaggagcacaggtgcccaccggaagagagcgcgaacagcacgtcggtggcaccaaagactctgaagacaactatggggatagtgaagaccttgacctgcaggccactcagtgcttcctagaaaatcaggggctggaggcagtgcaatccatggaggatgagccaactcaggcgtttatgttaactcccccgcaagaactaggcccaagtcactgttcttttcagacaaccggtactctggacgagccttgggaagtcttggcaacccagccgttttgcttgcgggaaagtgaagatagcgagacacaacccttcgacacccacctcgaggcatacgggccatgtctttcacctcccagagctatccctggtgaccagcatccagagtccccagtgcatacggaaccaatggggatccagggcagagggcgtcagactgtggacaaggtgatgggcataccgaaagaaaccgccgaaagagttgggccagagagaggccccctcgagcgagaaaccgaaaagctgcttccagagcggcagactgacgtcacgggggaagaggagctcacaaagggcaagcaggatcgggaacagaagcaattactggcacgagatactcaaagacaagaatccgacaagaacggtgagtctgccagtcccgagagggatcgggagagtctcaaggtggaaatcgagacatctgaggagatccaagagaagcaagtgcagaagcagacattgccgtctaaagcattcgaaagagaggtcgaacggccagtcgccaacagggaatgcgaccctgccgaactggaggagaaagtgccaaaagtgatccttgagcgggacacacaacggggggagcccgagggaggctcacaggatcagaagggacaggcctctagccctacaccagaacctggcgtcggcgccggcgatctgcccgggcccacctccgctcctgtcccgagcggatctcaatctggtgggagaggttcaccagtgagtccccgacgacatcagaagggcctactcaattgtaagatgcctccagcagaaaaagccagcagaatccgggctgcagagaaggtgagcagaggcgatcaagaatctcccgatgcttgcctgccgccaacggtccccgaggcccccgcgcctccccagaaacctctgaactcccagagtcagaaacacctcgccccaccccccctcttgagcccactccttcccagcattaaaccaaccgtgcggaaaactcggcaggatggctctcaggaggctcccgaggcacccctttcatccgagctcgagccttttcatcctaagccaaagattcgcacaagaaagtcatcgagaatgacaccctttcccgctacgagtgctgcccctgagccgcatccaagcacaagcaccgcgcaacccgtaacccctaaacctacatcccaggccacaaggagccgaacaaatcggtctagtgtaaaaacccctgagccagttgtccccacggcccccgagctccagccatctacgtcaactgatcagcccgtgactagcgaaccgaccagccaagtgacgcgtgggagaaagagccggagcagtgtcaagacgccagagactgtcgtgcctaccgcactggagcttcagcctagcacatccacagaccgcccagtcaccagcgaaccgacatcccaagcaacacgcggaagaaagaaccgaagtagcgtgaaaacacccgagccagttgtgcccactgcgcccgaactgcaaccatcaacatctaccgatcaacctgtgacgtcagagcctacataccaggctacgcgcgggagaaaaaacagatcgtctgttaagacaccagagccagtcgtccccaccgcacctgaactgagaccctcaacctccaccgataggccagtgactccaaagcctaccagcagaactacccgtagtcggactaacatgtcgagcgtgaaaacgcctgaaaccgtggtgcccactgctccagagctgcaaattagtacatcaacagatcagccagtgacacctaaacccacatccagaacaacccgcagccggaccaatatgtcatccgtgaaaaaccccgagagcactgtgcctatcgcccctgaattgcctccttccacttctaccgagcagcctgtgacaccggaacccactagccgggccacccgagggcgcaagaatagatcctctggcaaaacccccgaaacactggttcctactgctccgaagctggaaccaagcacctccactgaccagcccgtcaccccagagccaactagccaagctacgagggggcggacgaatagatcatctgtcaaaacaccagaaaccgtggtcccaactgctcctgaattacagccctccactagtacagaccagccggtgacgccagagccgaccagtcaggctacgcgagggcggacagatagatcatcagtgaagacacctgagacggtcgtcccaactgcaccggaactgcaggcctccgcaagcacggaccagccagtaacatccgagccaacctcccggactactaggggtcggaaaaacagaagctctgtcaagaccccagaaacggtcgtgcctgccgccccggagcttcagccttcaacatccaccgaccaacccgtcacacctgagccgacaagccgtgcgacaaggggacgcactaataggtcgagcgttaagacgcccgagtccatcgtcccaatagcccctgaactccagccctcaacttctcgtaaccagttagttactcccgaacccacttctcgcgccaccagatgtagaaccaatagatcctccgtcaagacacctgaacccgtcgtacctaccgccccagagcctcaccctaccacgtctacagaccagccggtgactcctaagctgacttctcgagcaacacggagaaagaccaatagaagctctgttaaaacacctaagccagtggaacctgccgcaagcgatctggagccatttacccccactgaccaaagtgtgacaccggaggcaatcgcacaggggggtcaatcaaagactctgagatcttctaccgtaagggcgatgcccgtcccaaccacacccgagtttcagtcccccgtaactaccgatcagcccatcagcccagagcctattacacagccttcctgtataaaacgacagagagccgcaggaaaccccggcagcctggccgcccccatagaccataagccatgcagcgcccccctagagccaaagtcccaggcgagcaggaaccaacggtggggcgccgttcgagcagctgaatcgcttactgccatccctgagcccgcctccccgcagctcctcgagacaccaatacacgcttcacagatccagaaggtggaaccagcgggacgttcccggtttaccccggaactgcagcccaaagccagccagtcacggaaacggagtctggcaacaatggactcccctccacaccagaaacagccacagcggggagaagttagtcagaagaccgttattatcaaagaggaggaggaggacacagccgagaagcccggaaaagaggaggatgttgtcacgccgaagcctggaaagcgaaagagggaccaggcagaggaagaacctaatcgaatcccaagccgctcactgcgacggactaaattgaaccaggaatcgacagcccccaaagtcctctttacaggggtggtggacgccagaggcgagagggctgtgctcgcactgggcggaagcctcgccgggtcggccgctgaggcgtctcacctcgtcaccgacagaatccggcgcaccgtgaagtttctctgcgccttgggaagagggattcccatcctgagtctggactggctacatcagagcaggaaagctggattctttttaccgcccgacgagtacgttgtgacagacccagagcaggagaagaattttggcttcagcctgcaggatgctttgagtagggctagagagcgccgtctgctagagggatacgaaatatacgtgacacccggcgtccaaccgccacctccccagatgggcgagatcatctcttgttgtggcggtacatatctgccgtccatgccacgctcatacaagccccagcgagtagtgattacctgcccgcaggatttccctcattgctccattcctcttcgggttggcctacctttgctgagtcctgagtttctcttgactggggtgctgaaacaagaggccaagccagaagctttcgtcctgtccccccttgagatgagctctacatag

SEQ ID NO: 181296 - DNA, 6270 bp, Artificial Sequence
  derived and/or modified sequence
atggaggacacccaggccatcgactgggacgtggaggaggaggaggagaccgagcagagcagtgaatcactgcggtgcaacgtggagccagtgggaaggttacacatctttagtggagcacatggccccgagaaggacttccccctgcacctcggaaagaatgtggtgggaagaatgcctgattgcagcgtcgctttaccctttccatctatttccaagcagcacgcggaaattgaaatcctcgcttgggacaaggctcctatcctgcgagactgtggctcgctgaatggtacccaaatcctcaggccccccaaggtccttagtcctggcgtctctcaccgattgcgtgatcaggaactaatcctgttcgctgaccttctttgccagtatcaccggctcgatgtttctctgccattcgtgtctcgcggcccgctgacagtggaggagacccctcgcgtccaaggtgagacacagccacagaggctgttactggccgaggactccgaagaagaagttgacttcctgtctgagcgtcggatggtcaagaaaagccgaaccaccagctcctcggttatcgtgcctgaatcagacgaagaaggacatagcccagtgcttgggggtctgggccccccgtttgcgttcaatttaaatagtgacacagacgtcgaggagggccagcagcctgcaacagaggaggcatcgtcagctgctcggcggggagctaccgtggaggcaaagcagtccgaggccgaagtggtcacagagatccagctggaaaaggatcagcccctggtgaaggaaagggataacgataccaaagtcaagcggggcgccggcaacggcgtggtaccagccggtgtgatattggaaagatcccaacctcccggagaggattccgacacagacgtcgatgacgacagcagaccaccaggccggcctgccgaagtacacctggagcgcgctcagccgttcggctttatagattctgacactgatgccgaggaggagaggatccccgctaccccggtggtgattccgatgaagaagcggaaaattttccacggggtcgggacccgtgggccaggggcaccgggtttggctcacctccaggagtcccaggccggctccgacactgacgtggaggaaggtaaagccccacaggcagtgccgctcgagaagtctcaggcatccatggtgattaattcagatacggatgatgaagaagaggtgtcggctgccctgaccttggctcatttgaaagagtctcagcccgccatctggaacagggatgccgaggaggacatgccacagcgggtagtattactgcagcggagtcagactaccacagagcgcgatagcgacacggacgtggaagaagaggagctgcccgttgaaaatagagaggcggttctgaaagatcacactaagatcagggccctagtccgggctcatagcgaaaaagaccagccacctttcggcgactctgacgactcagttgaggctgacaaatccagccctggaattcaccttgaacgctctcaggctagtaccaccgtggacatcaacactcaagttgaaaaagaggtgcctcccggaagcgcaatcattcatattaagaaacatcaagtgtccgtcgaaggtaccaaccagacagacgtgaaagcggtcggagggccagcgaagctgctggtcgtgtccctggaagaggcatggccactccacggggactgcgagaccgacgcagaagagggaaccagtctgacagcctctgtagtagctgatgtaaggaagtcacagctcccagccgaaggggatgctggcgccgaatgggccgctgcagtactgaagcaagaacgggcccacgaggttggtgcccagggtggaccccctgttgctcaggtcgagcaagacctccccatttcgcgcgaaaacctgacagatctggtagtggacaccgacactcttggagaatctacccaacctcagcgggagggcgcccaggtgcccacaggtagggaacgggagcagcacgtcgggggaacaaaggatagtgaagataattacggcgactcggaggaccttgatctccaggccacccagtgctttctggagaatcaaggcctggaagccgtgcagtctatggaagatgagccgacccaagcgttcatgttaacccccccccaggaactgggaccatctcattgcagtttccagacaacaggcaccttggacgagccgtgggaggtgctggcgacacaaccattttgcctgagagaatctgaggatagcgagacccaaccttttgacacccacctggaggcttacggaccgtgcctgtctccgccacgggccatcccgggcgaccagcatccagaatctcctgtccatacagaaccaatgggcatccaggggcgcggaagacagacggtggataaggttatggggattccgaaagaaacagccgagagagtcggccccgagcggggaccgctggaacgagaaaccgagaagctgctccctgagcgtcagacagacgttactggcgaggaagagctcaccaagggaaagcaagacagagagcagaagcaattgcttgcaagagatacgcagaggcaggagtctgacaagaatggtgaaagcgcttctccagagagagacagagaatctctgaaggtggagatcgagacgtccgaggagatacaagaaaagcaggttcagaagcaaactcttccctccaaagcattcgagcgtgaagtcgagagaccagttgccaacagagagtgtgaccccgctgagctggaagagaaagtgcccaaggtgatcttagagcgggatacacagagaggggagcccgagggcggctcccaggatcaaaaggggcaggcaagttcgccaacccctgagccaggggtgggcgccggggacctgcctgggcccacaagcgcccccgtgccaagcggcagccaatctggcggaagaggcagcccagttagccctagaagacatcagaaaggactgctcaactgtaaaatgccgcccgctgaaaaggcatctcgcattcgagctgccgagaaggtctcgagaggcgaccaggagtcccctgacgcctgtctgcccccgacggtcccagaggctccagctcccccccagaaaccactgaatagccagagtcaaaagcacctcgctccgccccccctcctctctcccctcttaccgagtattaaaccaacagtgaggaagacaaggcaggacggttctcaagaagctcccgaggctcctctgtctagtgaactcgagccatttcatcccaaaccgaaaatcagaactcggaagagctcccgtatgacaccttttcccgcaacgagcgcggcccctgagccacatccctctacgtcaaccgctcagcccgtcacaccgaagcctactagccaggccacaagatcccgtacgaacaggagctccgtaaaaacccccgagccggtggtcccaactgccccagaattacagccatccacatccacagatcaaccagtcacctctgagccaacatctcaagtgacccgggggcggaagagcaggtcctccgtgaaaacacccgagacagtcgttcccactgccctcgagctgcaaccatctacatcaactgatcgccccgtgacaagtgaacccacctcccaggcgacaaggggacggaaaaaccgctcatctgtaaagacacctgagcctgttgtgcctactgcaccagaactccagccttctacctctaccgaccagcccgtaacgagcgaacctacataccaggccactcgcggcaggaagaacaggagctctgtaaaaacccctgaaccagtcgtacctactgcacctgagctcaggccaagcacctccactgatcgtccagtcacgccaaagccgacgtctaggacgacacgaagccgcacgaacatgtcctccgtgaaaacccccgaaacagtggtgccaactgcaccagagcttcagatctctacaagcaccgaccagccagtaacccccaaaccgacctcacggactacccggtccagaaccaatatgtccagtgtgaagaaccccgaatcaacagtacccatcgcgccagaactgccacctagcacatccaccgaacaaccagtgacccccgagcctacctcccgggcaacccgcggtcgcaagaatagatccagcggaaaaacaccagagactttagtgcctacagcccctaagctcgagccatctaccagcacagatcaaccggtgacacccgagcccacctcccaggctacacgcgggaggaccaatcgctccagcgtgaagacgccagaaaccgttgttcccactgcccccgaactgcagcctagcacatctactgaccagccagtcaccccagaacctacaagccaggccacgcggggccgcaccgaccgctcatctgtcaagacacccgaaaccgtcgtgccgacagctccggagttgcaggcgtcagcttcaaccgatcaacccgtcacaagcgaacctacttcccgtacaacccgcggcagaaaaaatagaagcagcgtgaagaccccagaaaccgtggtgcccgccgcccctgagctgcagcccagcacttccacagaccaacctgtcacccctgaaccaacttcgagggccacaagaggacgcacaaaccgctcctcggttaagacacccgagtcgatcgtgcctatagctcccgaactgcagccttcaaccagccgaaatcagctggtgacccccgagccaacaagcagagctactcgatgccggacaaaccgctccagtgtgaagacacccgagccggtcgtacccaccgcgcctgagccacaccccacaacctcaactgatcaacccgtcacccccaagctcacctcgagagcgactcggcggaagacgaaccgcagcagtgtcaagacaccaaagccagtggagcctgccgcatccgatcttgaaccctttacgcctactgaccaaagcgtcacacccgaagccatcgcccagggcggacagagcaagactctgagatcttccacagtgcgcgcaatgcccgtgcctacaaccccagagttccagtctcccgtgacaaccgatcaaccaatctcccctgaacctattacccagccctcgtgcatcaagaggcagagagccgccggaaatcccggcagcctcgctgctcccatcgaccacaagccatgcagcgcaccactggagcctaagagccaggcatcaagaaaccagaggtggggtgcagttagggccgctgagtccttaacggccatccctgagccagcgtccccacagcttctggaaaccccaattcatgcctctcagattcagaaggtagaaccggcagggcgcagtagatttacaccagagctgcagccaaaggcaagtcagagtagaaaacgttcacttgctaccatggattcaccccctcaccagaaacagccccagagaggcgaagtcagccagaagactgtcattatcaaggaagaggaagaggacactgccgaaaaacccggaaaagaggaggatgtggttacacccaagcctggaaaacggaagagagatcaggccgaagaggagccgaacaggattccatctcggagcctgcgcagaacaaagctgaatcaggaaagcaccgcaccaaaagttttgttcacgggtgtcgtggacgcaaggggggagcgtgctgtgcttgctctggggggaagcctggccggatccgctgcggaagctagccacttggtgacggacaggattcggcgaacggtgaaatttttatgtgccctaggaagaggaatccctatactctccctggattggttgcaccagagcagaaaggcaggcttctttctgcccccagacgaatatgtagtcaccgaccctgaacaagaaaagaatttcggtttctctctgcaggacgccctgtcacgtgccagagaaaggcggttgctcgagggttatgagatctacgtgacccccggagtgcagcccccccccccacaaatgggggagataatttcttgctgcggcggcacatacctcccctccatgcccaggtcttataagcctcaacgggtcgtgatcacttgtcctcaggacttcccacactgctccatccctttacgagtcggcctccctcttctttcccccgagtttctgcttaccggtgtccttaaacaagaagccaagccagaggcatttgtcctgtcccccttagagatgtcctctacatag

SEQ ID NO: 181297 - DNA, 6270 bp, Artificial Sequence
  derived and/or modified sequence
atggaggacacccaggccatcgactgggacgtggaggaggaggaggagacagaacagtcgagtgagtccctcaggtgcaatgtcgaaccagtgggcaggttgcatatttttagcggtgcacacgggccagagaaggattttcctctgcacctcggaaagaatgtggtgggccgcatgcccgactgtagtgtggcattgcccttcccatccatcagcaaacagcacgccgaaatcgaaattctggcctgggacaaggcacccatactcagagactgtgggtccttgaatggcactcagattctgcgacctcccaaggtgttgtctcctggggtctcacaccgcctccgggatcaagagctgatcctgttcgcagacctgctctgccagtaccatcggctggatgtttccctgcctttcgtgtcccgagggccgctcacagtggaggagactcctcgagttcagggggagacacagccccagaggctcctgctagcagaggattccgaagaggaagtggacttcctttccgagcggagaatggttaagaagtctagaaccactagttcttctgttattgtgccagaatcagatgaagaaggtcactccccagtgctgggcggcctggggccccccttcgcgtttaacctgaactccgacactgacgtagaggaagggcaacaacctgcgacagaagaggcatcgagtgccgctcgacgcggagctaccgtcgaagccaagcagtcagaggctgaggtggtgacagaaatccagctggagaaggatcagccgctggtaaaagagagggacaacgatactaaggttaagagaggagccgggaacggggtggtgcctgccggagtgatcctggaacggagtcagcctcctggcgaggacagtgatactgacgtagatgatgactccagaccacccggcaggcccgcagaggtgcacctggagcgggctcaacctttcggctttattgattccgacacggacgcagaggaagagaggatacccgcgacccctgtggtaattcctatgaaaaaacgtaaaatcttccatggggtgggaactcggggccctggcgctcctggactagcccatctccaagaatcccaggcaggctcagacacagacgtcgaagaagggaaagcccctcaggctgttcctcttgagaaaagccaggcctctatggttatcaacagcgatacggatgatgaggaggaggtgtctgcagcactgaccttggctcatctgaaggagtctcagccggctatatggaacagagacgccgaagaggatatgcctcagagagtggttctgttgcagagaagccagaccaccacagagcgggattccgacaccgacgtggaggaggaagaattacccgtcgaaaatcgtgaagcagttcttaaggaccatacaaaaatcagagccctggttcgcgctcactctgaaaaagaccaaccgcccttcggtgatagcgatgattctgtggaggccgataagagctcccctggcattcacctcgaaagaagtcaggccagcaccacagttgacattaacacacaggtggaaaaggaggtgcccccaggatccgccattattcacatcaaaaagcaccaggtgtctgttgagggcactaaccaaacagatgtaaaagcagtcggaggccccgcgaagttactggtagtgtccctggaggaggcctggcctctgcatggagactgtgagaccgatgctgaagagggcacatccttgacagcttccgtggttgccgatgttagaaaatcccagttgcccgccgagggcgatgctggcgccgaatgggcagccgccgtgttgaagcaagagagggcccatgaagtgggagctcagggtgggccgccagtagcacaagttgaacaggacctgccaataagtcgggaaaatctgacagacttggtggtcgacacagatactttgggggaatctacacagccacaacgtgagggagcccaggttcccaccggcagggagcgtgagcagcatgtgggcggaaccaaggactcagaagataattatggtgacagtgaggatctggacctgcaggcaacccagtgcttcctcgaaaatcaagggctggaagccgtccaaagcatggaggacgagccaacacaggcttttatgctaacccctcctcaggagctgggaccgtcacactgcagcttccaaacaaccggcaccctcgatgagccttgggaagtgctggctacacaaccattttgcctgagagagagcgaagactccgagacgcagcccttcgatacacatttggaggcttatggcccatgcctttcccccccccgggcaatcccgggcgaccagcatccagagtcaccagtgcacacagaaccaatgggaattcagggaaggggaaggcagaccgtcgataaggtgatggggatacccaaggagactgcagagagagtcgggcccgaaaggggaccgcttgagcgcgagaccgagaaattgctgcctgagcgtcagaccgacgtaacgggagaagaggagctgaccaaggggaagcaggatcgcgaacagaaacagctactcgcgagggacacccagcggcaggaatctgacaagaatggggagtcagcctctccagaacgcgatcgggagtccctgaaggtggagatcgaaacctcagaggaaattcaggaaaagcaggtccagaagcagacattgcctagtaaggcctttgaacgcgaagtggagcgaccagtggccaatagagagtgcgatcccgctgagttggaggagaaggtgccaaaggttatactggaacgggatacccagaggggggagccagaaggcggcagtcaagatcaaaagggacaggccagctcccctacccctgaaccaggcgttggggcgggcgatcttcctggacctactagcgcacctgtcccctcaggaagtcagtcaggcggacgtgggtcccctgtaagccctcggcggcatcagaaaggacttttgaattgcaagatgcctcctgcagagaaagcgtcccgcatccgtgctgccgagaaggtatctaggggggaccaggagtcccctgatgcttgtttaccacccactgtgccagaagcccccgcccctccacaaaagcccctgaactctcaaagtcaaaagcacctcgccccacccccactgctctctcccttattaccatccatcaaaccaacagtgcgcaaaactcgtcaggacggtagccaggaagccccagaagcaccactctcatcagagctggagccatttcacccaaagccgaaaataagaacccggaagagctctcgaatgacacccttccctgctacctccgcagcccctgaacctcatccaagtacctctacggcccagccagtgactcctaaacctacttcccaggccacgagatcacgcactaaccggtcgagtgtaaagacaccggaacccgtggtgcccacggcccccgaactacaaccatccaccagtaccgatcaaccggtgacttccgaacctacgtcacaagtcactcgcggtaggaaatctaggtcctctgtgaagactcccgagacggtggttcccaccgccctcgagctgcagccgtccacctctacagaccgccccgtgacatcagaacctaccagccaggcaacacgtggccggaagaaccggtcaagtgtgaaaaccccagagccggtggtgccaaccgcaccagagcttcagccttcgacaagcacagaccagccagtgacttccgagcccacctatcaggcaacaagaggccggaagaataggtccagtgttaagacgcctgaaccagtggtaccgactgctcctgagctccgcccctccacctcgaccgatcgaccagtgacacccaaacccacttctcgcacaacacggtcccgcacaaatatgagctcggttaaaacccctgagaccgtggtccccacagccccggagctccaaatcagcaccagtacagatcagcctgtgacccccaagccaacaagtcgcacgactaggtcaagaacgaacatgagttcagtaaagaaccccgaaagcactgtgccaatcgcacctgaattgcctccatccacatctaccgagcaacctgtcaccccagaacccaccagcagagcaactcgcgggcggaagaatcgctcttctggcaagactccagagacactcgttccaaccgcccccaaactggagccgagcacttccaccgatcagcccgtgactcctgagcctacatcccaggccactaggggacgaacaaatcgcagttcagtcaagactccagaaaccgtggtccctaccgcccctgagctgcagccctcaacatctactgaccagcctgtcacacccgagcccacgagccaggctactagaggtaggaccgatagatcttccgtgaaaacaccggagacagtagtcccaaccgcgccggagttgcaggcgagcgcctctacggatcagcccgtgacatctgaacctaccagtcggactacccgaggaagaaaaaatagatcatcagtgaagactcccgaaactgtggttcctgcggccccggagcttcagccaagcaccagcaccgatcagcccgtgacaccggaacctacatcccgggccacacgagggaggaccaaccggagctccgttaagacccctgagtctatcgtccctatagcccccgagcttcagccttccacatctagaaatcagctggtcaccccagaaccaacttctagagccacaaggtgcagaacaaaccggagcagtgtgaagacccccgaacctgtggttcccaccgccccagaaccgcacccaactaccagcacagaccagcccgtcacccctaagctcaccagtcgcgcgacccgacgcaagacgaaccgcagcagcgtaaaaaccccaaagccagtcgaacccgcagcctctgacctcgagcccttcacccctaccgaccagagcgttacccctgaagcaatcgcacaggggggccagtccaagactctgcgctcaagtacggtgcgagctatgccagtcccaactacccctgaatttcagtcacccgttactaccgaccagcccatcagtccagaacctatcacacagccatcttgcattaagcgtcagagagctgccggaaacccaggcagcctcgctgcgccaatagatcacaaaccttgcagtgcccccctagaaccaaagtcacaggcgagcagaaaccagcgatggggggccgttcgtgccgcagagtctctgaccgccattcctgaaccagcaagccctcagcttctcgaaacgcccatccatgcatctcagatacagaaagtggaacccgccggacgaagccgttttactcccgaactccagcccaaggctagccaatccagaaaacgcagccttgcgactatggacagtcccccccaccagaagcagccacagaggggcgaagtctcacaaaagaccgtgattatcaaagaggaagaggaagatacagcagaaaagcccggaaaggaagaagacgttgtgacgccgaagcctggtaagaggaaacgcgatcaggcggaggaggaaccaaaccgaatccctagtaggtcgctcagacgaacgaagctgaatcaagaaagcacagcacctaaggtgctgtttaccggtgttgtggacgccaggggcgaacgcgccgtcctggccttaggaggctcccttgctgggagtgcagccgaggcatcccatttggtaacagaccggatcaggagaaccgtcaaattcctctgtgccctggggcgcggcatccccatcctctccctagattggctgcatcagtctaggaaagctggcttcttcctaccacctgatgagtacgttgtcactgatccggagcaggagaagaattttggtttttctctgcaggatgctttatccagggccagggagcgtcgcctgcttgaggggtacgagatatatgtgaccccgggagtgcagccacctccccctcagatgggggagataatctcatgttgcgggggcacttacttaccgagcatgcctagaagctataagcctcagagggtagtaattacttgtccacaagacttcccacactgttcgatcccattgcgtgtgggccttccacttctttcaccagaatttttgttgaccggagttctgaaacaagaggccaaacccgaggccttcgtactttctcctttagagatgagctctacctag

SEQ ID NO: 181298 - DNA, 6269 bp, Artificial Sequence
  derived and/or modified sequence
atggaggacacacaggctatcgattgggacgttgaagaggaggaagaaactgagcaatcctcggaatctctcaggtgcaatgtagagccagtgggccgactgcatatcttcagtggggctcacggtcccgaaaaagatttcccgctgcatcttggtaaaaacgttgtcggcaggatgcccgactgcagtgttgccctgcccttcccctcaattagtaaacagcatgcagaaattgaaattctggcttgggataaagcacccattctccgtgattgcggctcccttaacgggactcaaattctgagacctcccaaggtgctcagccccggagtcagccatcggcttcgcgaccaagaattgattcttttcgccgatctcctgtgccagtaccacagacttgatgtttcactcccttttgtttctcggggtcccctgaccgttgaagaaacaccacgcgtgcaaggcgaaacccagcctcagcggctccttcttgccgaggatagtgaggaggaagtagatttcctgtccgaacggagaatggtgaagaaatctagaacaacgtcctctagtgtcatcgttcccgaatcagatgaggagggccacagccctgtgctggggggacttggtccaccattcgcttttaatctgaacagcgacacggacgttgaggaaggtcagcagcctgccaccgaggaggcatcatccgctgccagaagaggagccactgtggaagcgaagcaatcagaagctgaggtagtgaccgaaattcagctcgaaaaagaccagccactggtcaaagaaagagataacgacacaaaggttaagagaggggcagggaatggagtggtccccgcaggcgttattctagaaaggagccagccacctggggaggactctgatacagacgttgacgacgattcccgccctcccggtcgaccggctgaagtgcatctggagagagctcagccatttggctttatagacagcgacacagatgcagaggaagaacgcatacctgctaccccggtggtgatcccaatgaagaagcggaaaatctttcacggcgtgggaacacggggtcctggcgctcccggtctggctcacttgcaggaaagtcaggccggatccgacactgacgtggaggaagggaaagcccctcaggccgtaccactggaaaaaagccaggcctcaatggtgatcaacagtgacactgatgatgaagaggaggttagtgccgctctcacccttgcacacttgaaggaatcccagccggcaatttggaaccgtgatgctgaagaagatatgcctcagagagttgtgcttctacagcgaagtcagaccacaaccgagagagactctgacaccgatgttgaggaggaggagttgccggttgagaaccgggaggccgtccttaaggaccacaccaagatcagggcactggtaagagctcatagcgagaaagaccaacccccttttggagatagcgacgattccgtggaagctgataaatcctccccaggcattcacctggaacgctctcaggcctcaaccactgtagacattaacacccaggtcgagaaagaagtaccaccgggtagtgccattatccatatcaagaagcaccaagtgagcgttgaaggaaccaaccaaacggatgtcaaagcggtgggtggacccgctaagctccttgttgtgagcctggaggaggcctggcctctgcatggggactgcgagacggatgcagaagaggggacttcgctgactgcgtcagtcgtagctgacgtacggaaatcacagctgcctgctgagggcgacgctggagccgaatgggccgctgctgtgttgaaacaagaacgcgcacatgaagtcggagcccagggcggtccaccagtggcccaagtagaacaagacctgccaatctcccgggagaatttgaccgacctggtcgtggacactgacacgctaggggagagtactcagcctcaacgagagggcgcacaggtgcctactgggcgtgagcgggaacagcacgttggcggaactaaagactctgaggacaactacggcgactcggaggacctggacctgcaggctacacaatgtttcctcgaaaaccagggcctggaggcagttcaatctatggaggatgagccaactcaggcctttatgctgacaccaccgcaggagctcggaccctcccattgctcttttcagaccaccggtactctggatgagccttgggaagtcttagctacgcagcccttctgtctaagagaaagcgaggatagcgaaacccagccattcgatactcatttagaggcatacgggccttgtctgtcaccacctagggctataccaggagaccagcatccggagtctccagttcacactgaacctatgggcatccaaggcagagggcgacagaccgtagataaagtgatgggaatacccaaggagaccgcagagagagtgggtccggagcgcggacctctggagcgtgagacagagaagctcctgccagaaagacagactgacgtaaccggcgaagaagaattaacaaagggtaaacaggatagagagcagaagcagctcctggctcgagacacccagaggcaggagtccgataaaaacggcgagtccgcctcgcctgaaagagaccgcgagagtcttaaggtggaaatagagactagtgaagaaattcaggaaaagcaagtccaaaaacaaactctgccatccaaggccttcgaaagagaagtagagcgaccggttgcaaacagagaatgcgatcctgccgagctggaagagaaggttcccaaagttattttggagcgggacacgcaacggggagagcctgagggtggatctcaggaccagaagggtcaagcaagttctcccacccctgaaccaggtgtaggtgccggtgatcttcccggacccacaagcgccccagtgccctccgggtctcagtccggcggtcgtggatccccagtctcgccgaggcggcaccagaaagggctactgaactgtaaaatgcccccagctgaaaaagcgtcccggatcagggctgccgagaaggtaagccgaggcgatcaggagagcccagacgcctgtctcccccctactgttccagaggcaccggcaccaccacaaaagcctcttaacagtcaatcccagaagcacctggcccctcccccactcctgagccctctgttgcctagcatcaagcccactgtgcgaaagaccagacaggatggctcacaggaggcaccggaggcacccctgagcagcgagctcgagcctttccatccaaaacctaagatacgcactagaaagagttctcgtatgacgcctttcccagccacctcagccgctcccgaaccacacccttcaacaagcaccgcccagcccgtgacgccgaagcccacttcgcaagctacccggtcgcgcaccaacagatcctctgtgaagacccctgaaccggtggtgcccactgctcccgagctgcaaccaagtaccagtacagatcagccagtcacgagcgagcccacaagccaagtgactcggggacggaagagccgctcatccgttaagactcccgaaaccgtcgtccctaccgctcttgagctgcaaccttccacgagcacagaccgcccagtcacatccgagcctacatctcaagcaacgcgcggtcgcaaaaacagaagctcagtgaaaaccccagagccagtggtgcccaccgccccagaactgcagccctccacgtctaccgaccagcccgtcaccagtgagcccacctatcaggccacacgcggaagaaagaaccgctcctcagtcaagactcctgaacccgtggtgccaacggcgcctgaactccgcccatcgacgagcacggataggccagtcactcccaaacctacgagtcggaccacacggtcaaggaccaacatgtcatcagtcaagacgcctgaaactgtcgtgcctactgctcccgagctccagatttctacctccacagatcagcctgtcactcccaagccaacctctcgcacaacacgctctcgaacaaatatgagcagcgttaagaatccagagagcactgtaccaattgcgccagagctacctccatctacttcaacagagcaaccggtgacgccagagcccaccagccgcgctacccgcggacgtaaaaacagaagtagtgggaagaccccagaaacactggtgcctactgccccaaaactggagccctccacgtcaactgatcaacccgtaacccctgaaccaacaagccaggctacccgcggtcggactaatcggagttccgtcaagacccccgaaaccgtggtcccaacggcccctgaattgcagccatcaactagcaccgatcagcctgtgacccctgaacctacttcccaagccacacgtggaaggaccgatagaagctctgtgaagaccccggagactgtggtgcctaccgctcccgagttgcaggcgtctgccagcacagaccagcccgtaacttccgaacctacttctcgaaccacgagaggaaggaagaatcgcagtagcgtcaagacaccggaaaccgtggtcccagccgctcccgagctgcagccatccacaagtactgaccagcccgtgacccctgagcctacttctcgggctacgcggggacgcacaaataggagttccgtgaaaacccccgaaagcatcgtaccaatcgcacccgagcttcagccgagcacctcacgcaatcaactagtgacaccagagccaacatccagagccacacgatgtcgtactaatcggagcagtgtcaagacaccagaaccagtagtgccgactgctccagaacctcaccctaccacaagtaccgaccagccggtcacgcctaaactgacttctagggctacacgacgcaagactaacaggtcaagtgttaagacccccaaacctgtcgaaccagccgcatccgatctcgaacccttcaccccaacggatcagagtgtgacccccgaagccatagcacaggggggacagagcaagaccctgcgttcgagcaccgtgcgggcaatgccggtgccaaccactcctgagttccaatcccccgtgacaaccgaccaacccatttctcccgagcccatcacccagccatcctgtataaagcgccagagggccgcaggaaaccctggaagcttagcagctccaatcgatcacaagccatgctcagcccctctggagcctaaatcccaagctagcaggaaccagcgctggggggcagtccgggcagccgaatcattgaccgccattcccgaaccggcaagtcctcagctgcttgaaactcctattcatgcgtcacaaatccaaaaggtggagcccgctggccgttcacgctttactccggaactacaacctaaggcttctcagtctaggaagaggtcattggccacaatggacagccctccacaccagaagcaaccccaacgcggagaggttagccaaaagaccgttattataaaagaggaagaagaggatactgccgagaagccaggtaaggaagaggatgtcgtgactccaaaacctggaaaacgaaaacgagatcaggccgaagaagagccaaacaggatcccttcgagatctctcagacggaccaaattaaatcaggagagcaccgcaccaaaagtattattcaccggtgtagtggacgctaggggggagcgggcagtgcttgcccttggcggaagtctcgcaggatctgctgccgaagcctcacatctggtgactgatcgaatcagaagaaccgtgaaatttttgtgcgctttgggcaggggtatccctatcctttccctggactggctgcatcagtcaagaaaagcaggattctttctgcccccagatgaatacgtggtcaccgatcccgaacaggagaagaatttcggattttccctgcaggacgctttatcaagagcacgcgagcggaggctactggaaggatatgagatctatgttacaccgggagtgcagccaccccctccgcagatgggagaaataatttcctgctgtgggggtacgtatcttcccagcatgccacgctcttacaaacctcagcgcgtcgtaattacgtgtccacaagattttccccactgttcgattccactgagggtaggtctacctctcctgagtccggaatttctgttgactggagttctgaaacaggaggccaagccagaggctttcgtgctaagtcccttggagatgagttccacata

SEQ ID NO: 181299 - DNA, 6269 bp, Artificial Sequence
  derived and/or modified sequence
atggaggacacacaagcaattgactgggatgtggaagaagaggaggagactgaacagagcagtgaaagcctcaggtgtaacgtagaacctgttggccgtttgcacattttctctggggctcatgggccagagaaggatttccctttgcacctgggaaaaaatgtagttggtagaatgcctgactgtagcgttgcgctgccattcccttcaatctcgaaacagcatgcagagattgaaatactggcttgggataaggccccaatcctccgagactgcggttctcttaatggcacccagatattgcgccctcctaaggttctcagtcccggtgtatctcacaggctgagggatcaggaactaatactgttcgccgatctcttgtgtcaataccatagattagacgtttcactccctttcgtgagcagggggcctctaactgtcgaagaaacacccagagtgcagggagaaactcagccgcaacggctcctgctggcagaagactctgaggaggaagtcgatttcctgtctgagagaaggatggttaagaaatctcggacaactagctcttctgtcatagtgcccgagagtgatgaagagggtcactcccctgttctaggaggattaggaccaccgtttgccttcaacctcaactcagacacagatgtggaagagggacagcagcccgcaacagaagaggcgagctctgctgcacgacgaggtgcaaccgtggaagcgaaacagtcggaagccgaggtcgtgactgaaatccagctcgagaaggatcagccattggttaaggaaagggacaatgataccaaggtgaagcgaggggctgggaacggagtggtcccggctggggttattctggagagaagccaaccccctggggaagactcagacaccgatgtcgacgacgactcccggcctccaggcaggcctgcggaagtacacttagaacgcgcacagccctttggctttattgacagtgataccgacgccgaggaggaacggatacctgccactccagtggtgatccccatgaaaaagaggaaaatttttcacggcgtgggaacccgtggaccgggtgctcccggactggcacacttacaggagtcccaggcgggatcagatacggacgtcgaagagggcaaggcacctcaggcagtacctctggaaaaaagtcaagcctctatggtgattaattcggatacagacgacgaggaagaggtgagcgccgcactgaccctcgctcacctcaaagaaagtcagcctgcaatttggaaccgcgacgccgaggaggacatgccccagcgcgtggttcttctgcagcgatctcagactaccacagagcgagatagtgatactgatgtcgaagaggaagagttgccagtcgaaaaccgcgaggcggtgctcaaggatcataccaagatccgtgctctggtaagagcccacagcgaaaaagaccaacccccattcggagatagtgatgactcagtggaagccgacaagtcatcacctggaatccacctggagcgcagccaggctagcacgacagtggatatcaatacccaggtggaaaaggaggtcccacctggtagcgccatcatacacatcaagaaacatcaggtttctgtggaaggaacaaatcagaccgacgttaaggcagtaggaggccctgccaagcttctggtcgtttccctggaggaggcctggcctctgcacggggactgcgaaaccgacgcagaggagggtacttctttgacagccagtgtggtcgcagacgttcgtaagtcccagttacccgctgagggcgatgcaggcgctgaatgggctgctgcagtacttaaacaggaacgggcacacgaagtcggggcacagggtgggccacctgtggctcaggtggaacaggatctgcctatcagccgtgagaatctgacggacttggtggttgacaccgacaccctgggcgagtctacccagcctcaacgtgaaggcgcacaggtacctacaggacgcgaacgtgaacagcacgtggggggtaccaaagattctgaagataactacggtgactcagaggacctggatctgcaagcaactcagtgttttctggagaatcagggtctggaagcagtgcagtcaatggaagacgaacctactcaagcttttatgctaacacctccccaggagctcggaccctctcactgctcgtttcagaccactggcactctcgacgagccttgggaagtactggcgacccagccattctgtctgcgcgaatccgaagactccgaaactcagccctttgacacccacttagaagcatacggcccttgtctgtcacctcctagggcaattcccggtgaccaacatccagaatcacccgtgcacaccgaaccgatggggatccagggacgtggcaggcagaccgtcgacaaggtgatggggattcccaaagaaacagccgaacgcgtgggaccggaacggggtcctttggagagagaaaccgagaagttgcttccggaaagacagacagacgtaaccggtgaggaagaactcactaaagggaaacaggaccgggagcagaagcagctactggctagagatactcagagacaggaaagtgataagaatggagagtcagcgtcacccgagcgtgatagggaatccctcaaggtggaaatcgagacaagtgaggagatacaggaaaagcaggtccagaaacagactctccctagcaaagcttttgagcgcgaggttgaaagaccagtggcaaatcgcgaatgtgatcccgctgaactggaagaaaaagtgcctaaggtcatccttgaaagggacacacaacgaggcgagcccgagggtgggtcacaggatcagaaagggcaggcaagctcccccaccccagaacccggagttggagcgggagatctcccgggaccaacctcagcaccggtgcctagcggttcgcaatctgggggaagaggcagccctgtgagcccaaggaggcaccagaaggggctactgaattgcaagatgccccctgccgagaaagcctctcggatccgagcggcagagaaggtttcccgcggagaccaggagagtcctgacgcatgcctgcccccaactgtccccgaggcacctgcacccccacagaaaccgttgaactctcaatcccagaagcatttggccccacctcctctcctgagcccattactaccgagcatcaagcccactgttcggaagacaaggcaagatggcagccaggaagcccctgaggccccattgtccagcgaacttgagcccttccatcccaaacctaagatccggacaaggaaatcatcaagaatgactccctttcctgccacatcggcagccccagagccccatccctccaccagcaccgcgcaacccgtcacccccaagcccacctctcaggcaacccggagtaggacaaacagaagcagcgtgaagacacccgagccggtagtccccaccgcccctgagctccaaccctccaccagcactgaccagcccgtcacctccgagcccacctcacaagttactagaggtcgcaagtcccgatcatctgtgaagacccccgaaacagtggtaccaaccgctcttgagctgcagcccagcacctctaccgacaggcctgttacttccgagcccacctcgcaggctactaggggcagaaagaatcgtagtagcgtgaaaactcccgaacccgtagtgccgactgcgccagaactgcagccaagtacttctaccgaccagcctgttacttccgagccaacctaccaggcgaccagaggtcggaagaacagaagcagcgtgaagacccccgagcctgtcgtgcctaccgcacctgagctgagacccagcacatccacagaccggccagtgactcccaagcccaccagcagaactacaagaagccgaactaacatgtcaagcgttaaaacccccgagaccgttgtgccaactgccccagagctacagattagtacctccaccgatcagcctgtcacaccaaagccgacatcgcgtactacacgttcgcgaactaacatgagcagcgtcaaaaacccagaatccacagtgccaatcgcccctgagctgcccccatccacaagtactgagcagcccgttactccggagccaacttctcgcgctacaagaggacgtaaaaaccgctctagcggcaagacacctgaaacacttgtccctacagctcctaaattagagcctagcacttcaacagatcagccagttacccctgaaccgacctcccaggccacacggggacgcaccaatcgctcttctgtcaagacgcccgagaccgtggtgcctaccgccccagagctacagcctagcaccagtactgaccaaccggtcaccccggagcctacatctcaggctactagaggtagaactgatcggagttcagtgaagacacctgagaccgttgtgccgactgcacccgaactacaagccagcgcgagtacagatcaacctgtgactagcgagcctacgagtcggactactcgaggacggaagaatagatcctccgtgaagacacctgaaacggtagtgccagctgctcctgagctccagcccagcacgtccacagatcaacccgtaacccccgaacctacatccagagcaacacgtgggaggacaaatcgttcctctgtgaaaaccccagagtctatagtaccaattgccccagagctgcaaccctctacaagtcgcaaccaattagtcacccctgaacctacctccagagcgacacgatgccgtacgaaccgtagcagcgtgaaaaccccagagcccgtcgttcccaccgcaccagagcctcaccctacaacaagcactgatcagcccgtcacgccaaaattaacgagcagggccacacggaggaaaaccaataggtctagcgtcaagacccctaaacctgtggagccagccgcttcagatcttgagcccttcacaccaaccgatcagtcagtaacgccagaggccatagctcagggaggtcagtcaaagacgctccggtcctctaccgtccgtgctatgcctgtgcccaccacccccgagtttcagagtccagtcactacagatcaacccatttcccccgagcctatcacccagccttcatgtattaaacgccagcgagcagctggtaacccgggatcgctggcagcccctatcgatcacaagccctgtagcgcccctctcgagcccaagtcacaggctagccgcaatcaacgttggggcgcagtccgggctgctgaatcgttaaccgccattcccgaacccgcttccccccagctgcttgagactcctatacacgccagccaaatccagaaagttgaacccgcaggtcgttctcgattcacacctgagctccagcctaaggcctcgcagtccaggaaacggtccctggctaccatggactcccccccacaccagaaacagcctcaacgtggtgaagtcagtcagaagactgtgataataaaagaagaggaagaggataccgccgaaaagcccggaaaagaggaagatgtggtgacgcccaagcccggaaaaaggaaacgggaccaagcggaggaagagcccaatcggatacctagtagaagcttacgtcgcactaaacttaatcaggaatctactgctcctaaggtgctgttcacaggagtcgttgatgctcgaggcgagcgcgcagttcttgcactgggtggaagccttgcagggtcggccgcagaggccagccatctggttacagatcgcatcagacgcaccgtgaagtttctgtgcgccctgggaagggggattcccatcctgagcctcgattggctgcatcaaagcaggaaagcgggattcttcctgccaccagatgagtatgttgttactgaccctgagcaggaaaaaaatttcggctttagcctgcaagatgcgctcagtagagcccgagagaggcgcctcctcgaaggatatgaaatctacgttacacctggcgtgcagccaccccctccccagatgggtgaaatcattagctgctgtggcggtacgtatcttccgtcgatgcccagaagctacaagccacagagagtcgtgataacttgcccacaggattttcctcactgttctatccccctaagagtgggcctaccattgttgagccccgagttcctactgaccggcgtgctgaagcaggaggccaagccggaggcatttgtgctgtcacctctcgaaatgtcctctacata

SEQ ID NO: 181300 - DNA, 6269 bp, Artificial Sequence
  derived and/or modified sequence
atggaagacacccaggccattgactgggacgttgaagaggaagaggagactgaacagtcctctgaatcccttcgctgcaacgtggagcctgtgggccgactacacatcttctcaggagcacatggacccgagaaagattttcctctccacttgggtaagaatgtcgtaggcaggatgcctgactgtagcgttgcactgccatttccaagcattagcaaacagcacgccgagatcgagatcctagcatgggataaagcccctattttgcgcgattgtggcagtctcaatgggacccagatcctccggcctcctaaggtcctctcaccaggcgtgtcccaccggctccgggaccaggagttaattctgttcgccgatctactgtgccagtaccaccgcctggatgtgtccctcccatttgtgagccgcggtccacttaccgttgaggaaaccccacgggtccagggggagacccagccccagcgactgctgctcgccgaggacagcgaggaggaggtcgacttcctaagcgagaggcggatggtgaagaagtctcgcaccaccagctcctcagtgatcgtccccgagtcggacgaagagggacattcaccagtgctgggcggtttaggacccccattcgcatttaacctgaattctgatacagacgtggaagaagggcagcagcccgctacggaggaagcttcttctgccgcaaggagaggtgctaccgtggaagccaagcaatcagaagctgaggtggtgaccgagatccaattagaaaaagatcagcccctcgtaaaggagcgggataatgacaccaaagtgaaacggggtgccggtaacggagtcgttcccgctggcgtgatcctggagcgcagtcagcctcctggggaggacagcgatacagacgtagatgatgattcccgcccacccggaaggccagccgaagtgcaccttgagcgtgcgcagccattcgggtttatagattccgataccgacgccgaggaagaacgaattcccgcaacacccgtggtgatccccatgaaaaaaagaaagatcttccatggtgtgggaacgagaggacccggagccccagggcttgcgcacctccaagagagtcaggcagggtctgacacagacgtggaagaagggaaggctccacaagcagttcccctagaaaaatctcaggccagcatggtcattaacagcgatacggacgatgaggaggaggtgtccgcagcccttaccctggctcacctaaaagagtcgcaaccggctatctggaatcgggacgcagaggaggacatgccccaacgtgtggtgctactccagcgttctcagacaaccacagaacgggactcagacaccgacgtagaagaggaggaattacctgtcgaaaatagggaggcggttctcaaagaccataccaagatccgtgcgctggtgcgagcccactctgagaaggatcagccaccctttggcgattctgacgactccgttgaagccgataaatccagccccggtatacacctggaacgtagtcaggcctcaaccacggtcgacattaacacccaggttgagaaagaggtcccgcctggatcagccattatccacattaagaagcatcaggtgtccgtcgagggtacgaaccaaacagacgtgaaagccgtaggcggtcctgccaagctgctcgtggtgtctctggaagaagcgtggccgctccacggggactgtgaaacagatgccgaggagggcacatcactgaccgctagcgtcgtggctgatgttcgtaagtcccagctgcccgcagaaggtgacgcaggggcagagtgggccgctgccgtcctgaagcaggagagggctcacgaggtcggagcacagggcggaccacctgttgctcaggtggagcaggacttacctatatccagagagaacctgacagaccttgtcgttgataccgacaccttgggcgagtccacgcagcctcagcgtgaaggagcgcaggtccccaccggcagagagagagaacaacatgtcggcggtacgaaagacagcgaggataattatggcgactcagaggatctggacctgcaggccactcagtgctttttagaaaaccagggtttagaagctgtacagagcatggaagacgagccaactcaagccttcatgctgacaccccctcaggaactgggtccatcgcactgttccttccaaacaaccggcaccctggatgagccctgggaggttttagccacccagcctttctgcttaagagagagtgaagatagcgagactcagccattcgacactcacctggaggcctatgggccatgcctgtcacccccaagagccataccgggtgatcagcaccccgagtcacctgtgcataccgagccgatgggcatacaagggagggggagacagacagtggacaaggttatgggcattcctaaggaaaccgccgagcgcgtagggccagaacgtggcccattagagagggaaacagaaaaattgcttccagaacgtcagacagatgtaaccggggaggaggaactaacaaagggtaagcaagacagggaacaaaaacaactcctcgctagagacacccagaggcaggaaagcgataagaatggggagtccgcctcaccagaacgggatcgagagagtctcaaagtggagatcgagacatccgaggagattcaggaaaaacaggtacagaagcaaacattgccttcaaaggcttttgaaagagaggttgaaaggccagtggctaacagagaatgcgatcccgctgagttggaggagaaggtccccaaggtgattctggaacgggatactcagcggggagagcctgagggcggatcacaggaccagaagggacaggcctcctcacctacccctgaacccggagtgggagcaggagatctgcctgggcctaccagcgctccagtgccgtcggggagccaatcagggggtcgcggtagtcccgtgtccccacggagacaccagaaggggttattaaactgtaagatgccacccgctgagaaagcgagccgcatccgtgccgcagagaaagtgtccagaggtgatcaagagtcaccggacgcttgtctccctccgacagttcccgaagcccctgccccacctcagaagcctctgaactctcagagccagaaacacctcgctcctccgcctctcctgagccctctgctgccgagcatcaaaccaaccgtccgaaaaacccggcaagatggttctcaggaagccccagaggcgccattgtctagtgaactcgagccattccatcctaagcccaaaattagaacccggaagtcttctagaatgaccccattccctgccacatccgccgctcctgagccccaccctagtacctcgaccgcccagccagtgactcccaagcctacgtctcaggctacacggtcgagaaccaacaggagctccgttaagacaccggagcctgtcgtgccaacagcacccgagctgcagccctcaacttccactgatcaacctgtgacgagtgagccaacctctcaagtgactcgtggcagaaaaagccgcagctccgtcaaaacccctgagaccgtcgtacctaccgcactggagctgcagccttctacatcgaccgataggcccgtaacctcagagcccacatcacaggccacacgcggacgcaagaaccgttcatctgtgaaaactcccgagcccgtggtgcccaccgctcctgaattacagccgtccacatccaccgaccagccagtgacaagtgagcctacttatcaggccaccagaggcagaaaaaaccggtcgtcggtgaagacacccgaaccagtggtcccaacagcacctgagctgcgaccttcaacaagcactgatcgcccagtgaccccaaaacccacatcacgcacgacaaggagccgtaccaatatgagtagcgtgaaaacacctgagacagtagtcccgactgcgccagaactgcagatttcaaccagtaccgaccagccagtgacacctaaacccacgtctcggactacaagatctcgcaccaacatgagcagtgttaaaaaccccgaatcgacggtgcccatcgctcctgaactgccaccatctacgagcacagaacagcctgtgacacctgaacccacatcacgcgcaacccgtggacgcaagaatcgatctagcggcaagacccccgagacactggtgcctacggctccaaaattggagccgtctacgtccaccgatcaacccgtgactccggagcccacatcccaggctacccggggaaggacgaatagaagtagtgtgaagactcctgagactgttgtccctaccgctcccgagcttcaaccttcgacatcgacggaccagcccgtgacacctgagccaacgtcccaagctacaagagggcgaactgatcgtagtagcgtaaaaactccagagactgttgttcccaccgctcccgagttacaggcgtccgccagcaccgaccaaccagtgacgtctgagcccacaagtcgcaccacccgcggacgcaaaaatagatcgagcgtgaaaacccccgaaaccgttgttcctgctgctcccgagctacagccctctacctctactgaccagcccgtaacgcctgaacctaccagtcgcgctaccagaggaagaacaaataggtccagcgttaagactccagagtccatcgtaccgatcgcacctgaactgcaaccctctaccagtagaaaccagttggtgactccggagccaacctccagagcaactaggtgcaggacaaatcgctctagcgtaaagactccggagccagttgtccctaccgccccagagccacacccaactacatccactgaccaacccgtaaccccgaagttgacctcccgagctacacgacgaaaaacgaaccgatccagtgtgaagactccaaaacccgtcgagccagctgcttcagatctcgaacctttcaccccaaccgatcaatcagtgaccccagaggccatcgctcaaggcggacagtccaaaaccctgaggtccagcactgtccgggcaatgcctgttcctactactccagaatttcagagtcccgtcactacagaccaaccaattagccctgaaccgatcacacaaccatcatgcattaaacgtcagcgtgctgcaggaaacccgggatcccttgcagcccctatcgaccacaagccatgctcagcacctctggagcccaaaagccaggcgtcccggaaccagcgctggggagccgtgagggccgcagaatccctaacagcgatcccggaaccagcttccccacagctattagagacacctatccacgcgtcccaaatccagaaggtggaacctgcaggcaggtctcggtttacgcccgaactgcagccaaaggcgtcgcaatccaggaaaagaagcctggccacaatggatagcccaccacaccaaaagcaaccacaacgtggggaggtctctcagaagacagtgatcattaaagaggaggaggaggacacagccgagaagcccggaaaggaggaggatgtggtaacgccaaagcccggtaagaggaagcgcgaccaggctgaagaagaaccaaacagaattccttcccgctctctacgacggacaaagctgaatcaggagtcaacggccccaaaagtactgttcactggcgttgtggatgccagaggcgaacgcgctgttctggctctggggggttcacttgccggatctgctgccgaggccagtcacttagtcacagacagaattaggagaaccgttaagtttctgtgtgcattgggccgtggtatcccaatactgtcacttgattggttacatcagtcacggaaagccggattcttcctgccgcctgacgagtatgtcgtgacggacccggagcaggaaaaaaactttggcttttctcttcaggacgccctttctcgcgctagagagagaaggttgctggagggctatgagatctatgtgacccctggagtgcagccgccacctccccagatgggagagatcatctcctgctgtggcggtacctacctccccagtatgccacgcagttacaagcctcagcgcgtggtaattacttgcccccaggactttccacactgcagcattccactccgagtcggcctgcccttactctcccccgagttcttactgaccggagtgctgaagcaggaggcaaaaccagaggccttcgtacttagtccactagaaatgagcagcaccta

SEQ ID NO: 181301 - DNA, 6269 bp, Artificial Sequence
  derived and/or modified sequence
atggaagacactcaggccatagattgggacgttgaggaggaggaagaaactgaacagagctcagagtccttacggtgtaatgtagaacctgttgggaggctgcacattttctcaggtgcccacgggcctgaaaaagatttcccactccacttaggcaagaacgtcgtcgggcgaatgcctgactgcagcgtggcactccccttccccagtatctcaaagcagcatgccgagattgagattttggcttgggataaggcccctatactgagggactgtggttcattgaacgggacccagatactcagacctcccaaagtcctctcacctggcgtgagccatcggctgcgagaccaggaactgattctattcgccgatctgctgtgtcaataccacagactggacgttagccttcctttcgtgagcagaggacctctgaccgtagaagagacgccaagagttcagggcgaaacacaacctcaacggcttttactggctgaagactccgaagaagaagtggacttcttaagcgagagacgtatggttaagaaatctcgtaccaccagcagcagtgtcatcgttcctgagtctgatgaggaaggccattcaccagtactgggcggactaggaccaccctttgctttcaacctgaactccgataccgatgtcgaggagggccagcagccggcaaccgaggaagcgagttctgcagctcgcaggggtgcaaccgtagaggcgaaacaatctgaggctgaggtagttacagagattcaacttgagaaggaccagccgctggtcaaagaacgggacaacgatacaaaggtcaagagaggcgctggcaacggggtagtgcctgccggagtcattctggagagaagccaacctcctggagaagatagtgacactgacgttgatgatgattccagacctcccggaaggccggcagaggtgcacttagaacgcgctcagccattcggattcattgatagcgacacagacgcggaggaagagcgtatccccgctacgcctgtagtgatccccatgaagaaacgtaaaattttccacggcgtggggacgcgcggaccaggagccccagggttggctcatctgcaggagagccaggccggttccgataccgacgtcgaggaggggaaggctccccaagccgtgccgctggaaaagtctcaggcttccatggtgattaactctgataccgatgatgaggaggaggtttccgcggctttaacgctcgcgcatctgaaggagagccaaccggctatctggaatagagacgcagaagaagacatgccccagagagttgttttgctccaacggtcacagactaccactgagcgtgattcggacacagacgtcgaagaggaggaattacctgttgagaacagggaagctgttctgaaagaccacacaaagatccgcgcactcgtgagagcacactccgagaaggatcagcccccattcggcgactccgacgactcagtggaagcagataaaagttctccgggtatccacctggagagatcacaggcttcgacaaccgttgatataaatactcaggtggaaaaagaggtgcctcctggcagcgctattatccacataaaaaagcatcaggtgtccgttgaggggaccaaccagaccgacgtcaaagctgtgggcggacctgcaaaactactggtcgtcagtcttgaggaggcctggcccctgcatggagactgtgaaaccgacgctgaggaaggaaccagtctcaccgcttcagtggtggccgacgtgagaaagtctcaactccctgccgagggtgacgcaggcgctgagtgggcagcagcagttcttaaacaagagagggctcatgaagtcggcgctcagggagggcctcctgtggcacaggttgagcaggacctgcccattagtagggaaaatctgactgaccttgtggtggataccgatactcttggagaatctacacagcctcagcgggaaggcgcacaagtgcctacagggcgagaaagagagcaacacgtgggcggaaccaaggacagtgaggataattacggggatagcgaggatctggatctgcaagccacccaatgttttcttgagaaccagggactagaggcagtgcagagcatggaagatgagcccacacaggcttttatgttgactcctcctcaggagctggggccatctcactgctcctttcaaactaccggtacactcgacgagccttgggaggttctggcaacacagccattttgcctgcgggagtcagaggattccgagacacagccttttgacacccacctggaggcctatggcccatgcctgtcccccccacgtgcgattcctggggaccagcatccagagtctcccgtgcacacagagcctatgggaattcagggacggggacggcaaacggtagacaaggtgatgggcattccgaaagagacggccgagagagttggacccgaacgcggaccgcttgaacgagagacagagaagctcctgcccgagcgtcagactgatgtgactggcgaggaagagttgaccaaaggcaagcaagatcgggagcaaaaacaactgctggccagggatacacagagacaggaaagcgacaagaatggagagtccgcctcgcctgaacgagacagggagagcctgaaggtggagattgagaccagtgaagagatacaggagaagcaggtgcagaagcagactctgcccagcaaggcttttgagcgggaggttgaacgacctgttgcaaacagggagtgcgatcccgcagaactggaagagaaagtcccaaaagtgattctggagcgcgacacccagcggggtgaacccgagggaggttctcaggatcaaaaagggcaggctagcagtccaacgcctgagccaggcgtgggcgctggcgacctcccgggtccgacctccgctcctgtgccatcagggagtcaaagtggcggaagaggcagccccgtttctccccgtaggcatcagaagggcctgttgaattgtaaaatgcctcctgcagagaaagccagcagaataagagccgcagagaaggtatcccggggtgatcaggagtcgccagatgcatgcctgccccctacagtgcccgaagctcctgcgcctcctcaaaaaccgctgaactcccagtcccagaagcacttagctcctccacctctgctctctccgttgctgccatccatcaagcctaccgtcagaaagacccggcaggacgggtcgcaggaggccccagaggctccgctgtccagtgagttggaaccctttcatcccaaaccaaagattaggacgcgcaaatctagccggatgacaccctttccggctacaagtgcggctcccgagccccatccatcaacgagcacggctcaaccagtcaccccaaaacccacatctcaggcaacccggtcacgcactaacagaagcagcgtaaaaactcccgaacccgtcgtcccgaccgcacctgaactgcaaccatccacttcaacagatcagcccgtgacctctgagccgacaagccaagtgacaaggggaagaaagagtcgttctagcgtcaagacacccgaaacggtggtgcccaccgccttagagttgcagccaagtacatccacagaccggcctgtgacttctgaacccacctcacaagccaccaggggacggaaaaatcgctctagtgtaaagactcccgaacctgtggtcccaaccgcccctgaactccagcctagcaccagtacagaccagcccgtaacgtccgaacccacatatcaggcaaccaggggccgtaaaaacagaagtagcgtgaaaactccagagcctgttgtaccgactgcccctgaacttagaccttccacaagcaccgacagacctgtcaccccaaaaccaacaagtcggacgacgcggagccgaactaacatgtcctccgttaagactccagaaaccgttgtgccgacagccccagagctgcagatttctacctctactgaccagcctgtgactcctaagccaacatcccgcacaacccggagccggactaacatgtcttcggtgaaaaatcccgagagcacagttccaatcgcacccgaactgcccccttctacttcgaccgagcagccggttactcccgaacctactagtcgggcaacccgagggaggaagaacagatcctcgggtaaaacaccagaaacacttgtccccactgcaccaaagctggaaccgagcaccagtaccgatcaacctgtgaccccagagcccaccagtcaagccactagagggaggaccaatcggtcaagcgtcaagacccctgagaccgtggtaccaactgcgcctgaactccaaccctctacaagcaccgaccagcctgtgactcctgaacctaccagccaggcaacacggggacgcacggaccggtcaagtgttaagactcctgaaacagtcgtgccgaccgcgcctgagctacaggcgagcgccagcacggatcagcctgtgacttctgaacccacctcgcgtaccacacggggaagaaaaaatagaagctcagtcaagactcctgaaacagttgttccagccgcaccagaacttcagccgagtacaagcaccgatcagccagtgactcccgagcctacctctcgtgccactcggggaaggacaaatagaagttccgtcaagactcctgaaagcatcgtgcccatcgcgcctgagctgcaacctagcacgtcccggaaccagcttgtaacgccggagcctacatcccgagccaccagatgcaggaccaacagaagctccgtaaagacacccgagcccgtcgtgcctactgcaccagagccgcacccaacaaccagcactgatcagccggtgacacctaaactgacttcaagggcaacccggagaaaaacgaatagaagctcagtaaagacccctaagcctgttgagccagccgctagcgacttagagccgtttactcccaccgatcaatcagttacaccagaggcgatcgctcagggtggccagtctaaaaccttgaggagttccactgttcgggctatgcccgtccctactactccagagttccaatccccagttacaaccgaccagcctatttctcccgaacctatcacccaaccaagttgtatcaagaggcaaagggcagccggaaaccccggatctctcgcagcccctatagatcacaagccttgtagcgcacctctggaacctaagtctcaggcatcccggaatcaacgttggggtgccgtgcgcgcagctgaatcactcacagccattccggagcccgcaagtccacagttgctggaaacccccatacacgcatctcagatccagaaagtggagcccgctgggagaagtcgcttcactccggaactacaacccaaggcctcccagtcccggaagcgcagcctcgccacaatggacagccccccacaccagaagcagccgcagcgcggtgaggtctctcagaaaaccgttattatcaaggaagaagaagaggatacggccgagaagcccggtaaagaagaagatgtggtgacgcctaaacccggtaagcgtaaaagggaccaggccgaggaagaacccaatagaatcccaagtcgcagtcttcggagaacaaagcttaaccaggagtctacagctcctaaggtgctgttcacaggagttgtggacgcacgcggagaaagagccgtcttagctctcggtgggtctctggcagggtcagctgccgaggcatcacacctcgtgacagaccgcatcagacgtacagtcaaattcctgtgtgctctaggaagaggcatccctatccttagtctggactggctgcaccagagcagaaaggcaggattctttcttccacccgacgaatacgtggttactgatccagaacaggaaaaaaacttcggcttttctcttcaagatgctcttagtcgggctagagagagaagactgctggagggctacgagatttacgtgaccccaggagtgcagccaccacccccacagatgggcgaaattatttcctgctgtggagggacatatcttccttcaatgccaaggtcttacaaaccacagcgtgtcgtaatcacctgcccgcaggacttccctcattgctcaatccccctgcgggtggggcttccccttctgagcccggagttcctgctaacaggagttctgaagcaggaagccaagcctgaggcttttgttctgagtcccctagaaatgagctccacgta

SEQ ID NO: 181302 - DNA, 6269 bp, Artificial Sequence
  derived and/or modified sequence
atggaggatacccaggcaatagattgggatgtggaggaggaagaggaaacagagcaatctagcgaaagtctgcgatgcaatgtagaaccggtcggccgtcttcatattttctcaggagcccatggacctgagaaagatttccctttacatctggggaagaacgtggtgggtagaatgccagattgttctgtggccctgccatttccatcaatttccaaacagcacgccgagattgagatccttgcttgggataaagcacccatcctccgagattgcggctccctcaacggaacacagattctgcgccctcctaaggtgctgagccccggtgtgagccacaggctgcgagaccaggaactgatcttatttgcggatctgttatgtcagtaccacagactcgacgtgtccttacctttcgttagccgtggccctttgaccgttgaggagaccccacgggtacagggagaaacccagcctcaacgactgctcctggctgaggactcagaggaagaggtcgacttcctcagtgagaggagaatggttaaaaagtcgaggacaacttcatcctcagttatcgtgcctgagagcgatgaggagggccactcccctgtactgggaggtcttggtcctcctttcgctttcaacctgaactccgacaccgacgtcgaggaagggcagcagcctgcaactgaggaggcatcttccgcggcacgccgtggggctaccgttgaagccaagcagagtgaagcagaggttgtgacggaaatacagctcgagaaggaccagcccctggttaaggagcgggataacgacacaaaagtcaaacggggagcgggaaacggcgtcgtcccagctggtgtgatactggagcgcagccagccacccggtgaagattcagacaccgatgtggacgacgattcccgccctccaggcaggcccgctgaagtgcatctggagagagctcagccatttggctttatcgactccgacactgacgccgaagaggaaaggatccctgccaccccagtggtgattcccatgaagaagcgcaagatcttccacggcgttgggactcgcggacctggagccccaggactggcccaccttcaagaatcccaggcaggatcagatacagacgtcgaggaggggaaggcgccacaggctgtgccgcttgaaaaatcccaggcctctatggtcataaattctgacacggacgacgaggaagaggtgagcgcggctctcaccctggcccacctcaaggagtctcagccagccatttggaacagagacgcagaagaggatatgcctcagagggtcgttctgctgcaacgcagtcaaacaacaacagagcgtgatagcgacacggacgttgaagaggaggagttgcccgtggagaatagagaggccgtcctcaaggaccatacgaaaataagagcactggttcgggctcactctgagaaagatcaaccccctttcggcgattcagatgattctgtggaggccgataagtcaagcccgggaatccacctggagaggtcccaagcatcaacgacagttgatatcaatacccaagtggagaaggaggtgcccccaggtagcgcgatcatccacattaagaagcatcaagtgtctgtggagggaactaatcaaaccgatgttaaggcagtagggggtccagccaagctattagtcgtgtccctggaggaggcctggcctctgcacggagactgcgaaaccgacgcagaggagggaacctcattaacggcctccgtggttgcagatgtaaggaagtcccagctccccgcagagggcgacgctggggcagagtgggccgcagctgtgctgaagcaggaacgggctcatgaagtcggcgctcagggcggaccacctgtagcccaagtggagcaggatctgccaatctcaagagagaacctgaccgaccttgttgtggatacagatacccttggtgagagtacccagcctcaaagagagggggcacaggtgcccacaggcagggaacgggagcaacatgtcggaggcactaaagatagcgaagacaattatggcgactcagaagacttagacctacaggccacccagtgcttcctggagaaccagggactggaagccgtgcaatccatggaggacgagccgacccaggcattcatgctcacccctcctcaggaattaggaccttctcactgctctttccagaccacagggactctcgacgaaccctgggaggtgcttgctacccaaccattttgtctccgcgaatctgaggatagcgagacacagccctttgatacacacttggaggcgtatgggccttgcttgtcgccaccaagggcaatacccggagaccaacatcctgagtctcccgttcatactgagcctatggggattcagggcagagggcgtcaaaccgtggacaaagtcatgggcatcccaaaagagactgctgaacgcgtgggccctgaaagagggccactcgagagggagactgagaagctgttgcctgagaggcaaactgacgtgaccggggaagaagagttgaccaagggaaagcaagaccgggagcagaagcagcttctggctcgggatacccagcgtcaagaatcagacaaaaatggcgagtcagccagcccagaacgtgacagggagagcctgaaagtggaaattgaaacatccgaagaaattcaggagaagcaggttcagaaacagaccctcccatctaaggcctttgagcgagaagtcgaacggccagtggccaatagggagtgtgaccccgctgagctggaagagaaggtgcccaaagtaatcttggaaagagacacccagcggggtgagccggaaggtggctcacaggatcaaaagggtcaagcgtcctccccaacccctgagccaggagttggagctggtgacctacccggacccacgagcgcacctgtgccctcaggctctcagagtgggggaaggggctctcctgtttccccccgaaggcaccagaaaggactgctcaattgtaagatgcctccagccgaaaaggcctcccgtatacgcgcagcggagaaggtatctcgaggggaccaggagagtcccgacgcatgtctgcctccgacagttccagaggccccagcgccaccgcagaaacctcttaattctcaatctcagaagcaccttgcaccaccacctttattgtccccacttctgcccagtatcaagcctaccgtcaggaagacaagacaggatggctcgcaggaagcccctgaagcaccgttgagcagtgagctggagcctttccacccgaagcccaaaattcggacccggaaatcttccaggatgacaccatttcctgcgacctccgcagcccctgaaccacatcccagcaccagcaccgctcagcctgtgaccccgaagcccacatctcaggcaacacgttccaggactaaccggtcctctgtaaagacacccgaacccgtcgttccgaccgcccctgagctccagccaagcacttccactgatcaacctgttaccagcgaaccaacctctcaggtcaccagaggccgaaagagccggtcatctgtcaagactcctgaaactgttgtgccaacggcactcgaactccagcccagcacgtcgactgaccggccagtgaccagtgaacctacctcacaggccacacgcggacgaaaaaatcggtccagcgtgaaaacacccgagcccgtagtgccgacagccccagagctgcaacctagcacttcaaccgaccagccagtgacatctgaacccacgtatcaggcaactaggggcaggaaaaacagatcctccgttaagacaccagaaccagtggttcccactgctcctgagctgcgcccatccacctccaccgatcgccctgtcacccctaagcctacttccagaacgacaagaagccgcaccaacatgtcctcagtgaagacccccgagactgtagtgcctactgcgccagagctgcagatcagcaccagtactgaccaacctgtgacgccgaaaccgacctctcggaccacaagaagcaggaccaatatgagttctgtgaagaatcctgagagtactgttcccattgctccggagttaccccctagcaccagcaccgaacagcctgtcacgcccgagccaacgagcagagcaacccggggtcgaaagaacagatcttctggcaagacccctgaaacccttgtgcctactgccccaaagcttgaaccctccacatctaccgaccagccagtcacacccgaacccacaagccaagcaacccggggacgaacaaacagatcctcagtgaagacacccgagaccgtggtgccaaccgctccagaactgcagccttccacatctaccgaccagcccgtcacccctgagccaacctctcaggcgactcgcggtcgaacagacaggagcagtgtgaagacccccgagactgttgttcctacggcaccagaattacaggccagcgcctccaccgatcagcctgtcacctccgagccaacatccagaacaacgcgcggtcggaaaaatcgctcttctgtgaaaacacctgaaacagtagtcccagccgcacctgagttacagccttctacctccactgatcagcctgttactcccgagccaacatctcgggctacacggggtcggaccaacagatcatctgtgaagactcctgagtcaattgtgcccattgcgcctgagttgcaacctagcaccagtcgaaaccagctcgtgacaccagaaccaacctcccgggcaactagatgccggacaaatcggagttcagtgaagacaccagaacccgtcgttcccactgcacctgagccccaccctacgacttctacagatcagccagtgactcccaagcttacttcccgtgctacacgcagaaagaccaataggtcatccgtgaaaactccgaagccagtggagcctgccgcttctgacttggagccttttacgcctactgatcaatcggtgacccccgaggcaatcgcccagggtggccagtctaaaacattgaggtcctccacggtgagggccatgcctgttcctactacgccagagtttcaatcgccggttactaccgaccagccaatttcgcccgaacccataacacagccgtcctgcatcaagcgccagcgggctgcgggtaacccaggcagccttgccgctccaattgatcacaagccctgttcagcaccgctcgagcctaagagtcaggcctctagaaaccagcggtggggtgccgtgagggcagcagagagcctgacagccattcctgagcctgcctccccccaactcctggaaacacctatccacgccagccaaatccaaaaggttgagccggctggaagaagcaggttcacaccagaactgcagccaaaagcctcacagtccagaaagcgctccctggccaccatggatagcccgccacatcagaagcaacctcaacgaggagaagtgtcccaaaaaaccgtgatcatcaaggaggaggaagaggatactgcagaaaaacctggaaaagaggaagacgtcgtcactccgaaaccaggcaaaaggaaaagagaccaagccgaggaggagccaaaccggatcccgtccagatcactgcggcgtactaagctgaaccaggagtctaccgccccaaaagttttgttcacaggcgtggttgacgctcggggtgagagggctgtgctcgcgttggggggtagcctcgccggttcggccgcagaggcaagccatcttgtgaccgacagaatcagaaggaccgtgaagtttctctgtgcactgggacggggaattcccatattatccttagattggcttcatcagtctagaaaggctggtttctttctcccacccgatgagtatgtggtgaccgacccagagcaggagaagaatttcgggtttagcttgcaggacgcactatctcgcgcaagagaacgaagactgctggagggctacgagatctacgttactcctggcgtccagcctcccccacctcagatgggtgaaatcatatcttgctgcggtggcacctacctgccctcgatgccacggtcatataagcctcagagggtggtaatcacttgtccccaggattttcctcactgctcgatcccactcagggtgggccttcctctgctgagccctgaattcctgctaacaggcgtgctgaagcaggaagccaaaccggaagcattcgtgctttcaccactggagatgagcagcaccta

SEQ ID NO: 181303 - DNA, 6269 bp, Artificial Sequence
  derived and/or modified sequence
atggaagacacccaggcgatcgactgggacgtggaggaggaagaggagaccgaacagtcatccgaatcgctccgctgcaatgtcgaacctgtcggcaggcttcatattttctccggagcccacggccctgagaaggactttcctctccacttgggaaaaaacgtggttggcagaatgccagattgcagcgtcgctctcccatttccgagtatttctaaacagcatgctgagatcgaaattctggcatgggacaaggcaccaatcctgagggattgcggcagcctcaacggcacccagatcttacggcctcctaaggttctctctccgggagtgtcccatcgcttaagggaccaagagctcatattgttcgcagacctgctttgccagtatcaccggctcgatgtgtcattaccgttcgtgtcaaggggaccattgacagtcgaggaaacaccaagagttcagggggaaacccagccgcagcgtttgcttttagctgaggacagcgaggaggaggtggatttcctctctgagaggcgcatggtgaagaagtctaggacgactagctcctccgtgatcgtccccgagtcggatgaagaggggcactcccccgtgctcggcggactcggtcccccatttgcctttaatctaaacagcgatactgatgtagaagagggacagcagccggcaacagaggaagcatcaagtgccgctaggagaggcgcaactgttgaggccaaacagagcgaagcggaggtcgtgactgaaattcaacttgagaaggaccagccactcgtgaaagaacgagataatgataccaaagtgaaacgtggggctggaaatggcgtggtgcccgcaggcgtgattctggaaaggtcacagcctcccggagaggatagcgataccgatgtggacgacgactcccggcctccaggaaggcctgcggaagtgcatctggagagggctcagccttttggatttattgatagtgatactgacgctgaggaagagcgcatccccgctactccagtggtgattcccatgaaaaagcgaaagatattccatggcgttggaacgcggggacctggtgcacccggtcttgcacacctgcaggagagccaggcaggatcagacaccgacgtagaggagggcaaagccccacaagccgttccactggagaagtctcaggcttccatggtgataaatagcgataccgatgatgaggaggaagtatcagccgctctcacactggcccacttaaaggaaagccagcctgctatctggaaccgggatgcggaagaggacatgcctcagcgggttgtcctcctccaaaggtctcagaccaccactgagcgggattctgataccgacgtggaggaggaagagcttcccgtagagaaccgagaagctgttcttaaagaccatactaaaatccgggctctggtccgggctcactccgagaaggaccagcctccgttcggtgatagcgatgactctgtcgaggccgacaagtccagccccggtatacaccttgagcgcagtcaagctagcacaacagtagacataaacactcaggtggaaaaggaagtccctccaggatccgcaattatccatatcaaaaagcatcaagttagtgtggaagggaccaaccagaccgacgtgaaagcggtgggcggaccagcaaaactgcttgtcgtgtcacttgaagaggcttggcctctacacggtgattgcgagaccgacgccgaggaaggcacgtcgctgaccgctagtgttgtggcagacgtgaggaaatcacaactgccggctgagggagatgctggcgcagagtgggccgctgccgtgttaaagcaagaaagagctcacgaggtaggcgcacagggcggtccccctgtcgcccaggtggagcaggatttgcctataagtagggagaacctgactgacctcgtcgtggacaccgatacattaggtgagtccacgcagcctcaacgcgaaggggctcaggtacccactggaagagagcgcgaacagcacgtcggcggaaccaaggactccgaagacaactatggagattctgaggacctggacctgcaggcaacacagtgctttctcgagaatcagggcttagaggccgtacagagcatggaagacgagccaacgcaggcctttatgctaactccgccacaggaactgggtcctagccattgctcgtttcaaactacagggacactggatgagccgtgggaggtgctggctacccagccattctgcctgcgagaatccgaggacagtgagacgcagccttttgacacacacctcgaagcctatgggccttgtctctcccctccgcgagccattcctggagaccaacacccagaatccccggtccataccgagcccatgggtatccaaggcagaggacgacagacagtcgataaggtcatggggatccccaaggagaccgcagagcgcgtcggcccagaacgaggcccactggagcgggaaacagaaaagctgctgcccgagcgacagacagatgtgacaggagaggaggagctcaccaaaggcaagcaggatagggaacagaaacagctgctcgccagagacacgcaacgacaagagagtgataagaacggggaatctgcctctcctgaacgtgatagagaaagtctcaaggtggagatagagacctcagaggagattcaagaaaaacaagtacagaaacagacacttccaagcaaggcttttgaaagggaagtggaacgaccagtcgccaatcgggaatgcgacccagccgagctggaagagaaggtgcctaaggtcatcctcgagagggacactcaacgaggggaacctgaagggggtagccaagaccagaaaggccaagctagctccccaactccggaaccaggagtgggtgctggagatctgccgggacccactagcgcccctgtgccttcagggagccagtctggagggaggggatcaccagttagcccgcgtaggcaccagaaaggcctgttgaactgcaaaatgcccccagctgagaaggcttccagaatcagggcggcagaaaaggtctctcggggagatcaagaatccccagatgcttgcctgccaccaacggtccccgaagcaccggctccacctcagaagccccttaattcccaaagtcagaagcacttggccccacccccattgttgagtccgctgctgccttctattaaacctactgtccggaagacccgacaggacggatctcaggaagctccggaagccccattgtcctccgagctggagcccttccatcctaagcccaaaatccgcacaaggaaaagcagcagaatgaccccattcccagccactagcgctgcgccagaaccccatccctcaacgagcacagcgcagcctgtgacaccgaagccgaccagtcaggccacccgatccaggacaaaccgaagctcagtaaagactcctgagcctgtcgtgcccaccgcaccagagctccagccttctacttctacagaccagccagttaccagtgaaccaaccagccaagtgacacgcggacggaaaagccggtctagcgtgaagacaccagaaacagtagtgccaacggctttggagctccagccttccacttcaacggacagaccggtgacctccgaaccaacttcacaggccactagaggcaggaaaaatcggtccagcgtgaagactcccgaaccagtcgtgcctactgcacccgaactgcagccatccacatccaccgatcaacctgtaacttccgagccgacctatcaggcgacgcgcggacgtaagaaccgctcctcggtgaagactcctgagccagttgtccccaccgcacccgagctgcgcccatccacctcgacggataggccagtgacccctaaacctacgagtaggacaacacggagcagaactaacatgagtagcgttaagacacctgagaccgttgtgccgaccgctccagagttgcagatctccacctccactgatcagcctgtcacccctaaacccaccagcagaacaactagatccagaaccaacatgagtagcgttaagaatccagagtcaacagtgcctattgcaccggagcttccaccttcgacatccaccgaacagcccgtgactccagaacccacatctcgggctaccaggggacgcaaaaaccgctcatcggggaaaaccccagagaccttagtgcctaccgctcctaaactggagcccagtacaagcaccgatcagcctgtgaccccggaacctacgtcacaggctaccagaggccgaaccaaccgtagcagtgtaaagacccccgagaccgtggtccctaccgccccagagttgcaaccatccaccagcaccgaccagcctgtgacgccagaacctacgagtcaagccacgcggggacggacggaccggagtagtgtcaaaacaccagaaaccgtagtgccgacagctccagaactgcaggcctctgctagcaccgaccagccagttacgtcggaacccacatcgcgtacaaccagaggacgaaaaaacaggagctccgtcaagacccccgaaaccgttgtcccagctgcccctgagctgcagccatctacttccacagatcaacctgtaactcccgagccaacaagcagggcgacccgtggccgaaccaacagatcctctgttaaaacacctgagagcattgtgccgatcgcccctgagttgcaaccatctacgagtcgtaatcaactggtcacgcctgagcccaccagccgcgctacccgctgtagaacgaataggtctagcgtcaagacccctgagccggtcgttccaaccgcaccagagccccacccaactactagtacagaccagcccgtgacccctaagttaacatcccgtgccactcggaggaagacgaacagatcgagtgtgaagaccccaaaaccggttgaacccgctgcctccgatctcgagcccttcactccgacagatcagtcggtgacccccgaggccatcgcgcaaggaggtcagagtaaaacccttcgttccagcactgtcagagctatgccagtgccaacgactccagagttccaatctcctgtgacaacagatcaacccatctcccctgagccgattacacagccctcatgcatcaagaggcagcgtgccgctggtaatccgggtagtctcgctgcacccattgaccacaaaccctgctctgccccactggagcccaaatcacaagcgtcaagaaatcagcgctggggagccgtcagggccgcagagtcactaaccgccattccggagcccgcatccccacaacttctggagactccaatccacgcgtctcagatccaaaaggtcgagcccgctggaagatcccgcttcacaccagaattacaaccaaaagcttcacagtcacggaagagaagtctcgcaacgatggatagccctcctcatcaaaaacagccacaacgcggtgaggtttcccaaaagaccgtgattatcaaggaagaggaagaggataccgccgagaagcccggaaaagaagaagatgttgtcactcccaagcctgggaaacggaagagagatcaggcggaggaagagccaaaccgtatccctagccgctctctccgacgtactaaactgaatcaagagtccactgcccctaaggtcctgtttaccggtgttgtggatgccaggggggagagggcagtcctcgctctaggaggcagcctcgctggttccgccgcagaagccagccacctggtcactgatcgcatcagaaggactgtaaagtttctgtgtgccctcgggagaggcatccctatcttgtcgttggactggttacaccagtcccgcaaagctggattctttctgccccctgatgagtatgtggtgaccgaccctgagcaagaaaagaattttggattttcactgcaggatgctctgtctcgcgctagagagagacggctgctcgaaggatacgaaatttacgtaacacccggtgtacaaccaccccctcctcagatgggcgagatcatcagctgctgcgggggaacatacctgcctagcatgcctcgatcatataaaccccagcgggtagtgatcacttgtcctcaggattttccacattgctccatccctttgagagtcggactgccactgttgtccccagaattcctgctgaccggggttctcaaacaggaggccaaacccgaagcattcgtgctgtcacccctcgagatgagttcaaccta

SEQ ID NO: 181304 - DNA, 6270 bp, Artificial Sequence
  derived and/or modified sequence
atggaggacacccaggccatcgactgggacgtggaggaggaggaggagaccgagcagagcagcgagagcctgagatgcaacgtggagcccgtgggcagactgcacatcttcagcggcgcccacggccccgagaaggacttccccctgcacctgggcaagaacgtggtgggcagaatgcccgactgcagcgtggccctgcccttccccagcatcagcaagcagcacgccgagatcgagatcctggcctgggacaaggcccccatcctgagagactgcggcagcctgaacggcacccagatcctgagaccccccaaggtgctgagccccggcgtgagccacagactgagagaccaggagctgatcctgttcgccgacctgctgtgccagtaccacagactggacgtgagcctgcccttcgtgagcagaggccccctgaccgtggaggagacccccagagtgcagggcgagacccagccccagagactgctgctggccgaggacagcgaggaggaggtggacttcctgagcgagagaagaatggtgaagaagagcagaaccaccagcagcagcgtgatcgtgcccgagagcgacgaggagggccacagccccgtgctgggcggcctgggcccccccttcgccttcaacctgaacagcgacaccgacgtggaggagggccagcagcccgccaccgaggaggccagcagcgccgccagaagaggcgccaccgtggaggccaagcagagcgaggccgaggtggtgaccgagatccagctggagaaggaccagcccctggtgaaggagagagacaacgacaccaaggtgaagagaggcgccggcaacggcgtggtgcccgccggcgtgatcctggagagaagccagccccccggcgaggacagcgacaccgacgtggacgacgacagcagaccccccggcagacccgccgaggtgcacctggagagagcccagcccttcggcttcatcgacagcgacaccgacgccgaggaggagagaatccccgccacccccgtggtgatccccatgaagaagagaaagatcttccacggcgtgggcaccagaggccccggcgcccccggcctggcccacctgcaggagagccaggccggcagcgacaccgacgtggaggagggcaaggccccccaggccgtgcccctggagaagagccaggccagcatggtgatcaacagcgacaccgacgacgaggaggaggtgagcgccgccctgaccctggcccacctgaaggagagccagcccgccatctggaacagagacgccgaggaggacatgccccagagagtggtgctgctgcagagaagccagaccaccaccgagagagacagcgacaccgacgtggaggaggaggagctgcccgtggagaacagagaggccgtgctgaaggaccacaccaagatcagagccctggtgagagcccacagcgagaaggaccagccccccttcggcgacagcgacgacagcgtggaggccgacaagagcagccccggcatccacctggagagaagccaggccagcaccaccgtggacatcaacacccaggtggagaaggaggtgccccccggcagcgccatcatccacatcaagaagcaccaggtgagcgtggagggcaccaaccagaccgacgtgaaggccgtgggcggccccgccaagctgctggtggtgagcctggaggaggcctggcccctgcacggcgactgcgagaccgacgccgaggagggcaccagcctgaccgccagcgtggtggccgacgtgagaaagagccagctgcccgccgagggcgacgccggcgccgagtgggccgccgccgtgctgaagcaggagagagcccacgaggtgggcgcccagggcggcccccccgtggcccaggtggagcaggacctgcccatcagcagagagaacctgaccgacctggtggtggacaccgacaccctgggcgagagcacccagccccagagagagggcgcccaggtgcccaccggcagagagagagagcagcacgtgggcggcaccaaggacagcgaggacaactacggcgacagcgaggacctggacctgcaggccacccagtgcttcctggagaaccagggcctggaggccgtgcagagcatggaggacgagcccacccaggccttcatgctgacccccccccaggagctgggccccagccactgcagcttccagaccaccggcaccctggacgagccctgggaggtgctggccacccagcccttctgcctgagagagagcgaggacagcgagacccagcccttcgacacccacctggaggcctacggcccctgcctgagcccccccagagccatccccggcgaccagcaccccgagagccccgtgcacaccgagcccatgggcatccagggcagaggcagacagaccgtggacaaggtgatgggcatccccaaggagaccgccgagagagtgggccccgagagaggccccctggagagagagaccgagaagctgctgcccgagagacagaccgacgtgaccggcgaggaggagctgaccaagggcaagcaggacagagagcagaagcagctgctggccagagacacccagagacaggagagcgacaagaacggcgagagcgccagccccgagagagacagagagagcctgaaggtggagatcgagaccagcgaggagatccaggagaagcaggtgcagaagcagaccctgcccagcaaggccttcgagagagaggtggagagacccgtggccaacagagagtgcgaccccgccgagctggaggagaaggtgcccaaggtgatcctggagagagacacccagagaggcgagcccgagggcggcagccaggaccagaagggccaggccagcagccccacccccgagcccggcgtgggcgccggcgacctgcccggccccaccagcgcccccgtgcccagcggcagccagagcggcggcagaggcagccccgtgagccccagaagacaccagaagggcctgctgaactgcaagatgccccccgccgagaaggccagcagaatcagagccgccgagaaggtgagcagaggcgaccaggagagccccgacgcctgcctgccccccaccgtgcccgaggcccccgcccccccccagaagcccctgaacagccagagccagaagcacctggcccccccccccctgctgagccccctgctgcccagcatcaagcccaccgtgagaaagaccagacaggacggcagccaggaggcccccgaggcccccctgagcagcgagctggagcccttccaccccaagcccaagatcagaaccagaaagagcagcagaatgacccccttccccgccaccagcgccgcccccgagccccaccccagcaccagcaccgcccagcccgtgacccccaagcccaccagccaggccaccagaagcagaaccaacagaagcagcgtgaagacccccgagcccgtggtgcccaccgcccccgagctgcagcccagcaccagcaccgaccagcccgtgaccagcgagcccaccagccaggtgaccagaggcagaaagagcagaagcagcgtgaagacccccgagaccgtggtgcccaccgccctggagctgcagcccagcaccagcaccgacagacccgtgaccagcgagcccaccagccaggccaccagaggcagaaagaacagaagcagcgtgaagacccccgagcccgtggtgcccaccgcccccgagctgcagcccagcaccagcaccgaccagcccgtgaccagcgagcccacctaccaggccaccagaggcagaaagaacagaagcagcgtgaagacccccgagcccgtggtgcccaccgcccccgagctgagacccagcaccagcaccgacagacccgtgacccccaagcccaccagcagaaccaccagaagcagaaccaacatgagcagcgtgaagacccccgagaccgtggtgcccaccgcccccgagctgcagatcagcaccagcaccgaccagcccgtgacccccaagcccaccagcagaaccaccagaagcagaaccaacatgagcagcgtgaagaaccccgagagcaccgtgcccatcgcccccgagctgccccccagcaccagcaccgagcagcccgtgacccccgagcccaccagcagagccaccagaggcagaaagaacagaagcagcggcaagacccccgagaccctggtgcccaccgcccccaagctggagcccagcaccagcaccgaccagcccgtgacccccgagcccaccagccaggccaccagaggcagaaccaacagaagcagcgtgaagacccccgagaccgtggtgcccaccgcccccgagctgcagcccagcaccagcaccgaccagcccgtgacccccgagcccaccagccaggccaccagaggcagaaccgacagaagcagcgtgaagacccccgagaccgtggtgcccaccgcccccgagctgcaggccagcgccagcaccgaccagcccgtgaccagcgagcccaccagcagaaccaccagaggcagaaagaacagaagcagcgtgaagacccccgagaccgtggtgcccgccgcccccgagctgcagcccagcaccagcaccgaccagcccgtgacccccgagcccaccagcagagccaccagaggcagaaccaacagaagcagcgtgaagacccccgagagcatcgtgcccatcgcccccgagctgcagcccagcaccagcagaaaccagctggtgacccccgagcccaccagcagagccaccagatgcagaaccaacagaagcagcgtgaagacccccgagcccgtggtgcccaccgcccccgagccccaccccaccaccagcaccgaccagcccgtgacccccaagctgaccagcagagccaccagaagaaagaccaacagaagcagcgtgaagacccccaagcccgtggagcccgccgccagcgacctggagcccttcacccccaccgaccagagcgtgacccccgaggccatcgcccagggcggccagagcaagaccctgagaagcagcaccgtgagagccatgcccgtgcccaccacccccgagttccagagccccgtgaccaccgaccagcccatcagccccgagcccatcacccagcccagctgcatcaagagacagagagccgccggcaaccccggcagcctggccgcccccatcgaccacaagccctgcagcgcccccctggagcccaagagccaggccagcagaaaccagagatggggcgccgtgagagccgccgagagcctgaccgccatccccgagcccgccagcccccagctgctggagacccccatccacgccagccagatccagaaggtggagcccgccggcagaagcagattcacccccgagctgcagcccaaggccagccagagcagaaagagaagcctggccaccatggacagccccccccaccagaagcagccccagagaggcgaggtgagccagaagaccgtgatcatcaaggaggaggaggaggacaccgccgagaagcccggcaaggaggaggacgtggtgacccccaagcccggcaagagaaagagagaccaggccgaggaggagcccaacagaatccccagcagaagcctgagaagaaccaagctgaaccaggagagcaccgcccccaaggtgctgttcaccggcgtggtggacgccagaggcgagagagccgtgctggccctgggcggcagcctggccggcagcgccgccgaggccagccacctggtgaccgacagaatcagaagaaccgtgaagttcctgtgcgccctgggcagaggcatccccatcctgagcctggactggctgcaccagagcagaaaggccggcttcttcctgccccccgacgagtacgtggtgaccgaccccgagcaggagaagaacttcggcttcagcctgcaggacgccctgagcagagccagagagagaagactgctggagggctacgagatctacgtgacccccggcgtgcagcccccccccccccagatgggcgagatcatcagctgctgcggcggcacctacctgcccagcatgcccagaagctacaagccccagagagtggtgatcacctgcccccaggacttcccccactgcagcatccccctgagagtgggcctgcccctgctgagccccgagttcctgctgaccggcgtgctgaagcaggaggccaagcccgaggccttcgtgctgagccccctggagatgagcagcacctag

SEQ ID NO: 181305 - protein, 1163 aa, Artificial Sequence
  derived and/or modified sequence
MDRNREAEMELRRGPSPTRAGRGHEVDGDKATCHTCCICGKSFPFQSSLSQHMRKHTGEKPYKCPYCDHRASQKGNLKIHIRSHRTGTLIQGHEPEAGEAPLGEMRASEGLDACASPTKSASACNRLLNGASQADGARVLNGASQADSGRVLLRSSKKGAEGSACAPGEAKAAVQCSFCKSQFERKKDLELHVHQAHKPFKCRLCSYATLREESLLSHIERDHITAQGPGSGEACVENGKPELSPGEFPCEVCGQAFSQTWFLKAHMKKHRGSFDHGCHICGRRFKEPWFLKNHMKAHGPKTGSKNRPKSELDPIATINNVVQEEVIVAGLSLYEVCAKCGNLFTNLDSLNAHNAIHRRVEASRTRAPAEEGAEGPSDTKQFFLQCLNLRPSAAGDSCPGTQAGRRVAELDPVNSYQAWQLATRGKVAEPAEYLKYGAWDEALAGDVAFDKDRREYVLVSQEKRKREQDAPAAQGPPRKRASGPGDPAPAGHLDPRSAARPNRRAAATTGQGKSSECFECGKIFRTYHQMVLHSRVHRRARRERDSDGDRAARARCGSLSEGDSASQPSSPGSACAAADSPGSGLADEAAEDSGEEGAPEPAPGGQPRRCCFSEEVTSTELSSGDQSHKMGDNASERDTGESKAGIAASVSILENSSRETSRRQEQHRFSMDLKMPAFHPKQEVPVPGDGVEFPSSTGAEGQTGHPAEKLSDLHNKEHSGGGKRALAPDLMPLDLSARSTRDDPSNKETASSLQAALVVHPCPYCSHKTYYPEVLWMHKRIWHRVSCNSVAPPWIQPNGYKSIRSNLVFLSRSGRTGPPPALGGKECQPLLLARFTRTQVPGGMPGSKSGSSPLGVVTKAASMPKNKESHSGGPCALWAPGPDGYRQTKPCHGQEPHGAATQGPLAKPRQEASSKPVPAPGGGGFSRSATPTPTVIARAGAQPSANSKPVEKFGVPPAGAGFAPTNKHSAPDSLKAKFSAQPQGPPPAKGEGGAPPLPPREPPSKAAQELRTLATCAAGSRGDAALQAQPGVAGAPPVLHSIKQEPVAEGHEKRLDILNIFKTYIPKDFATLYQGWGVSGPGLEHRGTLRTQARPGEFVCIECGKSFHQPGHLRAHMRAHSVVFESDGPRGSEVHTTSADAPKQGRDHSNTGTVQTVPLRKGT

SEQ ID NO: 181306 - DNA, 3492 bp, Artificial Sequence
  derived and/or modified sequence
atggacagaaacagagaggccgagatggagctgagaagaggccccagccccaccagagccggcagaggccacgaggtggacggcgacaaggccacctgccacacctgctgcatctgcggcaagagcttccccttccagagcagcctgagccagcacatgagaaagcacaccggcgagaagccctacaagtgcccctactgcgaccacagagccagccagaagggcaacctgaagatccacatcagaagccacagaaccggcaccctgatccagggccacgagcccgaggccggcgaggcccccctgggcgagatgagagccagcgagggcctggacgcctgcgccagccccaccaagagcgccagcgcctgcaacagactgctgaacggcgccagccaggccgacggcgccagagtgctgaacggcgccagccaggccgacagcggcagagtgctgctgagaagcagcaagaagggcgccgagggcagcgcctgcgcccccggcgaggccaaggccgccgtgcagtgcagcttctgcaagagccagttcgagagaaagaaggacctggagctgcacgtgcaccaggcccacaagcccttcaagtgcagactgtgcagctacgccaccctgagagaggagagcctgctgagccacatcgagagagaccacatcaccgcccagggccccggcagcggcgaggcctgcgtggagaacggcaagcccgagctgagccccggcgagttcccctgcgaggtgtgcggccaggccttcagccagacctggttcctgaaggcccacatgaagaagcacagaggcagcttcgaccacggctgccacatctgcggcagaagattcaaggagccctggttcctgaagaaccacatgaaggcccacggccccaagaccggcagcaagaacagacccaagagcgagctggaccccatcgccaccatcaacaacgtggtgcaggaggaggtgatcgtggccggcctgagcctgtacgaggtgtgcgccaagtgcggcaacctgttcaccaacctggacagcctgaacgcccacaacgccatccacagaagagtggaggccagcagaaccagagcccccgccgaggagggcgccgagggccccagcgacaccaagcagttcttcctgcagtgcctgaacctgagacccagcgccgccggcgacagctgccccggcacccaggccggcagaagagtggccgagctggaccccgtgaacagctaccaggcctggcagctggccaccagaggcaaggtggccgagcccgccgagtacctgaagtacggcgcctgggacgaggccctggccggcgacgtggccttcgacaaggacagaagagagtacgtgctggtgagccaggagaagagaaagagagagcaggacgcccccgccgcccagggcccccccagaaagagagccagcggccccggcgaccccgcccccgccggccacctggaccccagaagcgccgccagacccaacagaagagccgccgccaccaccggccagggcaagagcagcgagtgcttcgagtgcggcaagatcttcagaacctaccaccagatggtgctgcacagcagagtgcacagaagagccagaagagagagagacagcgacggcgacagagccgccagagccagatgcggcagcctgagcgagggcgacagcgccagccagcccagcagccccggcagcgcctgcgccgccgccgacagccccggcagcggcctggccgacgaggccgccgaggacagcggcgaggagggcgcccccgagcccgcccccggcggccagcccagaagatgctgcttcagcgaggaggtgaccagcaccgagctgagcagcggcgaccagagccacaagatgggcgacaacgccagcgagagagacaccggcgagagcaaggccggcatcgccgccagcgtgagcatcctggagaacagcagcagagagaccagcagaagacaggagcagcacagattcagcatggacctgaagatgcccgccttccaccccaagcaggaggtgcccgtgcccggcgacggcgtggagttccccagcagcaccggcgccgagggccagaccggccaccccgccgagaagctgagcgacctgcacaacaaggagcacagcggcggcggcaagagagccctggcccccgacctgatgcccctggacctgagcgccagaagcaccagagacgaccccagcaacaaggagaccgccagcagcctgcaggccgccctggtggtgcacccctgcccctactgcagccacaagacctactaccccgaggtgctgtggatgcacaagagaatctggcacagagtgagctgcaacagcgtggcccccccctggatccagcccaacggctacaagagcatcagaagcaacctggtgttcctgagcagaagcggcagaaccggccccccccccgccctgggcggcaaggagtgccagcccctgctgctggccagattcaccagaacccaggtgcccggcggcatgcccggcagcaagagcggcagcagccccctgggcgtggtgaccaaggccgccagcatgcccaagaacaaggagagccacagcggcggcccctgcgccctgtgggcccccggccccgacggctacagacagaccaagccctgccacggccaggagccccacggcgccgccacccagggccccctggccaagcccagacaggaggccagcagcaagcccgtgcccgcccccggcggcggcggcttcagcagaagcgccacccccacccccaccgtgatcgccagagccggcgcccagcccagcgccaacagcaagcccgtggagaagttcggcgtgccccccgccggcgccggcttcgcccccaccaacaagcacagcgcccccgacagcctgaaggccaagttcagcgcccagccccagggccccccccccgccaagggcgagggcggcgccccccccctgccccccagagagccccccagcaaggccgcccaggagctgagaaccctggccacctgcgccgccggcagcagaggcgacgccgccctgcaggcccagcccggcgtggccggcgccccccccgtgctgcacagcatcaagcaggagcccgtggccgagggccacgagaagagactggacatcctgaacatcttcaagacctacatccccaaggacttcgccaccctgtaccagggctggggcgtgagcggccccggcctggagcacagaggcaccctgagaacccaggccagacccggcgagttcgtgtgcatcgagtgcggcaagagcttccaccagcccggccacctgagagcccacatgagagcccacagcgtggtgttcgagagcgacggccccagaggcagcgaggtgcacaccaccagcgccgacgcccccaagcagggcagagaccacagcaacaccggcaccgtgcagaccgtgcccctgagaaagggcacctag

SEQ ID NO: 181307 - DNA, 228 bp, Artificial Sequence
  derived and/or modified sequence
atggacagaaacagagaggccgagatggagctgagaagaggccccagccccaccagagccggcagaggccacgaggtggacggcgacaaggccacctgccacacctgctgcatctgcggcaagagcttccccttccagagcagcctgagccagcacatgagaaagcacaccggcgagaagccctacaagtgcccctactgcgaccacagagccagccagaagggctag

SEQ ID NO: 181308 - DNA, 3492 bp, Artificial Sequence
  derived and/or modified sequence
atggacaggaacagggaagctgagatggagctgcgccgtgggccttccccaacccgcgccggacgtgggcacgaagtggatggcgataaggctacttgtcatacatgctgcatttgtggcaaatccttccctttccagagctctctgtctcagcacatgcgcaagcacaccggagagaaaccctataaatgtccctactgcgaccatagagctagtcagaaagggaacctaaagatccatattcggtcccatcggaccggaacccttatccagggccacgaaccagaagccggcgaagccccattaggggaaatgagagctagcgagggcctggatgcctgtgcatctccaactaagagtgctagcgcttgcaatcggctcctcaatggggccagtcaagccgatggagccagagtgctgaatggagccagccaagcagattccggcagagtcttactgcgctcatcaaaaaagggggccgagggatccgcttgcgctccaggcgaggccaaggccgccgtgcaatgttccttctgcaaatcacagtttgaaaggaagaaggacctggaacttcatgtccaccaggcacacaaaccgttcaaatgtcgactctgtagctatgccaccctcagagaagagtccttgctgtctcatatcgagcgcgatcatatcacggcccaggggcccggcagtggagaagcctgtgtggagaacggaaaacccgagctgagtcctggagagtttccttgtgaggtgtgcggccaggcattttcacagacctggttcttgaaggcccatatgaaaaagcatcgcggctcctttgatcatggctgtcacatctgtgggagacgatttaaggagccctggttcctgaaaaatcatatgaaggctcacgggcccaagacaggctccaaaaatcgccccaaatcagagcttgacccaatcgctacaattaacaacgtggtgcaagaggaagtcatcgtggccgggctgtcgctctatgaagtgtgcgccaaatgcggtaacctcttcacgaatctggatagcctcaacgcccacaacgctattcaccggagagtggaagcatccaggacccgagcccccgctgaggagggtgcagagggcccatctgataccaaacagttcttcctgcaatgtctgaatcttcgtccctcagccgccggagattcttgtcccggaacccaggcgggccggagggtggccgagctcgatcccgtgaatagctatcaagcatggcagctcgctacacggggaaaggttgcggagcccgccgaatatcttaaatatggagcatgggatgaggctctggcaggcgacgtggcctttgacaaagacagaagagagtacgtcttggtgagccaggagaaacgaaagagggaacaagacgcgcctgctgctcagggacctccccggaaacgtgcgtcaggcccaggggaccccgctcccgccgggcaccttgatccgaggtcagcggcccgaccaaacagaagagcagcagctaccacagggcaaggtaagagttctgagtgcttcgaatgcggcaagatcttcaggacttaccatcagatggtgctacacagtagagtgcatagaagagccagaagagagcgcgattccgatggggatcgcgccgcgagggctaggtgcggttcactgtccgaaggggactctgcttctcagccctccagtccgggctcagcttgtgcagcagcggattccccaggatcgggactggctgatgaagccgctgaggattcgggcgaagagggagcccccgaacccgctcccggcgggcagccacgacggtgttgcttttccgaagaagtgacatcaaccgaactgagctctggggatcagtcacataagatgggagataacgcctctgagagggacaccggcgaatctaaagccgggatcgcagcttctgtttctattcttgaaaactctagtagagaaaccagcaggagacaggagcagcataggttcagtatggacctgaagatgccagcgtttcacccgaagcaggaggtaccggtgcccggtgacggcgtcgagttccccagtagcaccggcgcggaagggcagaccggtcaccctgccgagaagctgagtgatctccataataaggagcactctggaggtgggaaaagggctctggcacctgatttgatgcccttagacttgtcagcccgtagtacccgcgacgatccttccaataaggagacagccagcagtctgcaggccgccctggtagtgcatccatgtccttactgctctcacaagacttactatccagaggttctctggatgcacaaaagaatatggcatagagtgagttgtaactccgtggctccaccatggatccagccaaatggatataaaagtattcgatcgaacctggtcttcctgagtagatctggaagaacagggccgccaccggcattgggggggaaagaatgccaacccctcctgctggcacgcttcacgaggacgcaggtgccaggcggtatgcccggttctaaatccggaagtagtcctctgggggttgttacaaaggcagcctcgatgcctaagaacaaggagagccattcgggtggaccctgcgctctgtgggcaccaggaccagacgggtatcgtcagactaagccatgccatgggcaggaaccccacggtgcagcgacacagggccccctggccaaaccccgacaggaggcctctagcaagccagtcccagcgcccgggggaggcggcttctctcggagcgctactcccacaccaactgtcatcgcccgggccggcgctcaaccatccgcgaactctaaaccagtggagaagttcggggtgcccccagccggtgcaggttttgcaccaaccaacaaacattcagctccggacagcctaaaagcgaaattctcggcccagccccaggggccccctccagctaagggtgaggggggcgcccccccattaccaccaagggaacctcccagtaaggccgcacaggaattaagaaccctcgctacttgtgccgcaggttctcgaggagatgccgccctccaggctcagcctggcgtggctggcgctccccccgtgctgcattctattaagcaggagccagtggccgagggccacgagaagagactcgacattctgaacatatttaaaacttatataccaaaggactttgccactctgtaccaagggtggggtgtctcggggccaggtttggagcatcgaggcaccttgagaacccaggcccgtcctggggaatttgtttgcatcgaatgtggcaaatcttttcaccaacctggtcacctgagagctcacatgagagctcattctgtggtgttcgaatcagacgggcctaggggcagcgaggtccacactacatccgccgatgccccgaaacagggacgggaccactccaacaccggcacagttcagaccgtgcccctgcggaaaggtacttag

SEQ ID NO: 181309 - DNA, 228 bp, Artificial Sequence
  derived and/or modified sequence
atggacaggaacagagaagcagaaatggaattaaggcggggtcctagtcctacaagagcaggccgcgggcatgaagtggatggcgacaaagccacttgccacacgtgctgcatctgcggcaaatcattccccttccagagttcgctctcgcagcatatgcggaaacatacgggagagaaaccatacaaatgcccctattgcgatcatcgtgcctcccagaagggttag

SEQ ID NO: 181310 - DNA, 3492 bp, Artificial Sequence
  derived and/or modified sequence
atggacaggaaccgggaggccgagatggagctgcggcggggccccagccccacccgggccggccggggccacgaggtggatggagacaaggccacctgccacacctgctgcatctgtgggaagagcttccccttccagagcagcctgagccagcacatgaggaagcacactggagagaagccctacaagtgcccctactgtgaccaccgggccagccagaagggcaacctgaagatccacatccgcagccacaggacaggcaccctcatccagggccacgagcctgaggccggggaggcccccctgggggagatgagggccagcgagggcctggatgcctgtgccagccccaccaagagcgccagcgcctgcaaccggctgctgaatggagccagccaggctgatggagcccgggtgctgaatggagccagccaggccgacagcggccgggtgctgctgcggagcagcaagaagggagctgagggcagcgcctgtgcccctggagaggccaaggctgctgtgcagtgcagcttctgcaagagccagtttgagaggaagaaggacctggagctgcacgtgcaccaggcccacaagcccttcaagtgccgcctgtgcagctatgccaccctgcgggaggagagcctgctgagccacatcgagcgggaccacatcacagcccagggccctggcagcggggaggcctgtgtggagaatggcaagccagagctgagccctggagagttcccctgtgaggtgtgtggccaggccttcagccagacctggttcctgaaggcccacatgaagaagcaccggggcagctttgaccacggctgccacatctgtggccgccgcttcaaggagccctggttcctgaagaaccacatgaaggcccacggccccaagacaggcagcaagaaccggcccaagtctgagctggaccccatcgccaccatcaacaacgtggtgcaggaggaggtgattgtggccggcctgagcctgtatgaggtgtgtgccaagtgtggcaacctcttcaccaacctggacagcctgaatgcccacaatgccatccaccggcgggtggaggccagcaggacccgggccccagctgaggagggcgctgagggccccagcgacaccaagcagttcttcctgcagtgcctgaacctgcggcccagcgctgctggggacagctgccccggcacccaggccggcagaagagtggccgagctggaccctgtgaacagctaccaggcctggcagctggccacccggggcaaggtggccgagcctgctgagtacctgaagtacggggcctgggatgaggccctggccggagatgtggcctttgacaaggacagaagagaatatgtgctggtgtcccaggagaagaggaagcgggagcaggatgccccagctgcccagggcccccccaggaagagggccagcggccctggggaccctgccccagctggccacctggaccccaggtctgctgcccggcccaacagaagagctgctgccaccaccggccagggcaagagcagcgagtgctttgaatgtgggaagatcttccgcacctaccaccagatggtgctgcacagccgggtgcaccggcgggcccggcgggagcgggacagtgatggagacagagctgcccgggcccgctgtggcagcctgtctgagggggacagcgccagccagcccagcagccctggcagcgcctgtgccgctgctgacagccctggcagcggcctggctgatgaagctgctgaagattctggagaggagggcgcccctgagcccgcccctgggggccagccccggcgctgctgcttcagcgaggaggtgaccagcacagagctgagcagcggggaccagagccacaagatgggagacaatgccagcgagcgggacacaggagagagcaaggccggcattgctgcctctgtgtccatcctggagaacagcagccgggagaccagccggcggcaggagcagcaccgcttctccatggacctgaagatgcctgccttccaccccaagcaggaggtgcctgtgcctggagatggagtggagttccccagcagcactggagctgagggccagacaggccaccctgctgagaagctgagtgacctgcacaacaaggagcacagcggcggcggcaagagggccctggccccagacctgatgcccctggacctgagcgcccggagcaccagagatgaccccagcaacaaggagacagccagcagcctgcaggccgccctggtggtgcacccctgcccctactgcagccacaagacctactacccagaggtgctgtggatgcacaagaggatctggcaccgggtgtcctgcaacagcgtggccccaccctggatccagcccaacggctacaagagcatccgcagcaacctggtgttcctgagccgcagcggccgcacaggccccccaccagccctgggcggcaaggagtgccagcccctgctgctggcccgcttcaccaggacccaggtgcctgggggcatgcctggcagcaagagcggcagcagccccctgggcgtggtgaccaaggccgcctccatgcccaagaacaaggagagccacagcggcggcccctgtgccctgtgggcccctggcccagatggctaccggcagaccaagccctgccacggccaggagccccatggagctgccacccagggccccctggccaagccccggcaggaggccagcagcaagcctgtgcctgcccctgggggcggcggcttcagccgcagcgccacccccacccccaccgtcatcgcccgggccggggcccagcccagcgccaacagcaagcctgtggagaagtttggagtgcccccagctggggccggctttgcccccaccaacaagcacagcgccccagacagcctgaaggccaagttcagcgcccagccccagggccccccaccagccaagggggagggcggggccccacccctgcccccccgggagccccccagcaaggccgcccaggagctgcggaccctggccacctgtgccgccggcagcagaggagatgctgccctgcaggcccagcccggggtggccggggcccctcctgtgctgcacagcatcaagcaggagcctgtggccgagggccacgagaagaggctggacatcctgaacatcttcaagacctacatccccaaggactttgccaccctgtaccagggctggggcgtgtctggccctggcctggagcaccggggcaccctgcggacccaggcccggcctggagaatttgtgtgcattgaatgtgggaagagcttccaccagcccggccacctgcgggcccacatgagggcccacagcgtggtgtttgaaagtgatggcccccggggcagcgaggtgcacaccaccagcgcagatgcccccaagcagggccgggaccacagcaacacaggaacagtgcagacagtgcccctgaggaagggcacctag

SEQ ID NO: 181311 - DNA, 228 bp, Artificial Sequence
  derived and/or modified sequence
atggacaggaaccgggaggccgagatggagctgcggcggggccccagccccacccgggccggccggggccacgaggtggatggagacaaggccacctgccacacctgctgcatctgtgggaagagcttccccttccagagcagcctgagccagcacatgaggaagcacactggagagaagccctacaagtgcccctactgtgaccaccgggccagccagaagggctag

SEQ ID NO: 181312 - DNA, 3492 bp, Artificial Sequence
  derived and/or modified sequence
atggaccggaaccgggaggccgagatggagctgcggcggggccccagtcccactagagctggaagggggcacgaagtggacggagataaggcaacatgtcatacatgttgcatatgtgggaaatctttcccattccagagtagcctatctcagcacatgcgaaaacatactggcgagaaaccgtataaatgtccctattgtgaccatagagcgagccagaagggaaacctgaagattcatataaggagtcacaggacaggtaccctcattcaggggcacgagcctgaggcaggagaagctccccttggagagatgcgcgcatctgaggggctcgacgcgtgcgccagccctaccaaatctgcctcagcttgtaacagacttctgaatggcgctagtcaagcggatggagcacgggtgctgaatggagcctcccaggccgacagcgggagggttctgctgagatcctccaaaaaaggcgcagaaggatctgcttgcgcacctggggaggccaaggcagccgtgcagtgtagtttctgcaagtcgcagttcgaacgaaagaaagacttggaactacacgttcaccaggctcacaagcccttcaaatgtcggctgtgtagctatgccacacttagagaggagagcttgctgtctcatatagagcgggaccacatcaccgctcaaggtccagggtcaggagaagcctgtgtagagaatggcaaaccggaactgagccccggcgaatttccttgcgaggtttgtggccaggcattctctcagacctggtttctaaaggctcacatgaagaagcatagaggttcattcgaccacgggtgtcatatttgcggccgtaggtttaaggaaccatggttcctcaagaaccacatgaaggcccacggacccaaaaccgggagcaagaatagacccaagtcggaacttgacccaattgctactataaataatgtcgtacaggaggaggtcatcgtggcaggcctctctttgtacgaggtgtgtgcgaaatgtgggaacctgttcaccaatcttgattccctgaacgcccataatgctatacacagaagggtggaggcttcaagaacccgcgcccccgctgaggagggggctgagggaccgtctgacactaaacagttcttcttgcagtgcctgaacctcagacccagcgctgccggggactcctgccccggaactcaggccggccggagggtggctgagttggacccggtaaacagctaccaggcctggcaacttgccacacggggaaaagtggccgagccagccgagtatttgaaatacggcgcttgggatgaggccctagctggggacgtggcctttgacaaggaccggagagagtatgtgctggtgagccaggaaaaacggaagagggagcaagacgctcccgccgcccagggtcccccccgcaagcgcgcaagtgggcctggtgaccccgcccccgcaggccacttggatccaaggtccgccgcccgcccgaatcgacgcgccgctgccacaacagggcaagggaaaagttctgagtgctttgaatgtggaaagatctttcgcacctatcaccagatggtcttacactcgcgggttcatcgaagagcccggcgggagcgggattctgatggagatcgcgccgcacgtgcaaggtgtggttcactgtccgaaggcgatagcgccagtcagcctagtagtcccggtagcgcatgcgcggccgcagacagccctgggtcgggtctggctgacgaggctgctgaagactctggagaggagggcgctccggaaccagctccaggtggccagcctagaagatgctgtttttccgaagaggtgacttcaacagagctttccagcggtgaccaatcccacaagatgggtgacaacgcctccgagcgcgataccggcgaatccaaagctggcattgcggcgtccgtcagtattctggagaattcctcaagggaaacctcacggagacaagagcagcataggttctcaatggatttgaagatgcctgcttttcaccccaaacaggaggtgcccgtgcccggcgatggagtggaattcccctccagcacaggagcggaggggcagaccggacaccctgcggaaaagctgagtgatctgcacaacaaagagcacagtggcggcggaaagcgagccctggcacccgacctgatgcctctcgacctctctgctaggagtactagagatgacccctcaaataaagaaaccgcctcctcactgcaggcagccctggtcgtgcatccgtgcccttattgctcccacaaaacttattaccctgaggtactgtggatgcataaaagaatttggcacagggtaagctgtaattccgtcgcaccgccctggatccagccaaacgggtacaagtcaattaggtctaacctagtgttcctctcaaggtccggcagaaccggaccccctcccgccctcggcggcaaagagtgtcagcctttgctcctggccagatttacgcgcactcaggtcccaggaggaatgccagggtctaaatctggcagcagcccattgggcgtggtgacaaaggcggcatccatgcctaagaataaagaatcccatagcggcggcccctgcgcactctgggcccctggccccgacggttacaggcaaaccaagccatgtcatggccaggaacctcatggggctgctacccagggccctcttgctaaacctcggcaggaggctagctccaagcctgtgcctgcccctgggggcggcggtttctcacgctctgcaactcccacacccactgtgatcgcccgggcgggtgcccaaccttctgctaacagtaaacccgtggagaagttcggggtccccccagctggagcagggtttgcaccaaccaataagcattctgctcccgacagtctgaaggccaagtttagtgctcagccacaaggacctcctcctgcaaagggtgagggcggcgcgccaccgctccccccgagggagcctccctcaaaggcggcccaagaactgcgcactttggcaacatgcgccgctgggtcacggggagacgcggccctacaggcccagcctggtgtagctggtgctccacccgttttgcactcaattaagcaggaaccagtggccgagggtcacgagaagagactcgacatccttaatatcttcaagacctatattccgaaggacttcgccacattataccagggctggggggtgtcgggtcccgggctggagcacagaggcacactacgtacacaggctaggccgggcgaattcgtgtgcatagaatgcggaaaatcctttcatcagcctgggcatctccgggcccacatgcgggcacacagcgtcgttttcgagagtgatggcccccgtggaagcgaagtgcataccacgtctgctgatgcaccgaagcaaggcagggaccactccaatacaggtaccgtccagaccgtgcccttgcgcaagggcacatag

SEQ ID NO: 181313 - DNA, 228 bp, Artificial Sequence
  derived and/or modified sequence
atggaccggaaccgggaggccgagatggagctgcggcggggcccctcgcctactagagccggccggggccacgaagtggatggcgataaggcgacctgccatacctgttgcatctgcggtaagagttttccatttcagagctccctctcccagcatatgcgcaaacacaccggtgaaaagccttacaagtgtccatattgtgaccacagagccagccagaaaggatag

SEQ ID NO: 181314 - DNA, 3492 bp, Artificial Sequence
  derived and/or modified sequence
atggaccgcaatagggaggccgagatggagctaagacgtggtccttcccccactagagccggaaggggccatgaggtggacggagataaggccacatgtcacacgtgttgtatttgcggtaaatctttcccattccaatccagcctgtctcagcatatgcgtaaacacaccggcgagaagccatacaagtgcccctactgcgaccacagggcttcgcaaaagggtaatctgaagattcacattcgctctcaccgcaccgggactctcattcaaggccacgagcccgaggctggggaggcgcctttaggcgagatgcgggcaagcgaggggctggacgcctgcgcatccccaaccaagtctgcctctgcctgcaatcggctcctgaacggagcatcccaggccgacggggctcgtgtcctgaacggggcaagccaggcggactctggacgcgtgctactgagatctagtaagaagggcgctgaaggctccgcctgcgcccctggagaggccaaggccgcagtgcaatgtagcttctgtaagtctcaattcgagcgtaaaaaggatctggagctgcacgtgcaccaggcacataagccttttaagtgccgcctgtgtagttatgctaccctcagggaggaatccctgctgtcgcacatcgaaagagatcacatcaccgctcaaggaccgggatctggcgaagcttgtgtggagaacggaaagcctgaattgtcacctggagagtttccctgtgaggtgtgcggccaggccttcagccagacctggtttctgaaggctcatatgaaaaagcatcgaggttcctttgaccacggctgccatatctgcggacggcgattcaaagagccgtggtttttaaagaaccatatgaaggcacacggacctaaaacaggatccaagaaccgacctaaatctgaactggatccaattgcaactattaacaacgtggtccaggaagaggtaattgtagccggactgtccctgtacgaagtgtgcgcgaagtgtggtaatctgtttacaaaccttgattctctgaacgcacacaacgccattcatcgcagagttgaggcctctagaaccagggctccagccgaggagggagctgaggggccatccgacactaagcagttcttccttcagtgtcttaacctgcgaccgtccgctgcgggagactcatgtcctggaacacaagctgggcgaagagtggcggagctggatcccgtcaattcttatcaggcctggcagctggctacccgcggaaaagttgccgaacccgcagaatacttaaagtatggggcatgggatgaagcgctggccggagacgtggccttcgataaggatcgccgtgaatatgtgctggtttcccaggaaaaacggaaacgcgagcaggatgcccctgccgctcagggccctccaaggaaacgagccagcgggccaggcgatccagcaccggctggacatctggacccccgatctgcagccaggcctaatcgacgtgcagccgctaccacaggccagggcaaaagcagcgagtgcttcgagtgtggcaagatctttagaacttatcaccaaatggtcctgcactctagggtgcaccgtagggccagacgagaacgggactctgacggagaccgggctgcacgagcacggtgcggctccctgtcggagggggactctgcaagtcagcctagtagcccgggttctgcctgcgcagcagcagactcgcccggttcagggttagccgatgaagccgctgaggacagcggagaagagggtgcccctgagcccgctcccggtggacagcccaggagatgctgctttagcgaagaagtcacctccaccgaactgtcctctggggaccagtcccataagatgggtgacaacgcctctgagagagatacgggcgagagcaaggccggaatcgcggcaagcgttagtatcttggaaaattcaagccgagagacctcacgcagacaggagcaacatagattctctatggatctgaagatgcctgcttttcatccaaagcaggaggtccccgtccctggcgatggcgttgagtttccctcgtcgaccggcgctgagggccagactggacatcctgcagaaaaactgtccgacctccacaacaaagagcactctggaggtgggaaaagggcccttgccccagatctcatgccgctggatctctccgctcggagcacacgcgacgacccatccaacaaggagaccgcctctagcttacaggctgcactcgtcgttcatccctgtccctattgctctcacaagacctactatcccgaagtgctgtggatgcataaacggatttggcatagggtgagttgcaatagcgtggcacctccatggattcaaccaaacggatacaagtcaattcgctctaatctggtgttcctgagtagatcaggccgtaccgggccaccaccagccctcggtgggaaagagtgtcagccactcttgctggccaggtttaccagaacacaggtgcccggtgggatgcccggaagcaaatctggatcctctccgcttggggtggtgactaaagcagccagtatgcctaaaaataaagagtctcactcaggaggaccgtgtgccctgtgggccccaggaccggacgggtatcgccagacgaagccctgtcacggccaggaaccgcatggagcggcaactcagggaccactggccaagcctcgtcaggaggcaagcagcaaacccgtcccagctccgggaggcggaggattctcaagatcagccactcctacccccaccgtgatcgccagggccggtgcccagccttccgccaatagtaagccggtggagaagttcggggtgccccctgcgggagctggttttgcgccaaccaacaaacacagcgccccagattcccttaaagcaaagttttctgcacagccccaaggacccccacctgcaaaaggggagggaggtgctcctcccttgcctccccgagaaccccctagcaaggctgcccaggagctcaggactctggcaacgtgtgccgctggttcccggggagatgcagcgctgcaagcccaacctggggtcgctggagcccctcccgtcctccacagcatcaaacaggaacccgtcgcggagggccatgagaaacgcctggacatcctgaatatcttcaagacctatatcccaaaggattttgcaacgctgtatcaggggtggggcgtgtccggcccaggcctcgagcaccggggaactctgcgcacccaagccagacccggagaattcgtgtgcatcgaatgtggtaagtcatttcatcagcccggtcacctcagagcccacatgcgagctcattctgtcgtgttcgaaagtgacggacctagaggaagcgaggtgcatactacgtccgcagatgccccaaagcagggcagggaccattcaaatactggtaccgtccagacagtgccacttcgcaaggggacatag

SEQ ID NO: 181315 - DNA, 228 bp, Artificial Sequence
  derived and/or modified sequence
atggatagaaaccgcgaggctgagatggagctaagacgtgggccatctcctaccagagctggtcgtggtcacgaggtggacggcgacaaggctacctgccacacatgctgtatttgcggcaagtcctttccattccagtcttctctgtcgcagcacatgcgaaaacacaccggcgagaaaccctataagtgtccttactgcgatcatagggcaagtcaaaaaggctag

SEQ ID NO: 181316 - DNA, 8619 bp, Artificial Sequence
  derived and/or modified sequence
cggggcgtgcgcgtcctcctccccaggcccgccgcctccctgccaagaatctgagagaggccgagtggagttcggtccttctctgaacacttttagctgagagtaccagcatccaactgggagcgttgtcattgcatttccacattcccaggaaagcccaggtgctggctgccagctgctgcgccccccatgtagaaggtgcacctcctgggagcaggcacgtcttttggctcttctgaccatggagagataggacggtccctgcagcccgcgcgacagaaagctgtgccgccaccaccggccgcgcccgtccttcggatggatcgcaacagagaggccgagatggagctgaggcgaggccccagccccaccagggccggccggggccacgaggtggatggggacaaggctacctgccacacctgctgcatctgcggcaagagcttccccttccagagctcgctttcgcagcacatgcgcaagcacacgggcgagaagccctacaagtgtccctactgcgaccaccgggcttcccagaagggcaacctgaagattcacatccggagccaccgcacggggactctgattcagggacacgagccggaggcgggcgaggcgccgctgggtgagatgcgcgcctccgagggcctggacgcctgcgccagccccaccaagagcgcctcggcctgcaaccggctgctgaacggggcctcgcaggccgacggcgccagggtcctgaacggggcctcgcaggccgacagcggcagagtcctgctgcggagcagcaagaagggggcagaggggtccgcatgcgccccgggggaggccaaggcagcggtccagtgctccttctgcaagagccagttcgagcgtaagaaggacctggagctgcacgtgcaccaggcgcacaagccgttcaagtgcaggctgtgcagctacgcgacgctgcgggaggagtcgctgctgagccacatcgagagggaccacatcaccgcgcaggggcccggcagcggcgaggcctgcgtggagaacggcaagcccgagctgagccccggggagttcccgtgcgaggtgtgtggccaggccttcagccagacctggttcctgaaggcgcacatgaagaagcaccggggctccttcgaccacggctgccacatctgcggccgtaggttcaaggagccctggttcctcaagaaccacatgaaggcgcacggccccaagacgggcagcaagaacaggcccaagagtgagctggaccccatcgccaccatcaacaacgtggtccaggaggaggtgatcgtcgccggcctgagcctctacgaggtctgcgccaagtgcgggaacctgtttacaaacctggacagcttgaacgcccacaatgccatccaccgcagagtcgaggccagccgcacgcgcgccccggccgaggagggggcggaggggccctcggacaccaagcagttcttcctccagtgcctgaacctgaggccgtcggcggccggcgactcgtgccctggcacgcaggccggacggcgggtggctgagctggacccggtcaacagctaccaggcctggcagctggccacgcggggtaaggtggccgagccggccgagtacctcaagtacggggcctgggacgaggcgctggccggggacgtggccttcgacaaggacaggcgcgagtacgtcctggtgagccaggagaagcgcaagcgtgagcaggatgcaccagccgcgcaggggcccccgcggaagcgcgcgagcgggcctggggaccccgcgcccgccggccacctcgatccccgctcggccgcgcgccccaaccgcagggccgcagccaccaccggccagggcaagtcctccgagtgcttcgagtgcggcaagatcttccgcacctatcatcagatggtgctgcactcacgcgtgcatcgccgcgcgcgccgcgagagggacagtgacggggacagggcggcgcgggcccgctgcggatcactcagtgagggtgactcggcctcccagcccagcagccctggctccgcctgtgccgctgctgactccccgggctctggcctggccgacgaggctgccgaagacagtggtgaggagggcgcccctgaacctgcaccagggggacagccgcgccgctgctgcttttccgaagaggtgacttcgaccgagctctccagtggagaccagagtcacaagatgggagataacgcctcggaaagagacaccggcgagtccaaggcagggatcgcagcttctgtgtccatacttgaaaacagtagcagagagacttctagaaggcaagagcagcacagattttctatggacttaaagatgccagcatttcaccccaagcaggaggtgcccgtccctggtgatggtgtggagttcccttccagtacgggagcggagggccagacgggtcaccctgcagaaaagctgtccgatttgcacaacaaggaacactctgggggagggaagcgggcgctggccccagacctcatgccgctagatttaagtgcgaggtcgacgcgggatgaccccagcaataaggagacggcctcctccctgcaggcggctttagtcgttcacccgtgtccttactgcagccacaagacctactaccccgaggtcctgtggatgcacaaacgcatctggcaccgcgtcagctgcaactccgtggctcccccgtggattcagcccaatggttacaaaagcatcagaagcaatttggttttcctttcccggagcggacgcacgggccccccgcctgccctcggtggcaaagaatgccagcctttgctccttgctcggttcacccgcactcaggtgccaggggggatgccggggtccaaaagtggctcttctcccctgggagtggtcacaaaagccgctagcatgcctaagaataaggagagccattccggaggtccctgcgctctgtgggcgcccggccctgacgggtatcgacagaccaaaccttgtcacggccaggagccacatggcgcggccacacaggggcccctggccaagcccaggcaggaggctagctccaaaccggtgcctgccccgggtggcgggggcttcagcaggagcgccacccctacgcccaccgtcatcgcccgggctggcgcgcagccctcggccaatagcaagcctgtggagaagtttggggtccccccagcgggggctggctttgcccccacaaataagcacagtgccccggactccctgaaagccaaattcagtgctcagcctcagggtccacctcctgcaaagggcgaagggggcgctcctcctctacctccccgcgagcccccctcgaaggcagcccaggagctgaggactctggccacctgtgctgcggggtccaggggcgacgcggccttgcaggcccagcccggcgtggctggggcgccccccgtcctacactccatcaaacaggagccggtggccgaggggcatgagaagcgcctggacatcctcaacatctttaagacgtacattccaaaggactttgcgaccctctaccagggatggggtgtcagcggccctgggttggagcacagagggacactccggacgcaggcccggccaggagagttcgtctgcatcgagtgcggaaagagcttccaccagcccggccacctcagggcccacatgcgggcacactcagtggtgtttgagtccgatgggcctcggggttctgaagttcataccacctccgcagacgcccccaaacaagggagagaccattctaacacaggtaccgtccagacagtgcctctgagaaagggaacctaaaggcgtgtttccgacgcaccccaggtccccgtaacggccattagcagtaccctcacgatgtcccagcagcctcccacctgtgacctggccgctccatggaagaacagccggggaactcctgagcagacacctcacatcccgagccgctgcgctggagtggaaactgaaggcagatgcctctccttgttaaacgttcagaaataaatgaagatgctatattctagaaatacatgtagatactatatacgcatttacgtgctcatcgtccatagtcccatattttcttataataaacagtagtactggcaggcacagtaggggcacaaggcatctgtcttattcaagacaagtttgagacactggaaaaaaagatacttgttgtgtgtgttggacagagtggcgaggctgagcactgtcacaggggcctcccatgttaagagggactgtggggatgatgtcagaacaagacgtggtggatttgaggttgatcgagtattaatactactgcctctccttgtcttagtgggtatttaaaatagtaaataagagagaggaaggaggtgacgttcaggtgctgtgggaagcaggcttggcggaggggtatgatgatgagaccctcattgttcactggctccatcgcactcctccctggggccgtgtgcctgttccattcttcccaccattcgaactgagcgaatctggcaaaggagacacgtctgtgggaatgcgtagattccgcctcggaagagagctagcgcaacactaagaaaagcaggcttcttgtttattctcaggacctttttgtaacagggctacattctgcaaactgcttacaaaggaagactatacgtcttaacaaattatttagccactgagtcctcccgattcggacctgttttagtaatggcagaagaatccctgagcaggttcaggtgccctagatgactagggtgctgagctctggcgccttctgtccccactctttgcctccccgccccttccctgagccaccccagcaagtgggtgtcttttctccctgggcctggtgacctccacaggatgagtgactttgttcataaagggtggggatcaccagccccttgggtgggggacggcttcatatacctcttcctcagtaatgcaaatgcgagtttttgtggtgggggttaaggcccataacaaaggatcttaaaccatgcagtgtacgcaattgaaatggtattccacagatataaatattttcttttcccattgccgtgacactatgtgtgatggtaatatttctgagagtttcagatttttgcacatatgattttatgcattatcaaaagttactgctgccttgaatgaaaatgttctgtgaaattttttgcaaaagctttactaggtttttttttaattgtgaaattttgtaaaggcaggaaatggattaaaacgagcatgctaaatatatttttcaaaaaagcaataattttacatgtacagaaattatcctaacctttaatactggcgagagcaacagtttacttaatacggtaatggactagtgcagtttttgtagacagtgggcttctgatacaaagtcttgtttaaacacagacacacacacacacaaacacacacacacaccctaaagtgtgggtttcctgttctaatgatttgttgaatattattatattattattattattattattattattgttattgttattagtaatgtttggttctggattctacttgttactgagtttaaattacttgacggttcaggttactttgcaacactttcaaacgatgcaatgtaactggctagcttatatatatatatatatatatatatatatatatttttttttttttttacttatttttttctgatattcttacaccagatatgtacgaaaatgatctgtcctgttggtgtaattaggaatgtccatgcagatacagttaaacaactgtaattgactgttctgtaaagttattttgggcaaagttgcggagacacattcctctgtccacctaagaaatcagaagactcttctgttgatttatgtttaatcatttcagtagtttccccacagtgatcatttctgcattttctggcttttgttttcttggctgaaagtgaatggtgactgttaggaatgtcagggactagtgacccagtcctgtttctctgtgttttagttattaaaaagaaattctgtacccaaagtgacacgaaagtgtagtctacatttttactgtttcagaagcggcatggaaaagtgcagttggcctttggagctggaagtgtcttgctggtgaggctccatcctggaggctctggtggggagtgggctggcgctggggccctgccggccgcgtgctggatccttcctggcttgcaggagagcaggcgtggaggacagtcagcttgcggggccgcgcagggtgcacagagtgcaggaggaaggttttcacccagttaaacagactggggagcccccccaagaacgccatcccttgaggccagctgtgggcaggcctggatgtgtggtcccttccttccacccatcgtcagtattgtgttggtttgttaatttgttgatttggtcatagtatttaatatgatttgtgtttccttatttatttagccaccgttttgattgcctttttttttccgaatggtaatttctgcatgatacacttctgtacgttgtcttctgactgttacagactttctactacctctcccgatctgctgtttccttgtttcttaacaggattttttacagtgttgcgtctaatgtaacttagacaataaagggtttggttgtctacactgcagcttctcggtgtctctcccctgctttccgctcgctgcttcccgctctgcccctgctggggcctggctgcaccctggcctgccttcctatactctcctgtttcctgctcatatctcttcctcatttttgcgttcaaataacacacagctaatgagcttctaaaaatcttttcaggttgttcacttgtattccttaatttgaagaatgaatatttaaattctctcaaaagtcagatattgaggatcttctctgggaaattggccactgtacctgcccacctttctgcctggttccctggaaggtcttattgtcatcttagacggacagatttcattctcagcaccatacagatttggcttcaaagccaggtgaattttgcctttgaggctctgaaaagtattaagtgttttaagaggtcccccaatatttacttatttattttttaaaccaagaaagacactggttccctgaaaagcaggtgcttcaggaagtagcaattgggagttgcatacagttacttcgtcagagaaaggagcgcccagtatgacaggcccccacccctgatccggccactgtgcacaggtcgctgagggtgtgagaacacctctgcaggggctccggcacatgtgggtttcatcgtctcacactccttcaggctgcaggggttgagtgcagaaagggcaagcttcatctccatggtgcctctccaggctggcaactctggtcggcctctgttctttggacagagagggtgtaggttacagggtcagtagggatgctttctggatcaaagaaagtgggtgtagtgcttagtctgttgtgtggaagagggcacctcctgggctttcgtggctggagactgtctaccaacattccttccttcaaactagacaaaccctcctctgccacccccagcaaattctcagaggtttccaagctgtagaaaaaggaaggaaggaaggacggcattcacatagctttactttctgcttcaaaatgtcttaagtagcatatgttgttttactgcttttaactttggtgagttctaatttcagaacgttttgttcactgagcaaaaaaacagatgaaacaaccacaggccaggacttcaagtgaggaggacgcctttgtttgccgtggttggtgggagcacacgccggagcccggtaacgtgcctgtgggagtgaccaagggccacccgcccaagggaaaatgttcattcttcatcagctttgctaattctgctttgaggcagtaaaatgcaaaagaccatagaatttgtatttctttttttaaaatacaatttataacattatattttgtactctttatattagaatttgtaactagattgatgtatttaactatttctgaaaaagtaattcaatgttttagttgtgtgataaaaatatttagataaaacatattcattctattggaatttgaaataaataaaaacatcttggagttctgagatttgtaagacatttttccccaatttcagagggtggcgtaaatcgtttgacagcccgctttggtctgtggttatttatttttgttggctgaacataaaccaaagtgttaatgctctttatttatggaagagttttagggtaattcacaagatcgttcatctgaacagatgcccagatggcccgagtggtttttttccaactcttttgtggactcgaggacatacagttttttaatggagacgctgtgtttttctcattttctttcacagcacacatgttatttccccactgaatacacccactgttcttacccttgcactgtcacccatacaggacgcacagggatggacgcggacggaattctgactcagccacacctggaggaaattattgtgtcaaaaatgtggggacacaagggctggcactgtggtttgcaatggtttactgatgagacagcaaaaatgagacaggaccatcagatgcaataaagattctaattt

SEQ ID NO: 181317 - protein, 896 aa, Artificial Sequence
  derived and/or modified sequence
MNYVGQLAGQVIVTVKELYKGINQATLSGCIDVIVVQQQDGSYQCSPFHVRFGKLGVLRSKEKVIDIEINGSAVDLHMKLGDNGEAFFVEETEEEYEKLPAYLATSPIPTEDQFFKDIDTPLVKSGGDETPSQSSDISHVLETETIFTPSSVKKKKRRRKKYKQDSKKEEQAASAAAEDTCDVGVSSDDDKGAQAARGSSNASLKEEECKEPLLFHSGDHYPLSDGDWSPLETTYPQTACPKSDSELEVKPAESLLRSESHMEWTWGGFPESTKVSKRERSDHHPRTATITPSENTHFRVIPSEDNLISEVEKDASMEDTVCTIVKPKPRALGTQMSDPTSVAELLEPPLESTQISSMLDADHLPNAALAEAPSESKPAAKVDSPSKKKGVHKRSQHQGPDDIYLDDLKGLEPEVAALYFPKSESEPGSRQWPESDTLSGSQSPQSVGSAAADSGTECLSDSAMDLPDVTLSLCGGLSENGEISKEKFMEHIITYHEFAENPGLIDNPNLVIRIYNRYYNWALAAPMILSLQVFQKSLPKATVESWVKDKMPKKSGRWWFWRKRESMTKQLPESKEGKSEAPPASDLPSSSKEPAGARPAENDSSSDEGSQELEESITVDPIPTEPLSHGSTTSYKKSLRLSSDQIAKLKLHDGPNDVVFSITTQYQGTCRCAGTIYLWNWNDKIIISDIDGTITKSDALGQILPQLGKDWTHQGIAKLYHSINENGYKFLYCSARAIGMADMTRGYLHWVNDKGTILPRGPLMLSPSSLFSAFHREVIEKKPEKFKIECLNDIKNLFAPSKQPFYAAFGNRPNDVYAYTQVGVPDCRIFTVNPKGELIQERTKGNKSSYHRLSELVEHVFPLLSKEQNSAFPCPEFSSFCYWRDPIPEVDLDDLS

SEQ ID NO: 181318 - protein, 233 aa, Artificial Sequence
  derived and/or modified sequence
MNYVGQLAGQVIVTVKELYKGINQATLSGCIDVIVVQQQDGSYQCSPFHVRFGKLGVLRSKEKVIDIEINGSAVDLHMKLGDNGEAFFVEETEEEYEKLPAYLATSPIPTEDQFFKDIDTPLVKSGGDETPSQSSDISHVLETETIFTPSSVKKKKRRRKKYKQDSKKEEQAASAAAEDTCDVGVSSDDDKGAQAARGSSNASLKEEECKEPLLFHSGDHYPLSDGDWSPLET

SEQ ID NO: 181319 - DNA, 2691 bp, Artificial Sequence
  derived and/or modified sequence
atgaactacgtcggccagctcgcaggacaagtcatcgtgaccgtgaaggagctctacaagggcatcaatcaggctactttaagtggctgcatcgatgtaatcgtagttcagcagcaagacggctcctaccaatgttcaccctttcatgtccgcttcggtaaattaggggtactgcggagtaaagaaaaagtgatagacatagagatcaatgggtccgcagtcgatttacatatgaaactcggtgacaacggggaagcctttttcgtggaggaaaccgaagaggagtacgaaaagctcccggcttacctcgcaaccagccctattcccaccgaagaccaattttttaaagacatagatacaccactcgtgaaatccgggggcgacgagactccctctcagagttccgacatctcccacgtcctggagaccgaaaccatcttcaccccgagttccgtgaagaaaaagaagagacgccgtaaaaagtacaagcaagactcaaagaaagaagaacaggctgccagcgccgccgcggaggacacttgtgatgtgggggtcagttcagatgacgacaagggcgcacaggccgccaggggctcttctaatgctagtttaaaggaagaggagtgcaaggaaccgcttctttttcattctggggaccactacccattgtcagacggagattggtcccccttagagaccacttaccctcaaacagcctgtcctaagagcgatagcgaattggaagtgaagcctgctgaatcactattgcggtccgagtcacatatggaatggacctggggcggtttcccggagtccactaaagtttctaagcgggagagaagcgaccaccacccccgaaccgcgacaatcaccccaagcgagaatactcactttcgcgtcattccatccgaagataatcttatctctgaggtggaaaaggatgcctctatggaagacacagtctgcacaatcgtcaaacccaagccacgggcattgggcacccagatgagtgaccccacatccgtcgccgagctccttgaaccaccgctggaatctacccagatttcttcaatgctcgatgccgatcatctccccaacgctgctttggcagaagccccctccgaatccaaaccagcagccaaagtcgactcaccgagcaaaaaaaagggggtccacaagaggtcacagcaccaaggaccggacgatatctatctcgacgacctcaagggcctggagcctgaagtcgccgcgctgtattttcctaaatccgagagtgagcccggaagtaggcaatggcccgagtccgacactttgtccgggtcacagtctccccagagtgtgggaagcgctgctgccgattccggcaccgaatgtttatccgattccgccatggatctgcccgatgttacactgagcctttgcggtggactgtccgaaaacggggagataagcaaagaaaagttcatggaacatatcataacttatcacgagtttgccgagaatcctgggcttattgacaatcctaatctcgttatccgaatatacaaccggtattataactgggctcttgccgctcccatgatcctgagtcttcaggttttccagaagtctcttccaaaggctacagttgagtcttgggttaaggacaaaatgcctaagaagtccggccgctggtggttttggaggaagcgggagtccatgaccaaacagctgcccgaatcaaaagaaggcaagtccgaggccccccctgcaagtgacctgccgtctagttccaaggagcccgccggagcccgccccgctgagaacgattcctcgagtgatgagggcagtcaagagctggaggagagtatcacggtcgaccctatccccaccgagcctctgtcgcacggctccactacctcctacaagaagagcctgagactgtccagtgaccagatcgcaaagttaaaacttcatgatgggcctaatgacgtggttttctctataactacccagtaccagggcacctgtcggtgtgccggcaccatttatctctggaattggaacgacaagattattatctctgacatagacgggacaatcactaaatctgacgcactgggtcagatcctcccccagctcggcaaagactggactcaccagggcatcgctaagttgtatcatagcatcaatgaaaatggctacaagttcttatactgctctgcccgggcaatcggaatggcagatatgaccagggggtatctccattgggtgaacgataaaggaactattttgccccggggtccgctgatgttgagcccctctagcctgttcagtgccttccaccgcgaagtcatcgagaagaaacccgagaaattcaagatcgagtgtctcaacgacatcaagaatctcttcgcaccaagcaaacagccattctacgccgctttcggtaatagacccaacgatgtctacgcttatacccaggtgggggttccagattgtcggatctttacggttaaccccaagggagagcttatccaggagagaaccaaaggcaacaagtcaagctaccatagattgagcgaactggtggagcacgtctttccactgttaagtaaggaacagaacagcgccttcccatgccccgagttttcaagcttttgctattggagggatcctatccctgaagtggaccttgatgaccttagttag

SEQ ID NO: 181320 - DNA, 702 bp, Artificial Sequence
  derived and/or modified sequence
atgaactatgtgggccagctggcaggacaggttatcgtgaccgtcaaggaactctataagggcattaatcaggctacactatccggctgtatcgatgtcatcgtggtgcagcagcaagacgggtcataccagtgcagccctttccatgtccgcttcggtaagcttggggtgctgcggtctaaagagaaggtgattgacatcgagataaacgggagtgctgtggaccttcacatgaagctcggggataacggggaagccttcttcgtcgaggaaacggaagaggagtatgaaaaacttccagcgtatttagcaacctcaccaatcccgacggaggaccaatttttcaaggatatcgatacgccgttagtcaaaagcgggggcgacgaaacgccctcccaatcatccgacatctcccacgtgttagaaaccgaaactatttttacccccagcagtgtgaaaaaaaaaaaacggcgcaggaagaagtataaacaggattccaaaaaagaggagcaggccgcttctgcggctgccgaggacacatgcgacgtgggtgttagcagcgatgacgataagggcgcgcaggcggctcgtggctcaagcaatgcctccctgaaggaggaagaatgcaaggagcccctgctattccacagcggggatcattatccattatcagatggcgattggtcccccctggagacctag

SEQ ID NO: 181321 - DNA, 2691 bp, Artificial Sequence
  derived and/or modified sequence
atgaactacgtgggccagctggccggccaggtgattgtgacagtgaaggagctgtacaagggcatcaaccaggccaccctgagcggctgcattgatgtgattgtggtgcagcagcaggacggcagctaccagtgcagccccttccacgtgcgctttgggaagctgggcgtgctgcggagcaaggagaaggtgattgatattgagatcaatggcagcgctgtggacctgcacatgaagctgggggacaatggagaggccttctttgtggaggagacagaggaggagtatgagaagctgcctgcctacctggccaccagccccatccccacagaggaccagttcttcaaggacatcgacacccccctggtgaagtctggaggagatgagacccccagccagagcagtgacatcagccacgtgctggagacagagaccatcttcacccccagctctgtgaagaagaagaagagaagaaggaagaagtacaagcaggacagcaagaaggaggagcaggccgccagcgctgctgctgaggacacctgtgatgtgggcgtgtccagtgatgatgacaagggggcccaggccgcccggggcagcagcaatgccagcctgaaggaggaggagtgcaaggagcccctgctcttccacagcggggaccactaccccctgagtgatggagactggagccccctggagaccacctacccccagacagcctgccccaagagtgacagcgagctggaggtgaagccagctgagagcctgctgcggtctgagagccacatggagtggacctggggcggcttccctgagagcaccaaggtgtccaagcgggagaggagtgaccaccaccccaggacagccaccatcaccccatctgagaacacccacttccgggtcatccccagcgaggacaacctgatcagcgaggtggagaaggatgcctccatggaggacacagtgtgcaccatcgtgaagcccaagccccgggccctgggcacccagatgtctgaccccacctctgtggccgagctgctggagccccccctggagagcacccagatcagctccatgctggatgctgaccacctgcccaatgctgccctggccgaggcccccagcgagagcaagccagctgccaaggtggacagccccagcaagaagaagggcgtgcacaagaggagccagcaccagggcccagatgacatctacctggatgacctgaagggcctggagcctgaggtggccgccctgtacttccccaagtctgagagcgagcccggcagccggcagtggccagagagtgacaccctgagcggcagccagagcccccagagcgtgggcagcgctgctgctgacagcggcacagaatgtctgagtgacagcgccatggacctgcctgatgtgaccctgagcctgtgtggcggcctgtctgaaaatggagagatcagcaaggagaagttcatggagcacatcatcacctaccacgagtttgctgagaaccctggcctgattgacaaccccaacctggtgatccgcatctacaaccgctactacaactgggccctggccgcccccatgatcctgagcctgcaggtgttccagaagagcctgcccaaggccaccgtggagagctgggtgaaggacaagatgcccaagaagagcggccgctggtggttctggaggaagcgggagagcatgaccaagcagctgcctgagagcaaggagggcaagtctgaggcccccccagccagtgacctgcccagcagcagcaaggagcctgctggggcccggccagcagaaaatgacagcagcagtgatgagggcagccaggagctggaggagagcatcaccgtggaccccatccccacagagcccctgagccacggcagcaccaccagctacaagaagagcctgcggctgagcagtgaccagatcgccaagctgaagctgcatgatggccccaatgatgtggtgttcagcatcaccacccagtaccagggcacctgccgctgtgccggcaccatctacctgtggaactggaatgacaagatcatcatcagtgacattgatggcaccatcaccaagagtgatgccctgggccagatcctgccccagctgggcaaggactggacccaccagggcatcgccaagctgtaccacagcatcaatgaaaatggctacaagttcctgtactgcagcgcccgggccatcggcatggctgacatgacccggggctacctgcactgggtgaatgacaagggcaccatcctgccccggggccccctgatgctgagccccagcagcctcttcagcgccttccaccgggaggtgattgagaagaagccagagaagttcaagattgaatgtctgaatgacatcaagaacctgtttgcccccagcaagcagcccttctatgctgcctttggaaaccggcccaatgatgtgtatgcctacacccaggtgggcgtgcctgactgccgcatcttcaccgtgaaccccaagggggagctgatccaggagaggaccaagggcaacaagagcagctaccaccggctgtctgagctggtggagcacgtgttccccctgctgagcaaggagcagaacagcgccttcccctgcccagagttcagcagcttctgctactggagggaccccatccctgaggtggacctggatgacctgtcctag

SEQ ID NO: 181322 - DNA, 702 bp, Artificial Sequence
  derived and/or modified sequence
atgaactacgtgggccagctggccggccaggtgattgtgacagtgaaggagctgtacaagggcatcaaccaggccaccctgagcggctgcattgatgtgattgtggtgcagcagcaggacggcagctaccagtgcagccccttccacgtgcgctttgggaagctgggcgtgctgcggagcaaggagaaggtgattgatattgagatcaatggcagcgctgtggacctgcacatgaagctgggggacaatggagaggccttctttgtggaggagacagaggaggagtatgagaagctgcctgcctacctggccaccagccccatccccacagaggaccagttcttcaaggacatcgacacccccctggtgaagtctggaggagatgagacccccagccagagcagtgacatcagccacgtgctggagacagagaccatcttcacccccagctctgtgaagaagaagaagagaagaaggaagaagtacaagcaggacagcaagaaggaggagcaggccgccagcgctgctgctgaggacacctgtgatgtgggcgtgtccagtgatgatgacaagggggcccaggccgcccggggcagcagcaatgccagcctgaaggaggaggagtgcaaggagcccctgctcttccacagcggggaccactaccccctgagtgatggagactggagccccctggagacctag

SEQ ID NO: 181323 - DNA, 2691 bp, Artificial Sequence
  derived and/or modified sequence
atgaactacgtgggccagctggccggccaggtgatcgtgaccgtgaaagagctgtacaaaggaattaatcaggctactctgtccggatgtatcgacgtcattgtggtgcaacagcaggacggctcctatcaatgttctccttttcatgtgagattcggaaagctgggtgttctcaggtctaaagaaaaggtcattgacatcgagattaacggaagcgctgtcgatctccacatgaagctaggcgataacggagaagccttctttgttgaggagacagaagaggagtacgagaagttgcctgcctaccttgccacttctcccatccccaccgaggaccagttctttaaagacattgacacaccgttggtcaaatctggtggcgacgagaccccttctcagtcaagcgacatttcccatgtcttggagactgagacaatcttcacccctagttccgtgaaaaaaaagaaaagacgtagaaagaagtacaaacaggacagcaagaaagaagagcaggcagcctcggcagccgccgaggacacctgcgatgtgggcgtttcgtcggatgatgataagggcgcacaggcggctaggggctcttccaatgccagcctgaaggaggaagagtgtaaggagccattactctttcattcaggggatcactatcccctgtccgatggggattggtctcccctggaaacaacttacccccagaccgcatgccccaagtctgacagtgagctggaggttaagccagccgagtccctgctccggagcgaatcccacatggaatggacatggggaggctttcctgaaagtacgaaggtcagcaaaagagaacgcagtgatcaccatccacgtacggctacaataactccttctgaaaacacccacttcagggtgattccctctgaagacaatctcatctctgaggtggagaaggatgccagcatggaggatacggtgtgcactattgtcaagccaaaaccacgggccctgggtacgcagatgagcgatccgacctccgtcgctgagctccttgagcccccgctcgagtctacgcagatctcctccatgctggatgccgaccacctccctaacgccgccttagccgaagcgccaagcgagtctaaaccggcagccaaagtggactcaccctccaaaaagaaaggggtgcataaacggagccagcatcaggggcccgatgatatatacctagacgatctcaaagggctagagcctgaagtggcagccctctattttcccaagagtgaaagcgagcctggctcccgccagtggcccgaatctgacactctctcgggctcccagagccctcagtcagtgggctctgccgctgctgatagcggaactgagtgtctttccgattcagctatggacctccccgacgtcacattgtcactctgtggcggcttgagtgagaacggagaaataagcaaagagaaattcatggaacacatcattacctaccatgagtttgctgaaaatccagggttgattgataatcccaacctggttattagaatatataaccgttactataattgggccttagctgcgcctatgattttgagtctgcaagtgtttcagaagtctcttcccaaggcaaccgtggaaagctgggtcaaggacaaaatgccaaagaaatcaggtaggtggtggttttggcgcaagcgcgaatccatgaccaaacagcttccggagtccaaggaaggcaaatcggaagcaccccccgcctctgacctcccatcctccagcaaggagcctgcaggggcccgaccagcagaaaatgactcaagctcggatgaggggtcccaggagctggaagagtctattacggtggacccaatacctaccgagcccctatcccacgggagcacaacatcatacaagaaaagcctgcggctgtcttctgaccagattgcaaagctcaagctgcatgacggccccaatgacgtcgtgttttccattacaactcagtaccagggcacttgccggtgtgccggcacaatatatctctggaattggaacgataagattattatttccgacatagacggcacaattacgaaaagtgacgccctaggacagatccttccacaactcggaaaagactggacacaccagggcatagcaaagctgtaccactccatcaatgaaaatgggtacaaatttctgtactgctcggctagggccatcggcatggccgacatgacaagaggctacctacactgggtaaacgataaaggcaccattcttccaagaggaccattgatgttgtctccttcaagtctgtttagcgcattccaccgggaggttattgaaaaaaagccagagaagtttaaaatcgagtgcctcaacgatatcaagaacctgtttgcccctagcaaacaacccttctacgctgcctttggaaaccggccaaacgacgtgtacgcttatactcaggtaggggtccctgactgcaggatcttcacagtcaacccaaaaggagaactgattcaggaacgcacaaagggtaataagtcatcataccaccgactgtcagaactggttgagcacgtgttccctctgctgtcaaaagagcagaattccgccttcccatgccctgagttctcctccttttgttactggagagacccaattccggaggtcgacttggacgaccttagctag

SEQ ID NO: 181324 - DNA, 702 bp, Artificial Sequence
  derived and/or modified sequence
atgaactacgtgggccagctggccggccaggtgatcgtgaccgtgaaagaattgtataagggtatcaatcaggcaaccttgagcggctgtattgacgtcattgtcgtccagcagcaggatggctcataccagtgcagtccgtttcatgttcgattcggaaagttgggggttctaagaagcaaagaaaaggtgatagacattgaaattaacggtagcgccgtggacttacacatgaagctcggcgacaacggagaggcgtttttcgtggaggagacagaggaggagtacgagaaactaccagcctaccttgcgaccagccccattccaaccgaagaccagttcttcaaggacatcgatactcccctggtcaaaagtggcggggatgagacgccaagccagagcagcgatatctcccatgtgctggagacggagactatctttacaccttctagcgtgaagaaaaagaagcgaaggcgaaagaagtataaacaagatagtaaaaaagaagagcaggcagcaagtgccgcagccgaagacacctgtgatgtgggagtgtcttcagacgacgataagggcgctcaggcggctaggggtagttctaacgctagtcttaaggaggaagagtgcaaagaacccctactgtttcactctggggaccactacccactgagcgacggcgattggagtccactggagacttag

SEQ ID NO: 181325 - DNA, 2691 bp, Artificial Sequence
  derived and/or modified sequence
atgaactatgttgggcagctcgctggccaagtgatcgtgaccgtgaaggagctgtataaaggaataaatcaggcgaccctgagcggatgcatcgatgtgatagtcgtgcagcagcaggatggttcttatcagtgttcgccattccacgttaggttcggaaagctgggggtccttcgctcaaaagagaaggtcatcgacatagaaatcaatgggagtgccgttgatctgcacatgaaacttggggataatggcgaggccttctttgtagaggagaccgaagaagaatatgaaaaactgccagcctacttagccactagtcctatcccaaccgaggatcagttctttaaagacatagatacaccattggtcaagtctgggggtgatgagacccccagtcaatcctccgatatttcgcatgtcttagagactgagaccatcttcacaccctcgagcgtgaaaaagaagaaaaggagaaggaagaagtacaaacaggatagcaagaaggaggagcaggccgctagcgccgctgcagaggatacatgcgatgtaggcgtgtcttccgacgatgataaaggcgcacaggccgctcgcggttcctctaatgcaagcctaaaggaagaagaatgtaaggaaccactgttgttccattcaggggatcattatccgttgagcgacggggattggtctcctctagagaccacataccctcaaaccgcatgcccaaagagtgactctgaactcgaggtcaagcccgctgaaagcttgctccggagtgagtcacacatggagtggacatggggcggattcccagaaagtacaaaggtctccaaaagagaaagaagcgaccaccatcctagaacagccacaattacaccctctgaaaatacccactttcgggtgattccctctgaggacaatctgattagtgaggtcgagaaggacgcctctatggaggacacggtatgtacaatcgttaagccaaaaccacgggcactgggaactcaaatgtccgaccccacaagtgtagctgagctgctggagcctcctctcgaatctactcagataagcagtatgctggatgccgaccatctccccaatgcagcactcgccgaggccccttcagaatcaaagcctgcggcaaaggtagacagcccaagcaaaaagaagggtgtccacaagagatcacagcaccagggtcccgatgatatctatctagacgacctaaaggggttggagcctgaggtcgcagccctttatttcccgaagagtgaatccgaaccagggtctcgacagtggcccgaatcagataccttaagtgggagtcagtccccccagtccgtaggatcggctgccgctgacagtggtacagaatgtttgagcgattcagcaatggacctgccagacgtgaccctcagtctttgcggtggccttagcgagaacggagaaattagtaaagaaaagtttatggagcacattataacctaccatgagttcgctgagaacccagggcttattgataacccaaatctcgtgatccgaatttacaatcgatattacaattgggccctggccgcaccaatgatactgagcctgcaggttttccagaaaagtctgccgaaagcaactgtggaatcatgggttaaggacaagatgcccaaaaagtccggcagatggtggttctggaggaagcgggagtccatgaccaagcaactaccagagtctaaggaggggaaaagtgaggccccacccgctagcgacctgccaagctcttctaaggaacctgccggtgcacgccctgccgagaatgatagctcttccgatgaaggttcccaggaactagaggaatccattaccgtggacccgatcccaactgaaccattgagccacggcagcaccaccagctataaaaagagtttacgtctctcctcagaccaaattgctaagctgaaattgcacgacggcccaaacgacgtagtgttcagcattactacccagtatcaggggacgtgcaggtgtgccggtactatatatctctggaattggaatgataaaattatcatctccgatattgacggaaccatcacgaagagcgatgctctcgggcaaattctaccccagttgggtaaggattggacacaccagggaattgccaaactataccattctattaatgaaaacggctataaattcttgtattgttccgcacgagccatcggaatggcggacatgacaagaggatatctgcattgggtgaacgacaagggcacaatcctccccagaggcccactcatgctctctcccagcagcctattttctgccttccaccgcgaagttatcgagaaaaagcccgagaaatttaagatagaatgcctgaacgacatcaaaaatctctttgcgccttctaaacaaccattctacgccgcttttgggaacagacccaacgatgtatacgcgtacacccaggtgggtgttcctgactgtcggatcttcactgttaaccccaaaggcgagcttatccaagaacgcaccaaaggcaataaaagtagttaccaccgactgtctgaactggtagagcacgtttttcctcttcttagcaaagagcagaactcagcgttcccatgccccgagtttagcagtttctgctactggagggacccgatccctgaggttgatctggatgacttgtcctag

SEQ ID NO: 181326 - DNA, 702 bp, Artificial Sequence
  derived and/or modified sequence
atgaattacgtgggacagctggcaggccaggttattgtgacagtgaaagagctgtataagggcatcaatcaagccactctgtcaggttgcattgatgtgattgtggtgcagcagcaagatgggagctaccagtgctctcctttccatgttcggttcggcaagctgggagtgctcagatctaaagaaaaagtgatcgacattgaaattaacggcagcgccgtcgacttgcacatgaagctgggagataacggcgaggcattctttgtcgaggaaactgaagaagagtacgaaaagctccctgcctacttagccacttcacccattcccaccgaggatcaattttttaaagatatcgataccccccttgtcaagtccggcggagatgaaaccccttcacagagctccgacatttcccacgtcttggagaccgaaacaattttcactccctcctccgtgaaaaaaaagaaacgacgtaggaagaaatataagcaagactccaagaaggaagagcaggccgcttctgcggcagctgaagacacttgtgatgtaggcgtttcctctgacgatgacaaaggagctcaggctgccaggggcagcagcaacgcttccctgaaagaagaagagtgtaaggaacctctgctgttccactccggcgaccactatccactgtccgacggagattggagtcctctggaaacttag

SEQ ID NO: 181327 - DNA, 2691 bp, Artificial Sequence
  derived and/or modified sequence
atgaactacgtgggccagctggccggccaggtgatcgtgaccgtgaaggagctgtacaagggcatcaaccaggccaccctgagcggctgcatcgacgtgatcgtggtgcagcagcaggacggcagctaccagtgcagccccttccacgtgagattcggcaagctgggcgtgctgagaagcaaggagaaggtgatcgacatcgagatcaacggcagcgccgtggacctgcacatgaagctgggcgacaacggcgaggccttcttcgtggaggagaccgaggaggagtacgagaagctgcccgcctacctggccaccagccccatccccaccgaggaccagttcttcaaggacatcgacacccccctggtgaagagcggcggcgacgagacccccagccagagcagcgacatcagccacgtgctggagaccgagaccatcttcacccccagcagcgtgaagaagaagaagagaagaagaaagaagtacaagcaggacagcaagaaggaggagcaggccgccagcgccgccgccgaggacacctgcgacgtgggcgtgagcagcgacgacgacaagggcgcccaggccgccagaggcagcagcaacgccagcctgaaggaggaggagtgcaaggagcccctgctgttccacagcggcgaccactaccccctgagcgacggcgactggagccccctggagaccacctacccccagaccgcctgccccaagagcgacagcgagctggaggtgaagcccgccgagagcctgctgagaagcgagagccacatggagtggacctggggcggcttccccgagagcaccaaggtgagcaagagagagagaagcgaccaccaccccagaaccgccaccatcacccccagcgagaacacccacttcagagtgatccccagcgaggacaacctgatcagcgaggtggagaaggacgccagcatggaggacaccgtgtgcaccatcgtgaagcccaagcccagagccctgggcacccagatgagcgaccccaccagcgtggccgagctgctggagccccccctggagagcacccagatcagcagcatgctggacgccgaccacctgcccaacgccgccctggccgaggcccccagcgagagcaagcccgccgccaaggtggacagccccagcaagaagaagggcgtgcacaagagaagccagcaccagggccccgacgacatctacctggacgacctgaagggcctggagcccgaggtggccgccctgtacttccccaagagcgagagcgagcccggcagcagacagtggcccgagagcgacaccctgagcggcagccagagcccccagagcgtgggcagcgccgccgccgacagcggcaccgagtgcctgagcgacagcgccatggacctgcccgacgtgaccctgagcctgtgcggcggcctgagcgagaacggcgagatcagcaaggagaagttcatggagcacatcatcacctaccacgagttcgccgagaaccccggcctgatcgacaaccccaacctggtgatcagaatctacaacagatactacaactgggccctggccgcccccatgatcctgagcctgcaggtgttccagaagagcctgcccaaggccaccgtggagagctgggtgaaggacaagatgcccaagaagagcggcagatggtggttctggagaaagagagagagcatgaccaagcagctgcccgagagcaaggagggcaagagcgaggccccccccgccagcgacctgcccagcagcagcaaggagcccgccggcgccagacccgccgagaacgacagcagcagcgacgagggcagccaggagctggaggagagcatcaccgtggaccccatccccaccgagcccctgagccacggcagcaccaccagctacaagaagagcctgagactgagcagcgaccagatcgccaagctgaagctgcacgacggccccaacgacgtggtgttcagcatcaccacccagtaccagggcacctgcagatgcgccggcaccatctacctgtggaactggaacgacaagatcatcatcagcgacatcgacggcaccatcaccaagagcgacgccctgggccagatcctgccccagctgggcaaggactggacccaccagggcatcgccaagctgtaccacagcatcaacgagaacggctacaagttcctgtactgcagcgccagagccatcggcatggccgacatgaccagaggctacctgcactgggtgaacgacaagggcaccatcctgcccagaggccccctgatgctgagccccagcagcctgttcagcgccttccacagagaggtgatcgagaagaagcccgagaagttcaagatcgagtgcctgaacgacatcaagaacctgttcgcccccagcaagcagcccttctacgccgccttcggcaacagacccaacgacgtgtacgcctacacccaggtgggcgtgcccgactgcagaatcttcaccgtgaaccccaagggcgagctgatccaggagagaaccaagggcaacaagagcagctaccacagactgagcgagctggtggagcacgtgttccccctgctgagcaaggagcagaacagcgccttcccctgccccgagttcagcagcttctgctactggagagaccccatccccgaggtggacctggacgacctgagctag

SEQ ID NO: 181328 - DNA, 702 bp, Artificial Sequence
  derived and/or modified sequence
atgaactacgtgggccagctggccggccaggtgatcgtgaccgtgaaggagctgtacaagggcatcaaccaggccaccctgagcggctgcatcgacgtgatcgtggtgcagcagcaggacggcagctaccagtgcagccccttccacgtgagattcggcaagctgggcgtgctgagaagcaaggagaaggtgatcgacatcgagatcaacggcagcgccgtggacctgcacatgaagctgggcgacaacggcgaggccttcttcgtggaggagaccgaggaggagtacgagaagctgcccgcctacctggccaccagccccatccccaccgaggaccagttcttcaaggacatcgacacccccctggtgaagagcggcggcgacgagacccccagccagagcagcgacatcagccacgtgctggagaccgagaccatcttcacccccagcagcgtgaagaagaagaagagaagaagaaagaagtacaagcaggacagcaagaaggaggagcaggccgccagcgccgccgccgaggacacctgcgacgtgggcgtgagcagcgacgacgacaagggcgcccaggccgccagaggcagcagcaacgccagcctgaaggaggaggagtgcaaggagcccctgctgttccacagcggcgaccactaccccctgagcgacggcgactggagccccctggagacctag

SEQ ID NO: 181329 - protein, 953 aa, Artificial Sequence
  derived and/or modified sequence
MAETLPGSGDSGPGTASLGPGVAETGTRRLSELRVIDLRAELKKRNLDTGGNKSVLMERLKKAVKEEGQDPDEIGIELEATSKKSAKRCVKGLKMEEEGTEDNGLEDDSRDGQEDMEASLENLQNMGMMDMSVLDETEVANSSAPDFGEDGTDGLLDSFCDSKEYVAAQLRQLPAQPPEHAVDGEGFKNTLETSSLNFKVTPDIEESLLEPENEKILDILGETCKSEPVKEESSELEQPFAQDTSSVGPDRKLAEEEDLFDSAHPEEGDLDLASESTAHAQSSKADSLLAVVKREPAEQPGDGERTDCEPVGLEPAVEQSSAASELAEASSEELAEAPTEAPSPEARDSKEDGRKFDFDACNEVPPAPKESSTSEGADQKMSSFKEEKDIKPIIKDEKGRVGSGSGRNLWVSGLSSTTRATDLKNLFSKYGKVVGAKVVTNARSPGARCYGFVTMSTSDEATKCISHLHRTELHGRMISVEKAKNEPAGKKLSDRKECEVKKEKLSSVDRHHSVEIKIEKTVIKKEEKIEKKEEKKPEDIKKEEKDQDELKPGPTNRSRVTKSGSRGMERTVVMDKSKGEPVISVKTTSRSKERSSKSQDRKSESKEKRDILSFDKIKEQRERERQRQREREIRETERRREREQREREQRLEAFHERKEKARLQRERLQLECQRQRLERERMERERLERERMRVERERRKEQERIHREREELRRQQEQLRYEQERRPGRRPYDLDRRDDAYWPEGKRVAMEDRYRADFPRPDHRFHDFDHRDRGQYQDHAIDRREGSRPMMGDHRDGQHYGDDRHGHGGPPERHGRDSRDGWGGYGSDKRLSEGRGLPPPPRGGRDWGEHNQRLEEHQARAWQGAMDAGAASREHARWQGGERGLSGPSGPGHMASRGGVAGRGGFAQGGHSQGHVVPGGGLEGGGVASQDRGSRVPHPHPHPPPYPHFTRRY

SEQ ID NO: 181330 - protein, 510 aa, Artificial Sequence
  derived and/or modified sequence
MAETLPGSGDSGPGTASLGPGVAETGTRRLSELRVIDLRAELKKRNLDTGGNKSVLMERLKKAVKEEGQDPDEIGIELEATSKKSAKRCVKGLKMEEEGTEDNGLEDDSRDGQEDMEASLENLQNMGMMDMSVLDETEVANSSAPDFGEDGTDGLLDSFCDSKEYVAAQLRQLPAQPPEHAVGNLETRQDVPTSSSLRVSVAAVPVPHLSVENEKILDILGETCKSEPVKEESSELEQPFAQDTSSVGPDRKLAEEEDLFDSAHPEEGDLDLASESTAHAQSSKADSLLAVVKREPAEQPGDGERTDCEPVGLEPAVEQSSAASELAEASSEELAEAPTEAPSPEARDSKEDGRKFDFDACNEVPPAPKESSTSEGADQKMSSFKEEKDIKPIIKDEKGRVGSGSGRNLWVSGLSSTTRATDLKNLFSKYGKVVGAKVVTNARSPGARCYGFVTMSTSDEATKCISHLHRTELHGRMISVEKAKNEPAGKKLSDRKECEVKKEKLSSVDR

SEQ ID NO: 181331 - protein, 201 aa, Artificial Sequence
  derived and/or modified sequence
MAETGTRRLSELRVIDLRAELKKRNLDTGGNKSVLMERLKKAVKEEGQDPDEIGIELEATSKKSAKRCVKGLKMEEEGTEDNGLEDDSRDGQEDMEASLENLQNMGMMDMSVLDETEVANSSAPDFGEDGTDGLLDSFCDSKEYVAAQLRQLPAQPPEHAVDGEGFKNTLETSSLNFKVTPDIEESLLEPGTDKRNTTVMV

SEQ ID NO: 181332 - DNA, 2862 bp, Artificial Sequence
  derived and/or modified sequence
atggctgagactcttccgggctctggtgactccgggcccggtacagcctctctcggacccggcgttgcagagactggcaccagacggctctctgaattacgtgtgatcgacttaagagcagaactgaagaaacgcaatctcgataccggcggcaacaaatctgttctgatggaacgcctcaagaaggccgtgaaagaagaaggccaggaccctgatgaaatcggcatcgagctcgaagctacctctaagaagtctgctaaacgctgcgttaaggggcttaagatggaggaggagggcacagaagacaacggacttgaagacgattcccgggatggacaagaggatatggaagcaagcctggagaacctccaaaacatgggaatgatggatatgagcgtacttgacgaaacggaagtggctaattcgagcgcgcccgactttggggaagacggcacagatgggttgcttgactccttttgcgattcaaaggaatatgtggccgctcagcttcgtcagctgcctgcccagccacccgaacacgccgttgacggcgaaggcttcaagaataccttggaaacatcctcactgaatttcaaagtaacccccgacattgaagaaagtcttctggagcctgagaatgagaagatcctggacattctcggcgaaacatgtaagagcgagcccgtaaaagaagaatcttcagaactggagcagccattcgcgcaagatacatcaagcgttggcccggaccggaaactggctgaagaagaggatctgtttgatagcgcccaccctgaagaaggtgacttggatctagctagcgagtcgaccgcacacgctcagtcatccaaggcagattccctgctcgccgtggttaaacgcgagcctgctgagcagccaggagacggggaacgcacagactgcgaaccagtcggccttgagcccgcggtggagcaatcctcagcagcctcagagctcgctgaagcctccagcgaggaattggcagaagcaccaacagaagcaccgtccccagaagctagggattctaaagaggacggccgaaaattcgacttcgacgcttgcaacgaagtgccccctgcccctaaggagagctccacctcagaaggggcggatcagaaaatgtcatcattcaaggaggagaaggatatcaagcccattataaaagacgagaagggtcgggtggggtcaggaagcggacgcaatctgtgggtgtccgggctctcttctaccactcgcgcaacagacctgaagaacctgttttcaaagtatggcaaggtcgtgggcgcaaaagtggtgaccaacgctagatcgccaggggctcgatgttacgggttcgtgacgatgagtacctccgatgaggctacaaagtgcataagccatctgcaccggacagaactccacggtaggatgatctcggtggagaaggctaaaaacgagccggccgggaaaaaattgtctgaccgcaaggagtgtgaggttaagaaagaaaaactgtcttctgtggatcgacaccactcggtggaaatcaagatcgaaaaaactgtgattaagaaagaagaaaagatagaaaagaaggaggagaagaaaccagaggacatcaaaaaggaagagaaggaccaggatgagctgaagcctggcccaaccaatcggagccgtgtgactaagagcggcagccgcgggatggaacggaccgtggtcatggacaaaagcaagggggaacctgtcatttcggttaagaccacctcccgctcgaaggagagatcaagtaaaagtcaagaccggaagtctgagtctaaggagaaaagagacattcttagctttgataaaattaaggaacagcgggagcgcgagagacagagacagcgagagcgcgagatccgcgagaccgagaggcgtcgggaaagagaacaacgcgaaagggagcagagactggaagcgtttcatgaacgcaaggaaaaagcccggctgcagagggagcgcttgcagctcgaatgccagcggcagaggctggagcgggagaggatggagcgcgagcggctcgagagagagcgaatgcgagtggagcgggagcgccgaaaggagcaagaaaggatacatagggagcgggaggaattgaggcggcagcaggaacaactgagatacgagcaggaacgccggcccggccgtagaccttatgacctcgaccgccgcgacgacgcatattggccagagggtaagagagtcgcaatggaggaccggtaccgcgcagatttcccgagaccagaccaccgcttccatgattttgatcatcgcgatcggggacagtatcaagaccacgccatcgaccggcgagagggctcacggccgatgatgggggatcatagagatggacagcactacggcgacgatcggcatggacatggcggcccacctgagcggcatggacgggatagtagagacggttggggcggctatggatctgataagcgtctgagtgaaggacgcggcctgcctcctccccccagaggtggcagggattggggcgagcacaaccagagactcgaggagcatcaagcacgcgcatggcagggcgctatggatgccggcgcggcaagtagggagcacgcccgatggcaagggggcgaaagaggattgtctggaccctctgggcctggtcatatggcctccagaggcggtgtggcaggtcgcggaggctttgcccaaggaggccactctcagggccacgttgtccccggcggcgggctcgagggcgggggtgtggcttctcaagaccggggctccagggtgccccatccccatccacacccccctccgtatccccactttacccggcggtattag

SEQ ID NO: 181333 - DNA, 2862 bp, Artificial Sequence
  derived and/or modified sequence
atggccgagaccctgcccggcagcggggacagcggccctggaacagccagcctgggccctggggtggccgagaccggcacccggcggctgtctgagctgcgggtcatcgacctgcgggcagagctgaagaagaggaacctggacacaggaggcaacaagtctgtgctgatggagcggctgaagaaggctgtgaaggaggagggccaggaccctgatgagatcggcatcgagctggaggccaccagcaagaagagcgccaagagatgtgtgaagggcctgaagatggaggaggagggcacagaagataatggcctggaggatgacagcagagatggccaggaggacatggaggccagcctggagaacctgcagaacatgggcatgatggacatgtctgtgctggatgaaacagaggtggccaacagcagcgccccagactttggagaagatggaacagatggcctgctggacagcttctgtgacagcaaggagtatgtggccgcccagctgcggcagctgcctgcccagcccccagagcacgctgtggatggagagggcttcaagaacaccctggagaccagcagcctgaacttcaaggtgaccccagacatcgaggagagcctgctggagccagaaaatgagaagatcctggacatcctgggggagacctgcaagtctgagcctgtgaaggaggagagcagcgagctggagcagccctttgcccaggacaccagctctgtgggccctgacaggaagctggccgaggaggaggacctgtttgacagcgcccaccctgaggagggggacctggacctggccagcgagagcacagcccacgcccagagcagcaaggctgacagcctgctggccgtggtgaagcgggagcctgctgagcagcctggagatggagagaggacagactgtgagcctgtgggcctggagcctgctgtggagcagagcagcgctgccagcgagctggccgaggccagcagcgaggagctggccgaggcccccacagaggcccccagccctgaggcccgggacagcaaagaagatggcaggaagtttgattttgatgcctgcaatgaggtgcccccagcccccaaggagagcagcaccagcgagggcgctgaccagaagatgagcagcttcaaggaggagaaggacatcaagcccatcatcaaggatgagaagggccgggtgggcagcggcagcggcaggaacctgtgggtgtctggcctgagcagcaccacccgggccacagacctgaagaacctcttcagcaaatatggcaaggtggtgggcgccaaggtggtgaccaatgcccggagccctggggcccgctgctacggctttgtgaccatgagcaccagtgatgaggccaccaagtgcatcagccacctgcacaggacagagctgcacggccgcatgatctctgtggagaaggccaagaatgaacctgctgggaagaagctgagtgacagaaaagaatgtgaggtgaagaaggagaagctgagctctgtggacagacaccacagcgtggagatcaagattgagaagacagtcatcaagaaggaggagaagattgagaagaaggaggagaagaagccagaggacatcaagaaggaggagaaggaccaggatgagctgaagccaggccccaccaacagaagccgggtgaccaagagcggcagccggggcatggagaggacagtggtgatggacaagagcaagggggagcctgtgatctctgtgaagaccaccagccgcagcaaggagaggagcagcaagagccaggacaggaagtctgagagcaaggagaagagggacatcctgagctttgacaagatcaaggagcagcgggagcgggagcggcagaggcagcgggagcgggagatccgggagacagagaggagaagagagcgggagcagcgggagcgggagcagaggctggaggccttccacgagaggaaggagaaggcccggctgcagcgggagcggctgcagctggagtgccagaggcagaggctggagcgggagaggatggagcgggagcggctggagcgggagaggatgagggtggagcgggagaggaggaaggagcaggagcgcatccaccgggagcgggaggagctgcggcggcagcaggagcagctgcgctatgagcaggagaggaggcctggaagaagaccctatgacctggacagaagagatgatgcctactggccagagggcaagagggtggccatggaggaccgctacagagctgacttccccaggccagaccaccgcttccatgactttgaccaccgggaccggggccagtaccaggaccacgccatcgacagaagagagggcagccggcccatgatgggagaccacagagatggccagcactatggagatgacagacatggccatggaggccccccagagcggcacggccgggacagcagagatggctggggcggctacggcagtgacaagaggctgtctgagggccggggcctgcccccaccaccccggggcggccgggactggggcgagcacaaccagaggctggaggagcaccaggcccgggcctggcagggcgccatggatgctggggccgccagccgggagcacgcccgctggcagggcggggagcggggcctgagcggccccagcggccctggccacatggccagccggggcggcgtggccggccggggcggctttgcccagggcggccacagccagggccacgtggtgcctgggggcggcctggagggcggcggcgtggccagccaggaccggggcagccgggtgccccacccccacccccaccccccaccctacccccacttcacccggcgctactag

SEQ ID NO: 181334 - DNA, 2862 bp, Artificial Sequence
  derived and/or modified sequence
atggccgagaccctgcccggcagcggcgacagcggccccggcaccgcctccctggggcccggcgtggcggaaaccggtactaggaggctgagcgagctgcgtgtgatcgacctgcgagcggagctgaagaagcggaacctggacaccgggggtaacaagagtgtgctgatggaaaggctaaagaaggcagtcaaagaggaagggcaggacccggacgaaattggaattgagctcgaggctacctctaaaaagtcagccaagcgctgcgtgaagggcctaaaaatggaggaagaaggcaccgaagataatggcctagaagacgactcaagggacggccaggaagatatggaggctagtttggaaaatctgcagaacatggggatgatggacatgtctgtgctggacgagactgaggtagccaatagttcagccccagacttcggcgaagatggaactgatggcctgcttgactctttctgcgatagcaaagaatacgttgcagcacagctgcggcagcttcccgcacagccccctgaacacgccgtggacggggaggggtttaaaaatactctcgaaacgtcatccctgaatttcaaggtgactcccgatatcgaagagtcactcttggagcctgaaaacgaaaagatcctggacattctgggagagacatgtaagtcggagccagtgaaggaagaatcctcagaactcgaacagccctttgcccaggacacgagttccgtcggccctgaccggaaattggccgaggaagaggaccttttcgacagtgctcatcccgaggagggagacttggatttagcaagcgaatccaccgctcatgcccagagtagtaaagccgactctttgctcgccgtcgtcaaacgcgagcctgctgaacagccaggcgacggggaacggactgactgcgagcctgtgggcctggagcccgccgtggagcagtcttctgcggcctctgaattagccgaggcttcctctgaagaactggccgaggccccaacagaggcaccctcaccagaagcaagggattctaaggaggacgggaggaaatttgacttcgacgcatgtaacgaagtccctcccgcccctaaggagagcagtacgtcagaaggggcggatcagaagatgagctcgttcaaagaagaaaaggacatcaagcccatcattaaagacgagaagggcagagtcgggagtggctccgggaggaacctatgggtcagcggactctcgtccaccaccagagctaccgatctgaaaaatctattcagcaagtatgggaaagtggtgggggcaaaagtagtcactaatgctagatcgcctggtgcacgctgctatggctttgtaaccatgagcacgtcggatgaagctacgaagtgcattagccacctgcaccgtacagagctgcacgggcgaatgattagcgtcgaaaaagccaagaacgaaccagccggtaagaagctttctgaccggaaggaatgtgaggttaaaaaagaaaagctcagttccgtagatagacatcactcagtggaaattaaaatagagaaaacagtgattaaaaaagaggaaaaaatcgaaaaaaaggaggagaagaagcccgaggatatcaagaaggaagaaaaagatcaggacgaactcaaaccaggcccaaccaaccggtcccgcgtcactaagtcgggttctcgtggaatggagcggactgtggtcatggacaaaagcaagggagaacccgtcatctccgtcaaaacgacctcgagaagcaaagaacgatcgtccaagtcccaggacagaaaatccgagtctaaagagaagcgggacattctcagttttgacaagataaaagagcagagggagcgggagagacagagacagcgggagcgagagatccgagaaactgagcgacggagagaacgagaacaaagagagcgggagcagaggcttgaggccttccacgagcggaaggaaaaagccaggctacaaagagagcggttacagcttgagtgtcagcgccagcggctggagagagaaaggatggagagagaaagactcgagcgggagcggatgcgagtggagcgcgaaagaagaaaggaacaagaaagaatccaccgagagagagaagagttgcgaagacaacaggagcaacttaggtacgaacaggaacgccgacccgggcgccggccctacgacctcgacaggcgggatgacgcttactggccagaggggaaaagggtagctatggaggatcgttaccgcgctgactttcctagacctgaccatcggttccatgacttcgatcacagagaccggggtcagtatcaggatcacgctatcgacaggagggaggggtctcgtccaatgatgggggatcacagggatgggcaacactacggggacgatcgccatggacatggtgggcccccagagagacacggacgggatagccgtgacggctgggggggctacgggagcgacaaaagacttagcgaagggcgaggactacctccaccccctaggggtggccgggactggggtgagcacaaccagaggctcgaagagcaccaagctcgcgcctggcagggcgctatggacgctggggccgcttctcgggaacacgctagatggcagggcggcgagcgcgggctgagtgggcctagcgggccaggacatatggcctctcgcggaggagtcgccggacggggtggtttcgcacagggcggccatagccagggccacgttgtcccaggcggcgggctggagggtggaggtgttgcaagccaggatagagggtctagggttccgcatccacaccctcatcccccaccataccctcatttcacccgacggtactag

SEQ ID NO: 181335 - DNA, 2862 bp, Artificial Sequence
  derived and/or modified sequence
atggccgaaacactgccaggaagcggcgatagcggccctggtacagcatccttgggcccaggagtggccgagaccgggacgcggcgactgtctgaactgagggtcatcgatctcagagcggaattgaagaagaggaacctggataccgggggaaataaaagcgttctgatggaaaggctgaaaaaagccgtgaaagaggaaggacaagatcccgacgaaattggcatcgaattagaggctactagcaagaagtccgcaaaaagatgcgtgaaaggccttaaaatggaggaggaaggcacggaagacaatggtctggaggatgatagtcgggatggtcaagaggacatggaagcatcactggaaaacttgcagaatatgggtatgatggatatgagcgttctcgatgaaacagaagtcgccaatagctcagctccagatttcggggaagacggcacagacggcctgctggatagcttttgcgacagcaaagagtatgtggccgcacagctgaggcagctgccagcccagccacctgagcacgcagtggacggggagggctttaaaaataccttggagacctcaagtctgaactttaaggtgactcctgatattgaggagagcttgctcgagccagagaacgaaaaaattctggacatcctgggggagacctgtaagtccgaacctgttaaagaggagtcctccgaattggaacagccctttgctcaggataccagctcagtgggtccggaccgcaagctggccgaagaggaagatctctttgatagcgcccacccagaggagggggacctggatttggctagcgagagtactgctcacgctcagtcttcaaaagccgactctctcctcgctgtagtgaaaagggaacctgcggagcagccaggtgacggcgagagaaccgattgtgaaccggtagggttggagcccgcagttgagcagtccagcgccgcatccgaactcgcagaggcatcttccgaagagctggcagaggcacccaccgaggctccatctcccgaggctcgcgattctaaagaagatggccgaaaattcgattttgacgcctgtaacgaggttccacccgctccaaaggagagctccaccagcgagggcgcagatcagaagatgtccagctttaaagaggagaaggacataaagcccatcattaaagacgaaaagggtagggtcgggtctggttcagggaggaatctgtgggtgagcgggctgtcctccacaactagggccacagacttgaaaaacttgttctctaagtatggcaaggtagtgggggcaaaagtggttaccaacgctcgctcacctggcgctagatgctatggtttcgtgactatgtctacatctgacgaagccaccaaatgcatctctcacctgcaccgcactgagctccatggtagaatgatttccgtggagaaagcaaaaaacgagcccgcaggaaaaaagctgagtgacagaaaagaatgcgaggtgaagaaggagaagctatcttccgtcgatagacatcacagcgttgagattaaaatcgagaaaaccgtgatcaagaaggaggagaagattgagaaaaaggaagaaaagaagcccgaagacatcaaaaaggaagaaaaggaccaggacgaattaaagcctggcccaacgaaccgcagccgggtgaccaaaagcggttctcgaggtatggagcgaaccgttgtgatggacaagagcaagggcgaacccgtcatctccgtcaagaccaccagccggagtaaggaaaggtcctcgaagagccaggacaggaagtctgagtccaaggaaaagcgggacattctaagttttgataagatcaaggagcagagagagcgcgaacgccaacggcaacgcgagagggaaatccgagagactgaacgccgacgcgaacgcgaacagagggaacgagagcaaaggcttgaagcattccacgagaggaaagagaaagctcgattgcagcgcgagcggctgcagcttgaatgccagagacagagacttgagcgggaaagaatggaacgcgaacgtcttgagagagaaaggatgagggtagaacgcgagcggcgaaaagaacaggagcggatccacagggagcgcgaggagctcagaagacagcaggagcagctgagatatgagcaggaacgacggccaggccgaaggccctatgatctcgatcgcagagacgacgcctactggccagagggcaagagggtagccatggaggacaggtatagagcggactttccacggccagaccaccgctttcacgatttcgatcaccgggatcggggacagtaccaggaccacgctatcgatcgcagggaggggtctagacccatgatgggcgatcacagagatgggcaacactatggggatgaccggcatggacatggcggtcctccagagcgacatggacgcgacagtagagatggatggggagggtacggctccgataaaagactttcagaaggacgcggactccctccaccacccaggggcggaagagactggggtgagcataatcagaggttggaagagcatcaggccagagcatggcaaggggcaatggacgccggtgccgctagtagagaacatgctcggtggcagggcggagagcggggtttgtccgggccatcgggacccggtcacatggctagccgcggaggcgtggcagggagggggggatttgcccagggcggtcactctcaggggcatgtggtgcctggcggaggcttggagggcggtggggttgcttcacaggaccgcggaagccgagtgccacatccacatccccatcctcctccgtatccacattttactagaaggtattag

SEQ ID NO: 181336 - DNA, 3317 bp, Artificial Sequence
  derived and/or modified sequence
gttgtgccggggaacccgcggttggtggacgcgcgagcgtccttgctgctaagtacgctagtgggggcggtgcgcgtgcgcgtgcgcggccgcaaagcggggcgggaggaaacgagtgcgttttcctcttaggcggcgccattttgtgttcagagccgctatagctgccggcggtgtgcgactgagtcggtggcgaagacgggaacgcgacgatggcggagactctgcccgggtcgggcgactcgggccctggcacggcttctctcggcccgggcgttgcggagactgggacgaggcggctcagcgagctgcgggtgatcgatctgcgggcggagctgaagaagcggaacctggacacgggcggcaacaagagcgtcctgatggagcggctcaagaaggcggttaaagaagaggggcaagatcctgatgaaattggcatcgagttagaagccaccagcaagaagtcagccaagagatgtgttaaaggactgaagatggaggaggaaggcacagaagataatggcctggaagacgattccagagacgggcaggaggacatggaagcaagtctggagaacctgcagaatatgggcatgatggacatgagtgtgctagacgaaactgaagtggcgaatagcagtgctccagattttggggaggatggcacggacggccttctcgattccttttgtgatagtaaagaatacgtggctgcacagctgagacagctcccggctcagcccccagagcatgctgtggatggggaaggatttaagaacactttggaaacttcatcgttgaacttcaaagtaactccggacattgaagaatcccttttggagccagaaaatgagaaaatactcgacattttgggggaaacttgtaaatctgagccagtaaaagaagaaagttccgagctggagcagccatttgcacaggacacaagtagcgtggggccagacagaaagcttgcggaggaagaggacctatttgacagcgcccatccggaagagggtgatttagatttggccagcgagtcaacagcacacgctcagtcgagcaaggcagacagcctgttagcggtagtgaaaagggagcccgcggagcagccaggcgatggcgagaggacggactgtgagcctgtagggctagagccggcagttgagcagagtagtgcggcctccgagctcgcggaggcctctagcgaggagctcgcagaagcacccacggaagccccaagcccagaagccagagatagcaaagaagacgggaggaagtttgattttgacgcttgtaatgaagtccctccggctcctaaagagtcctcaaccagtgagggcgctgatcagaaaatgagctcttttaaggaagaaaaagatataaagccaatcattaaagatgaaaaaggtcgggtcggcagcggttctggtcggaacctgtgggtcagcgggctgtcctccacaacacgcgctacggatctcaagaaccttttcagcaagtatgggaaggttgtcggggccaaagtggtaacgaacgcccgcagcccgggggctcgatgctatggattcgtcaccatgtcgacatctgacgaggcgaccaagtgcatcagccatctccacagaactgagctgcatggacgaatgatctccgtagagaaggccaaaaatgagcctgctgggaaaaagctttccgacagaaaagagtgcgaagtgaagaaggaaaaattatcgagtgtcgacagacatcattctgtggagatcaaaattgaaaaaactgtaattaagaaggaagagaagattgagaagaaggaggaaaaaaagcctgaagacattaagaaggaagaaaaagaccaggatgagctgaaacccggacctacaaatcggtctagagtcaccaaatcaggaagcagaggaatggagcggacggtcgtgatggataaatcgaaaggagagcccgtcattagcgtgaaaaccacaagcaggtccaaagagagaagctccaagagtcaggatcgcaagtcagaaagcaaagaaaagagagacatcttgtcgtttgataaaatcaaagaacaaagggagagagagcgccagaggcagcgggaacgggagatccgcgaaacggagaggcggcgggagcgcgagcagcgggagcgggagcaacgcctcgaggccttccatgagcggaaggagaaggcccggctacagcgggaacgcctgcagctcgagtgccagcgccagcggctggagcgggagcgcatggagcgggagcggctggagcgcgagcgcatgcgcgtggagcgtgagcgcaggaaggagcaggagcgcatccaccgcgagcgcgaggagctgcggcgccagcaggagcagctgcgttacgagcaggagcggcggcccgggcggaggccctacgacctggaccgacgagatgatgcctattggccagaaggaaagcgtgtggcaatggaggaccgatatcgtgcagactttccccggccagaccaccgctttcacgacttcgatcatcgagaccggggccagtaccaggaccacgccatcgacaggcgggagggttcgaggccaatgatgggagaccaccgggatgggcagcactatggagatgaccgccatggccacggaggacccccagagcgccacggccgggactcccgtgatggctgggggggctacggctccgacaagaggctgagtgaaggccgggggctgccccctccccccaggggtggccgtgactggggagagcacaaccagcggctagaggagcaccaggcacgcgcctggcagggtgccatggacgcaggcgcggctagccgggagcacgccaggtggcaaggtggcgagaggggcctgtctgggccctcggggccggggcacatggcaagccgcggtggagtggcggggcgaggcggctttgcacaaggtggacattcccagggccacgtggtgccaggtggcggactggaaggtggcggagtggccagccaggaccggggcagcagagtccctcacccacaccctcatccccccccgtacccccacttcacccgccgctactaagtcccactcgctgcgagttttcgggtgggcagacgcactgttgaatctggtagccagggttccctcgaacttgggggatctttttaaaagcaaagtaaatcctgccaccatgttgtagctcaatacaatgtgaactcactttttttttttttttaaataaatgtgttcttgttctgccatttttaaatcaaggtttctgttaacgaggcattccattttccattaataaagtttaccattcgc

SEQ ID NO: 181337 - DNA, 3317 bp, Artificial Sequence
  derived and/or modified sequence
gttgtgccggggaacccgcggttggtggacgcgcgagcgtccttgctgctaagtacgctagtgggggcggtgcgcgtgcgcgtgcgcggccgcaaagcggggcgggaggaaacgagtgcgttttcctcttaggcggcgccattttgtgttcagagccgctatagctgccggcggtgtgcgactgagtcggtggcgaagacgggaacgcgacgatggcggagactctgcccgggtcgggcgactcgggccctggcacggcttctctcggcccgggcgttgcggagactgggacgaggcggctcagcgagctgcgggtgatcgatctgcgggcggagctgaagaagcggaacctggacacgggcggcaacaagagcgtcctgatggagcggctcaagaaggcggttaaagaagaggggcaagatcctgatgaaattggcatcgagttagaagccaccagcaagaagtcagccaagagatgtgttaaaggactgaagatggaggaggaaggcacagaagataatggcctggaagacgattccagagacgggcaggaggacatggaagcaagtctggagaacctgcagaatatgggcatgatggacatgagtgtgctagacgaaactgaagtggcgaatagcagtgctccagattttggggaggatggcacggacggccttctcgattccttttgtgatagtaaagaatacgtggctgcacagctgagacagctcccggctcagcccccagagcatgctgtaggtaacttggagacacggcaggatgtgcccactagcagttctcttcgtgttagtgtggcagccgtgccagttccacatttatccgtagaaaatgagaaaatactcgacattttgggggaaacttgtaaatctgagccagtaaaagaagaaagttccgagctggagcagccatttgcacaggacacaagtagcgtggggccagacagaaagcttgcggaggaagaggacctatttgacagcgcccatccggaagagggtgatttagatttggccagcgagtcaacagcacacgctcagtcgagcaaggcagacagcctgttagcggtagtgaaaagggagcccgcggagcagccaggcgatggcgagaggacggactgtgagcctgtagggctagagccggcagttgagcagagtagtgcggcctccgagctcgcggaggcctctagcgaggagctcgcagaagcacccacggaagccccaagcccagaagccagagatagcaaagaagacgggaggaagtttgattttgacgcttgtaatgaagtccctccggctcctaaagagtcctcaaccagtgagggcgctgatcagaaaatgagctcttttaaggaagaaaaagatataaagccaatcattaaagatgaaaaaggtcgggtcggcagcggttctggtcggaacctgtgggtcagcgggctgtcctccacaacacgcgctacggatctcaagaaccttttcagcaagtatgggaaggttgtcggggccaaagtggtaacgaacgcccgcagcccgggggctcgatgctatggattcgtcaccatgtcgacatctgacgaggcgaccaagtgcatcagccatctccacagaactgagctgcatggacgaatgatctccgtagagaaggccaaaaatgagcctgctgggaaaaagctttccgacagaaaagagtgcgaagtgaagaaggaaaaattatcgagtgtcgacagacatcattctgtggagatcaaaattgaaaaaactgtaattaagaaggaagagaagattgagaagaaggaggaaaaaaagcctgaagacattaagaaggaagaaaaagaccaggatgagctgaaacccggacctacaaatcggtctagagtcaccaaatcaggaagcagaggaatggagcggacggtcgtgatggataaatcgaaaggagagcccgtcattagcgtgaaaaccacaagcaggtccaaagagagaagctccaagagtcaggatcgcaagtcagaaagcaaagaaaagagagacatcttgtcgtttgataaaatcaaagaacaaagggagagagagcgccagaggcagcgggaacgggagatccgcgaaacggagaggcggcgggagcgcgagcagcgggagcgggagcaacgcctcgaggccttccatgagcggaaggagaaggcccggctacagcgggaacgcctgcagctcgagtgccagcgccagcggctggagcgggagcgcatggagcgggagcggctggagcgcgagcgcatgcgcgtggagcgtgagcgcaggaaggagcaggagcgcatccaccgcgagcgcgaggagctgcggcgccagcaggagcagctgcgttacgagcaggagcggcggcccgggcggaggccctacgacctggaccgacgagatgatgcctattggccagaaggaaagcgtgtggcaatggaggaccgatatcgtgcagactttccccggccagaccaccgctttcacgacttcgatcatcgagaccggggccagtaccaggaccacgccatcgacaggcgggagggttcgaggccaatgatgggagaccaccgggatgggcagcactatggagatgaccgccatggccacggaggacccccagagcgccacggccgggactcccgtgatggctgggggggctacggctccgacaagaggctgagtgaaggccgggggctgccccctccccccaggggtggccgtgactggggagagcacaaccagcggctagaggagcaccaggcacgcgcctggcagggtgccatggacgcaggcgcggctagccgggagcacgccaggtggcaaggtggcgagaggggcctgtctgggccctcggggccggggcacatggcaagccgcggtggagtggcggggcgaggcggctttgcacaaggtggacattcccagggccacgtggtgccaggtggcggactggaaggtggcggagtggccagccaggaccggggcagcagagtccctcacccacaccctcatccccccccgtacccccacttcacccgccgctactaagtcccactcgctgcgagttttcgggtgggcagacgcactgttgaatctggtagccagggttccctcgaacttgggggatctttttaaaagcaaagtaaatcctgccaccatgttgtagctcaatacaatgtgaactcactttttttttttttttaaataaatgtgttcttgttctgccatttttaaatcaaggtttctgttaacgaggcattccattttccattaataaagtttaccattcgc

SEQ ID NO: 181338 - DNA, 2862 bp, Artificial Sequence
  derived and/or modified sequence
atggccgagaccctgcccggcagcggcgacagcggccccggcaccgccagcctgggccccggcgtggccgagaccggcaccagaagactgagcgagctgagagtgatcgacctgagagccgagctgaagaagagaaacctggacaccggcggcaacaagagcgtgctgatggagagactgaagaaggccgtgaaggaggagggccaggaccccgacgagatcggcatcgagctggaggccaccagcaagaagagcgccaagagatgcgtgaagggcctgaagatggaggaggagggcaccgaggacaacggcctggaggacgacagcagagacggccaggaggacatggaggccagcctggagaacctgcagaacatgggcatgatggacatgagcgtgctggacgagaccgaggtggccaacagcagcgcccccgacttcggcgaggacggcaccgacggcctgctggacagcttctgcgacagcaaggagtacgtggccgcccagctgagacagctgcccgcccagccccccgagcacgccgtggacggcgagggcttcaagaacaccctggagaccagcagcctgaacttcaaggtgacccccgacatcgaggagagcctgctggagcccgagaacgagaagatcctggacatcctgggcgagacctgcaagagcgagcccgtgaaggaggagagcagcgagctggagcagcccttcgcccaggacaccagcagcgtgggccccgacagaaagctggccgaggaggaggacctgttcgacagcgcccaccccgaggagggcgacctggacctggccagcgagagcaccgcccacgcccagagcagcaaggccgacagcctgctggccgtggtgaagagagagcccgccgagcagcccggcgacggcgagagaaccgactgcgagcccgtgggcctggagcccgccgtggagcagagcagcgccgccagcgagctggccgaggccagcagcgaggagctggccgaggcccccaccgaggcccccagccccgaggccagagacagcaaggaggacggcagaaagttcgacttcgacgcctgcaacgaggtgccccccgcccccaaggagagcagcaccagcgagggcgccgaccagaagatgagcagcttcaaggaggagaaggacatcaagcccatcatcaaggacgagaagggcagagtgggcagcggcagcggcagaaacctgtgggtgagcggcctgagcagcaccaccagagccaccgacctgaagaacctgttcagcaagtacggcaaggtggtgggcgccaaggtggtgaccaacgccagaagccccggcgccagatgctacggcttcgtgaccatgagcaccagcgacgaggccaccaagtgcatcagccacctgcacagaaccgagctgcacggcagaatgatcagcgtggagaaggccaagaacgagcccgccggcaagaagctgagcgacagaaaggagtgcgaggtgaagaaggagaagctgagcagcgtggacagacaccacagcgtggagatcaagatcgagaagaccgtgatcaagaaggaggagaagatcgagaagaaggaggagaagaagcccgaggacatcaagaaggaggagaaggaccaggacgagctgaagcccggccccaccaacagaagcagagtgaccaagagcggcagcagaggcatggagagaaccgtggtgatggacaagagcaagggcgagcccgtgatcagcgtgaagaccaccagcagaagcaaggagagaagcagcaagagccaggacagaaagagcgagagcaaggagaagagagacatcctgagcttcgacaagatcaaggagcagagagagagagagagacagagacagagagagagagagatcagagagaccgagagaagaagagagagagagcagagagagagagagcagagactggaggccttccacgagagaaaggagaaggccagactgcagagagagagactgcagctggagtgccagagacagagactggagagagagagaatggagagagagagactggagagagagagaatgagagtggagagagagagaagaaaggagcaggagagaatccacagagagagagaggagctgagaagacagcaggagcagctgagatacgagcaggagagaagacccggcagaagaccctacgacctggacagaagagacgacgcctactggcccgagggcaagagagtggccatggaggacagatacagagccgacttccccagacccgaccacagattccacgacttcgaccacagagacagaggccagtaccaggaccacgccatcgacagaagagagggcagcagacccatgatgggcgaccacagagacggccagcactacggcgacgacagacacggccacggcggcccccccgagagacacggcagagacagcagagacggctggggcggctacggcagcgacaagagactgagcgagggcagaggcctgccccccccccccagaggcggcagagactggggcgagcacaaccagagactggaggagcaccaggccagagcctggcagggcgccatggacgccggcgccgccagcagagagcacgccagatggcagggcggcgagagaggcctgagcggccccagcggccccggccacatggccagcagaggcggcgtggccggcagaggcggcttcgcccagggcggccacagccagggccacgtggtgcccggcggcggcctggagggcggcggcgtggccagccaggacagaggcagcagagtgccccacccccacccccacccccccccctacccccacttcaccagaagatactag

SEQ ID NO: 181339 - protein, 99 aa, Artificial Sequence
  derived and/or modified sequence
MERISAFFSSIWDTILTKHQEGIYNTICLGVLLGLPLLVIITLLFICCHCCWSPPGKRGQQPEKNKKKKKKKKKKDEEDLWISAQPKLLQMEKRPSLPV

SEQ ID NO: 181340 - DNA, 300 bp, Artificial Sequence
  derived and/or modified sequence
atggaacgtattagcgcttttttcagtagcatatgggacaccatcctgaccaaacaccaggaagggatttacaataccatttgccttggagtcttgttaggtttgcctttgctggtgattatcaccctgctcttcatttgctgccactgttgctggagccccccaggcaaaagaggacagcaacccgaaaagaacaagaagaagaagaaaaaaaagaaaaaaaaagatgaagaggatctgtggatttcagcccagccaaaattgttgcagatggagaagcgtccctcactcccagtttag

SEQ ID NO: 181341 - DNA, 300 bp, Artificial Sequence
  derived and/or modified sequence
atggagcggatatccgccttcttttcttcaatctgggacaccatccttacaaaacaccaggaaggaatatacaatactatatgcctcggcgttctgttagggctgcctcttctcgtaattattaccctactgtttatctgttgccactgctgctggtcccctccaggcaaaagaggccagcagccagaaaagaacaagaagaagaagaagaagaagaagaagaaagacgaggaggacttatggatctctgcacagccaaaactgctccagatggagaaacgcccatcactccctgtctag

SEQ ID NO: 181342 - DNA, 300 bp, Artificial Sequence
  derived and/or modified sequence
atggagagaatcagcgccttcttcagcagcatctgggacaccatcctgaccaagcaccaggagggcatctacaacaccatctgcctgggcgtgctgctgggcctgcccctgctggtgatcatcaccctgctgttcatctgctgccactgctgctggagcccccccggcaagagaggccagcagcccgagaagaacaagaagaagaagaagaagaagaagaagaaggacgaggaggacctgtggatcagcgcccagcccaagctgctgcagatggagaagagacccagcctgcccgtgtag

SEQ ID NO: 181343 - DNA, 300 bp, Artificial Sequence
  derived and/or modified sequence
atggagagaatctccgcgttcttttcctctatctgggacacaattcttaccaaacaccaggagggcatttacaatactatctgtctgggggttctgctgggtctcccccttttagtcatcatcacccttcttttcatttgctgccattgctgctggtctccccccggtaagcggggtcagcagccggagaagaataaaaaaaagaagaaaaaaaaaaagaagaaagacgaagaagacttgtggatatccgctcagcctaaactgctgcagatggaaaaacggccgtcacttcccgtgtag

SEQ ID NO: 181344 - DNA, 300 bp, Artificial Sequence
  derived and/or modified sequence
atggagaggatctccgcatttttcagttccatctgggatacgatattgacaaaacatcaggaggggatttacaatactatttgcttgggcgtgctgctcggattgcccctattggtgatcatcaccctgctgttcatttgctgtcactgctgttggagcccaccaggcaagagaggacaacagccggaaaagaataagaagaaaaagaagaagaaaaaaaaaaaggacgaagaggacttatggatttcagcccagcctaaactcctacaaatggaaaagcggccgagcctgcccgtgtag

SEQ ID NO: 181345 - DNA, 300 bp, Artificial Sequence
  derived and/or modified sequence
atggagcgcatcagcgccttcttcagcagcatctgggacaccatcctgaccaagcaccaggagggcatctacaacaccatctgcctgggcgtgctgctgggcctgcccctgctggtgatcatcaccctgctcttcatctgctgccactgctgctggagccccccaggcaagaggggccagcagcctgagaagaacaagaagaagaagaagaagaagaagaagaaggatgaggaggacctgtggatcagcgcccagcccaagctgctgcagatggagaagaggcccagcctgcctgtgtag

SEQ ID NO: 181346 - DNA, 300 bp, Artificial Sequence
  derived and/or modified sequence
atggagcggatcagcgccttcttcagcagcatctgggacaccatccttaccaaacatcaggaaggcatctataatacgatttgcctgggagtcctcctggggcttcccttgttagtgataattacccttctgtttatctgttgtcattgctgctggtcccccccaggcaagcgagggcagcagcccgaaaagaacaagaagaagaaaaaaaagaagaagaaaaaagatgaggaggacctgtggatctctgcccagcccaagttgttgcagatggagaaaaggccctctctgccggtgtag

SEQ ID NO: 181347 - DNA, 300 bp, Artificial Sequence
  derived and/or modified sequence
atggagcggatcagcgccttcttcagcagcatctgggacaccatcctgacaaagcaccaagaggggatctacaatactatttgtctgggagtgttactgggacttccgttgctggttattatcactctcctgtttatatgttgccattgctgttggtcgccaccaggaaagagggggcaacagcctgagaaaaacaaaaaaaagaaaaaaaagaaaaaaaagaaagacgaggaggacctctggatcagcgctcagcctaagctcttgcagatggagaagcgcccatctctccctgtctag

SEQ ID NO: 181348 - protein, 422 aa, Artificial Sequence
  derived and/or modified sequence
MVMVLSESLSTRGADSIACGTFSRELHTPKKMSQGPTLFSCGIMENDRWRDLDRKCPLQIDQPSTSIWECLPEKDSSLWHREAVTACAVTSLIKDLSISDHNGNPSAPPSKRQCRSLSFSDEMSSCRTSWRPLGSKVWTPVEKRRCYSGGSVQRYSNGFSTMQRSSSFSLPSRANVLSSPCDQAGLHHRFGGQPCQGVPGSAPCGQAGDTWSPDLHPVGGGRLDLQRSLSCSHEQFSFVEYCPPSANSTPASTPELARRSSGLSRSRSQPCVLNDKKVGVKRRRPEEVQEQRPSLDLAKMAQNCQTFSSLSCLSAGTEDCGPQSPFARHVSNTRAWTALLSASGPGGRTPAGTPVPEPLPPSFDDHLACQEDLSCEESDSCALDEDCGRRAEPAAAWRDRGAPGNSLCSLDGELDIEQIEKN

SEQ ID NO: 181349 - DNA, 1269 bp, Artificial Sequence
  derived and/or modified sequence
atggtgatggtgctgagcgagagcctgagcaccagaggcgccgacagcatcgcctgcggcaccttcagcagagagctgcacacccccaagaagatgagccagggccccaccctgttcagctgcggcatcatggagaacgacagatggagagacctggacagaaagtgccccctgcagatcgaccagcccagcaccagcatctgggagtgcctgcccgagaaggacagcagcctgtggcacagagaggccgtgaccgcctgcgccgtgaccagcctgatcaaggacctgagcatcagcgaccacaacggcaaccccagcgccccccccagcaagagacagtgcagaagcctgagcttcagcgacgagatgagcagctgcagaaccagctggagacccctgggcagcaaggtgtggacccccgtggagaagagaagatgctacagcggcggcagcgtgcagagatacagcaacggcttcagcaccatgcagagaagcagcagcttcagcctgcccagcagagccaacgtgctgagcagcccctgcgaccaggccggcctgcaccacagattcggcggccagccctgccagggcgtgcccggcagcgccccctgcggccaggccggcgacacctggagccccgacctgcaccccgtgggcggcggcagactggacctgcagagaagcctgagctgcagccacgagcagttcagcttcgtggagtactgcccccccagcgccaacagcacccccgccagcacccccgagctggccagaagaagcagcggcctgagcagaagcagaagccagccctgcgtgctgaacgacaagaaggtgggcgtgaagagaagaagacccgaggaggtgcaggagcagagacccagcctggacctggccaagatggcccagaactgccagaccttcagcagcctgagctgcctgagcgccggcaccgaggactgcggcccccagagccccttcgccagacacgtgagcaacaccagagcctggaccgccctgctgagcgccagcggccccggcggcagaacccccgccggcacccccgtgcccgagcccctgccccccagcttcgacgaccacctggcctgccaggaggacctgagctgcgaggagagcgacagctgcgccctggacgaggactgcggcagaagagccgagcccgccgccgcctggagagacagaggcgcccccggcaacagcctgtgcagcctggacggcgagctggacatcgagcagatcgagaagaactag

SEQ ID NO: 181350 - DNA, 1269 bp, Artificial Sequence
  derived and/or modified sequence
atggtaatggtccttagcgagtctctgagtactcggggagcagactccatcgcctgtgggacctttagtagggaactacatacaccgaagaagatgagccagggccctactctgtttagctgcgggatcatggagaacgatcggtggcgggacctggaccgcaagtgccccttgcagatcgaccagccgtcaactagcatctgggagtgcctgcctgagaaggatagttccctgtggcaccgagaagcagtcacagcctgtgctgttacttccctaattaaggacctcagcatctcggaccacaacggaaacccgtcagcccctccctctaagaggcagtgcaggagtttaagtttttccgatgagatgagcagctgtagaacctcctggcggccactaggctctaaggtgtggacgcctgttgaaaaaaggagatgttattctggtgggtccgttcaacgatacagtaatggcttttccactatgcaaaggtcatcatctttctcattaccttccagagcgaacgtccttagctctccttgtgatcaagctgggctccaccaccgttttggaggccaaccctgtcagggcgtgccaggaagcgcaccttgcggacaggccggagacacctggtcaccagacctacatcccgtaggcggtgggagactggaccttcagagaagccttagttgtagtcacgaacagttttcctttgtggaatattgccctccttccgccaactccacgcccgcatcgactcctgaattggcacgcaggtcctccggactgtctcgttccaggagccagccctgtgtgctgaatgacaagaaagtcggcgtgaaaagaaggcgtcctgaagaggttcaggaacagcgtcctagcttagatctggccaagatggctcaaaattgtcagaccttctctagccttagttgtctctccgccggcaccgaggactgcgggccacaatcacctttcgcccggcatgtgagcaacacccgggcatggacagccctgctgtctgcatcaggaccagggggcagaaccccagccggcactcccgtgcctgagcctttgcccccgagctttgacgatcacctggcttgtcaagaagacctgtcttgtgaagaatcagactcgtgtgccctggatgaggactgcgggcgtcgggccgaaccagctgctgcgtggagagatcgaggcgccccgggtaactccctgtgtagcctagacggcgagctagatatcgaacaaattgagaagaactag

SEQ ID NO: 181351 - DNA, 1269 bp, Artificial Sequence
  derived and/or modified sequence
atggttatggtcctcagcgagtcactgagcacacgtggtgccgactcaatcgcctgtggaacgttcagcagggagctccacactcccaaaaagatgtcccaaggcccgactttgttcagctgcggcatcatggagaacgaccggtggcgcgacctggacagaaagtgtcccctacagatcgatcagccaagtacctcgatatgggaatgcctgcctgagaaagatagctctctgtggcacagagaagcggttacagcgtgtgcggtaacctctctcattaaagatctgtccatctccgatcacaacggaaacccttcggcacctccctccaaaagacaatgccgaagcctcagcttctctgacgagatgtcttcctgccgtacttcatggcggcctctgggatcaaaggtgtggacccccgtcgagaaacggcggtgctactcggggggatctgtccagaggtatagcaatggattctcaacaatgcagcgcagctccagcttcagcctcccatctcgagctaatgtgttgtcatccccttgtgatcaggcaggtcttcaccatcggtttggcggccagccttgtcagggcgttccaggctccgctccttgcgggcaagccggcgacacctggtcacccgatctgcaccccgttggcggcgggcgattggatctgcagaggtccctgtcttgctcacacgaacaattttccttcgtagagtactgcccaccatcggcaaacagcacccctgccagcacccctgaattggctaggagatccagtgggttgagccgatctcgctcacagccctgtgtgctgaatgataagaaggtgggggtaaagagaagaagaccagaggaggtacaggaacagcggccatccctggatttagctaagatggcccagaattgtcagactttttccagcttatcctgcttgagcgcaggcaccgaggactgcgggccgcagtctcccttcgctagacacgtgtctaacacccgagcctggactgcccttctctctgcaagtgggcctggcggcagaacccctgcaggcacccctgtacccgaacccttgcccccctcgtttgacgaccaccttgcctgtcaggaggatctttcatgcgaagaatccgattcttgtgccctggatgaagactgtggaaggcgggccgagccggcggctgcatggcgcgatcgaggagcgccaggaaactctctctgctctctggacggggagttggacatcgaacaaatagaaaagaattag

SEQ ID NO: 181352 - DNA, 5431 bp, Artificial Sequence
  derived and/or modified sequence
ggcgcggggtccgcgcccggagcgccccgccgcgcacaggagttgaccacatttggccatttcccagaagggccccaccccaagggtgagtggccaatggggagctgtttctgctgacatcaattccccaggaggtactcaccccaagtctgcccaagtgaagatggctgatacccaccctgggatggagcccagcgcctgaggcccttatcatggtgatggtcctaagtgaaagcctcagcacccggggagctgactccattgcatgtgggaccttcagccgtgaactgcacacgccaaagaagatgagtcaaggacctacacttttctcttgtggaattatggaaaatgacagatggcgagacctggacaggaaatgccctcttcagattgaccaaccgagcaccagcatctgggaatgcctgcctgaaaaggacagctcactatggcaccgggaggcagtgaccgcctgcgctgtgaccagtctgatcaaagacctcagcatcagcgaccacaacgggaacccctcagcaccccctagcaagcgccagtgccgctcactgtccttctccgatgagatgtccagttgccggacatcatggaggcccttgggctccaaagtctggactcccgtggaaaagagacgctgctacagcgggggcagcgtccagcgctattccaacggcttcagcaccatgcagaggagttccagcttcagcctcccttcccgggccaacgtgctctcctcaccctgcgaccaggcaggactccaccaccgatttggagggcagccctgccaaggggtgccaggctcagccccgtgtggacaggcaggtgacacctggagccctgacctgcaccccgtgggaggaggccggctggacctgcagcggtccctctcttgctcacatgagcagttttcctttgtggaatactgtcctccctcagccaacagcacacctgcctcaacaccagagctggcgagacgctccagcggcctttcccgcagccgctcccagccgtgtgtccttaacgacaagaaggtcggtgttaaaaggcggcgccctgaagaagtgcaagagcagaggccttctctagaccttgccaagatggcacagaactgtcagaccttcagcagcctcagctgcctgagcgcagggacagaggactgcggtccccagagccccttcgcccgccacgtcagcaacaccagggcctggaccgccctgctctcagcctccggcccagggggcaggacccccgctgggaccccggtccctgagcctcttcccccttccttcgacgaccacctcgcctgccaggaggacctgtcctgtgaggagtcagacagctgcgccctggacgaggattgtggcaggagagcggagccggctgcagcctggcgggaccgcggggcccctgggaacagcctctgctccctggacggcgagttggacattgagcagatagagaagaactgagggggtgtgggcccaggcagggctggggtgtgctggcatcgacagcccccactctgggcactaggtgggcccttgaaggggagcccaactcgtgggcctgatgaaagcttcctgagtggtgtcgggtcccagagagggagcccacctgctgcctgggggagagcctggcctggccgcgtcatacagcgggtgtgtcagcctctcaccggctccccgagcgtggcagccaccaggtccacagaactactgcagcccagaggacagctttgaagtttgcgtcttttctgcctctttccctgtgggatgttgggcagtctctgttgtccccggcagagctgggcaccgctctgtatccccctggtggtgggggctgtcagggagggcctggggtgggggccaggggccatctgctatgtcagggcccttcttggcctcactcaggttcacttctggggagtcggccccgcagcttctttcactcagttttactccgtgccttctctcccaggtctccctgcttcaggcttgggaaggttcgggagatgcttccttctgtaacaccagaaccatttggccttaattccaatgtgagagacagaatccctggggtgctggactggccctccagagggtaagccatgtccggagtctcgggcccaaggaacgatttggagggtgcttgttagggcctcccgtgttgggtagaaatttggtggatctgttggctgaaaagacggacttgcttgcctctcctacagcatggagaggctgaccccatggctctgccaccgttggggcagggttagcagatggcagcccttctctgtggctgacaggtcactgagtgataagcatggttggttccggtgagtgtagggatggcacgataccagggcagcctcttgaaaacggcctcgggagacgggagctgcgagcaggtgggcagatgagggccctatgcgcactcaggggtgaagggcgtccgctggccactctgcaggggcccctgcaggattccaggcacctcccgtttgtccttgaggactgctggctgtaaccagggcacatcacccacctcaagacaagcccacgcccttgtcagcttagggggagcccagtcctgagggctgcatctctgttgtaggcccagccaccggcacaaagctggattcatgctccctgcccctaccccaccctggctcctcaccctggggcatccgaggagcctagccccctgagggtttgctctcctctcaaggtttgtagctcctctccggctgccttgcagacaccaccacatgggctctgctctatgggaatctggcttttagcgaatgtggcgtcttctgcaaacaatagcaattgggctggcttaggagcaagtggctcattttcccataaggctaaaaataactggtgcgctcccttgtgttggctgacacgcgcgttcaaagcacttttgtagtcactttgcttttgctcgtcttcatggacgagtgaacgcctcgcttctgcaggttgagtccagatgcttctcaccttctttctcctcaagaaagatgctttttgggaaacgttgtttaaatcttatttttttactacatcaaaaggatggtggttcaagttcccaatatgtgggtggcacttcttaaaaatcagctttaaggagctggcagaaagcccccagccccacagccctgagagatggtgttgctagctcaggtggctgacacatggggtatgccgggcactgggcaggtcccagagccggggaaccagctcacctctggttgctgtagctcctgccggaggcatgtctacttgtgatcccggacagccgaacccaagagctggtggctctgagcagacagagacatcttggcctgtccctgcctgggggtcatggagaccatgtcttcttagagcaaatgtggaggcggccagggcagttgttgggtgaatgtggagagcacatggccatgtcttgcccccggagtaccactgggcgtggggggtcctggcaccacatgcccggtgtggccgagggcacacagcctctatagcaggccttcctgtggaaggcagaggcagtgagggaggtggacggtgccagctgaggctgaggcatgcagcagcccccagctacctttgcttagggctggggtgggaggcacatggtgacaggtatatgtcgtgggactggggtgtgggtgacctgccctcaaaccttgcctgccacctccccattcaggcctggtggcaggaagggacaagctgtggagctggctgagtcacagccacctccccacctccccgcaagctggtcccatcgaccagcaagcccagccccagggcgcttagggagaaatgacccagcctcctcagaccccgcctgcctgtcctgtgcccaccacgcagcagtcaggggagaaaatggtggctatcccttctgcttagagaaagaaatggcctttagctggtttcatgtttgtgttttgactggagggagtagaccctatctataaggtgccaccccatcatccaagctgccacactgcccggagcagcctgttcctgcactccaccctgctggccccaggacttctgatctcagtcctctgggagggaggttcgcctaggaggtgccccccacattggtgtccccatgggcagcaggcagacagctcacccccaccagcatgatggccccagctgggggcagtggcaggagccttacttttgtcacagccttgcccacaaaccctgcctctgaggggagactgaggaagggcagagccagaagcaagccgtgccaggccatctgcctgctcatggggtcctaaagcgcgggctaagcctgcaggaaagccggggcggtggggggggcttagtgccacatgcaccccactcattccaaagccaccaaactgccaggggctgccgtccacccgtggggcccaggggctggggccacagccttgccattttcgttgccataccctcttgccttactcgcggtggaggccggatttgcacgggcagacgtgcacctgggcccgtggggagcttgttctgaccagacgtacagattttcattctcagaaagccttacttttcaaccaaatttttgtagccagttttgtgaatttgtacactgaaagaaaatttaaataaaggggaagtccacattaaaaagaaaacaaaacaaaccctaactaacttccaaatgggtctcctggtgcgggggcgtgagtggccgtgccctgggtgtgctgcctgtctgagcaagcttccctagctgtggaaccccgggccccctgctgcgggctctgccttggtgtcatgcctgctgcacccccgtttccactgacgtgccgtctgtggctatgggggtggtcactggaatgacggtcactccagacgtcagccggcagggatgcagcaggctggccgcgcaccggggctcgggcaccctctggccccacactggcaatgatgccacaccttgccatgtccacgctgttggtcaaacccctctgtcatgcctctttaaagagaaaagaagagaaagattttttttttttttaatggcagaccgaagtggagatcttgtagcctagataggatagtctgaccttctagcatagtctttttggcaaatgatttgtgttttcagtgtgtggggaagctgtcctgggggctggggcgacagatagcacataggctgtttctggggctgcaggggcttccctgagctggatgttgtgggtgttgccgtgcttcaggaagtgtggcgaccagaaagcgtagacccggggcccagggtctgcccgcccctgcagcctggcctccccgcacaggctgtggcttgcactccagccgctctagtctctcaggaatttgcttgttacttgtactgtgtaaataaagcttcctggttcaatacccaa

SEQ ID NO: 181353 - DNA, 3557 bp, Artificial Sequence
  derived and/or modified sequence
gtactgtacttaggacgatggtgaacaaagaaaagctctttgcagcgtttgatgaatgggattctgcctcctataggccacactccgagtcttccatacggtacaatctccggactcggtggtgttaggaaagtggcccccggaatggcttgcattccgggtctgggatcctggggtgggcatttgtgccgtcgccttcgccgccgcgctcgccttgcaggagcgggtgcagatggagccaggctgacggttgttcaacaggaacaaatgtttgttcaattgttggatggtggagaaaagggactgtttcctattgactgctgcaggagttggaatggcattgtttattggcctgggaagccaggcaagcgtcttgtgctgcttacaacatattagcagacttccaaatgacatgctagcatatgtgttcccagcagtccccaccggctggcagggagattcctccttgctccagatcctggactcgtttaaaagatgccacctggtttgaggacttgggaaggaatggagtcagccgaccagggagttgaccacatttggccatttcccagaagggccccaccccaagggtgagtggccaatggggagctgtttctgctgacatcaattccccaggaggtactcaccccaagtctgcccaagtgaagatggctgatacccaccctgggatggagcccagcgcctgaggcccttatcatggtgatggtcctaagtgaaagcctcagcacccggggagctgactccattgcatgtgggaccttcagccgtgaactgcacacgccaaagaagatgagtcaaggacctacacttttctcttgtggaattatggaaaatgacagatggcgagacctggacaggaaatgccctcttcagattgaccaaccgagcaccagcatctgggaatgcctgcctgaaaaggacagctcactatggcaccgggaggcagtgaccgcctgcgctgtgaccagtctgatcaaagacctcagcatcagcgaccacaacgggaacccctcagcaccccctagcaagcgccagtgccgctcactgtccttctccgatgagatgtccagttgccggacatcatggaggcccttgggctccaaagtctggactcccgtggaaaagagacgctgctacagcgggggcagcgtccagcgctattccaacggcttcagcaccatgcagaggagttccagcttcagcctcccttcccgggccaacgtgctctcctcaccctgcgaccaggcaggactccaccaccgatttggagggcagccctgccaaggggtgccaggctcagccccgtgtggacaggcaggtgacacctggagccctgacctgcaccccgtgggaggaggccggctggacctgcagcggtccctctcttgctcacatgagcagttttcctttgtggaatactgtcctccctcagccaacagcacacctgcctcaacaccagagctggcgagacgctccagcggcctttcccgcagccgctcccagccgtgtgtccttaacgacaagaaggtcggtgttaaaaggcggcgccctgaagaagtgcaagagcagaggccttctctagaccttgccaagatggcacagaactgtcagaccttcagcagcctcagctgcctgagcgcagggacagaggactgcggtccccagagccccttcgcccgccacgtcagcaacaccagggcctggaccgccctgctctcagcctccggcccagggggcaggacccccgctgggaccccggtccctgagcctcttcccccttccttcgacgaccacctcgcctgccaggaggacctgtcctgtgaggagtcagacagctgcgccctggacgaggattgtggcaggagagcggagccggctgcagcctggcgggaccgcggggcccctgggaacagcctctgctccctggacggcgagttggacattgagcagatagagaagaactgagggggtgtgggcccaggcagggctggggtgtgctggcatcgacagcccccactctgggcactaggtgggcccttgaaggggagcccaactcgtgggcctgatgaaagcttcctgagtggtgtcgggtcccagagagggagcccacctgctgcctgggggagagcctggcctggccgcgtcatacagcgggtgtgtcagcctctcaccggctccccgagcgtggcagccaccaggtccacagaactactgcagcccagaggacagctttgaagtttgcgtcttttctgcctctttccctgtgggatgttgggcagtctctgttgtccccggcagagctgggcaccgctctgtatccccctggtggtgggggctgtcagggagggcctggggtgggggccaggggccatctgctatgtcagggcccttcttggcctcactcaggttcacttctggggagtcggccccgcagcttctttcactcagttttactccgtgccttctctcccaggtctccctgcttcaggcttgggaaggttcgggagatgcttccttctgtaacaccagaaccatttggccttaattccaatgtgagagacagaatccctggggtgctggactggccctccagagggtaagccatgtccggagtctcgggcccaaggaacgatttggagggtgcttgttagggcctcccgtgttgggtagaaatttggtggatctgttggctgaaaagacggacttgcttgcctctcctacagcatggagaggctgaccccatggctctgccaccgttggggcagggttagcagatggcagcccttctctgtggctgacaggtcactgagtgataagcatggttggttccggtgagtgtagggatggcacgataccagggcagcctcttgaaaacggcctcgggagacgggagctgcgagcaggtgggcagatgagggccctatgcgcactcaggggtgaagggcgtccgctggccactctgcaggggcccctgcaggattccaggcacctcccgtttgtccttgaggactgctggctgtaaccagggcacatcacccacctcaagacaagcccacgcccttgtcagcttagggggagcccagtcctgagggctgcatctctgttgtaggcccagccaccggcacaaagctggattcatgctccctgcccctaccccaccctggctcctcaccctggggcatccgaggagcctagccccctgagggtttgctctcctctcaaggtttgtagctcctctccggctgccttgcagacaccaccacatgggctctgctctatgggaatctggcttttagcgaatgtggcgtcttctgcaaacaatagcaattgggctggcttaggagcaagtggctcattttcccataaggctaaaaataactggtgcgctcccttgtgttggctgacacgcgcgttcaaagcacttttgtagtcactttgcttttgctcgtcttcatggacgagtgaacgcctcgcttctgcaggttgagtccagatgcttctcaccttctttctcctcaagaaagatgctttttggg

SEQ ID NO: 181354 - DNA, 1269 bp, Artificial Sequence
  derived and/or modified sequence
atggtgatggtgctgtctgagagcctgagcaccagaggagctgacagcatcgcctgtggcaccttcagccgggagctgcacacccccaagaagatgagccagggccccaccctcttcagctgtggcatcatggagaatgaccgctggagggacctggacagaaaatgtcccctgcagattgaccagcccagcaccagcatctgggagtgcctgcctgagaaggacagcagcctgtggcaccgggaggccgtgacagcctgtgctgtgaccagcctcatcaaggacctgagcatcagtgaccacaacggcaaccccagcgccccacccagcaagaggcagtgccgcagcctgtccttcagtgatgagatgagcagctgcaggacctcctggaggcccctgggcagcaaggtgtggacccctgtggagaagaggcgctgctacagcggcggctctgtgcagcgctacagcaatggcttcagcaccatgcagaggagcagcagcttcagcctgcccagccgggccaacgtgctgagcagcccctgtgaccaggccggcctgcaccacagatttggaggccagccctgccagggcgtgcccggcagcgccccctgtggccaggccggggacacctggagcccagacctgcaccctgtgggcggcggccgcctggacctgcagaggagcctgagctgcagccatgagcagttctcctttgtggagtactgccccccatctgccaacagcaccccagccagcaccccagagctggcccggcgcagcagcggcctgagccgcagccgcagccagccctgtgtgctgaatgacaagaaggtgggcgtgaagagaagaagacctgaggaggtgcaggagcagaggcccagcctggacctggccaagatggcccagaactgccagaccttcagcagcctgagctgcctgtctgctggaacagaggactgtggcccccagagcccctttgcccggcacgtgagcaacacccgggcctggacagccctgctgagcgccagcggccctgggggccgcaccccagctggcacccctgtgcctgagcccctgccccccagctttgatgaccacctggcctgccaggaggacctgagctgtgaggagagtgacagctgtgccctggatgaggactgtggcagaagagctgagcctgctgctgcctggagggacagaggagcccctggcaacagcctgtgcagcctggatggagagctggacatcgagcagatcgagaagaactag

SEQ ID NO: 181355 - DNA, 1269 bp, Artificial Sequence
  derived and/or modified sequence
atggtgatggtgctgagcgagagcctgagcacccggggcgccgactccatcgcgtgtggtacattctcaagggagctgcacacaccgaaaaaaatgtctcaaggtcccactctcttcagctgcggcatcatggaaaacgaccgatggagagatctggaccggaagtgtcccctgcagattgatcagccatccactagtatctgggagtgtctccctgagaaagactcaagcctctggcaccgcgaggcagtgacggcttgcgccgtcacgtccctgattaaggacctctcaataagcgatcataacggtaacccaagtgctccccctagtaagcgccaatgccgctctctgtctttttcagacgaaatgtcctcgtgcaggacttcttggaggcccctggggagcaaggtttggacaccggtggaaaagagacgctgttacagtggaggctctgtgcagcgctactccaatggattttccaccatgcagagaagctcctccttcagccttcctagtagagctaacgtcttgagtagtccatgcgatcaagctggtctgcatcaccgcttcggtggccagccatgtcagggagtgccgggctccgctccttgcgggcaggcaggggatacctggtccccagatcttcaccccgtgggcggtggtaggctggatctccagcggtccctctcatgctcacatgagcagttctcattcgtcgagtactgtcctccctctgctaactcaactccggcctcaacccctgaactcgctcggcgctcttccgggctttcacggtcccgtagccagccatgcgtgttgaatgataagaaggtgggggttaagcgtcggcgacccgaagaggtccaggaacagcgcccatctcttgacctcgccaagatggctcagaactgtcagaccttcagttcgttgagctgcttaagcgcaggcacggaggactgtggcccacagtctcctttcgcccgccatgtgtctaacacacgggcttggacagccctgctatccgccagcggtccaggaggccggactcctgctgggacgcctgtgcctgagccattaccaccgagtttcgacgatcacctggcctgtcaggaagatctgtcctgcgaggaaagcgatagttgtgctctggacgaagattgcggccgccgggcggaacctgcggccgcctggcgcgacagaggggccccagggaattccctgtgtagcctggacggagagcttgatatcgagcagattgagaaaaactag

SEQ ID NO: 181356 - DNA, 1269 bp, Artificial Sequence
  derived and/or modified sequence
atggtgatggtgctgagcgagagcctgagcacccggggcgccgactccatcgcttgtggtacattcagtcgcgagcttcacacacccaagaagatgtcacaaggcccaacactattttcctgtggcataatggagaacgatcggtggcgagacttggatcgaaaatgcccgctgcaaattgatcagccctccacatctatctgggagtgtttgcccgagaaggatagctctctgtggcatcgcgaggcagtgactgcctgtgctgtgacgagcctgattaaagatctcagtatcagtgaccacaacggcaacccatcagccccaccttccaagagacagtgccggtccctctccttttccgatgagatgagcagttgcagaacgtcctggagacccttgggttccaaggtatggacacctgtggagaagcgccggtgctacagcggcggctccgtgcaacggtacagcaacggctttagcaccatgcagcgcagcagctccttctctctacctagcagggctaatgtattgtcatcaccatgcgatcaggctggtctccaccacagatttggaggacagccttgtcagggagttccgggctctgcaccgtgcgggcaggctggcgacacttggtcccccgacctgcacccggtcgggggagggagactcgaccttcaacggtcattgagttgtagtcacgagcaattctctttcgtcgaatactgccctccctccgcaaacagcacacccgcctccacgcctgaactcgccagacggagttccgggctgtcacgaagtaggtcacagccttgcgttttgaacgataaaaaggtcggggttaagaggaggagacctgaggaggttcaggagcaaaggccatcactggatctggccaaaatggcacagaattgccagactttcagtagtctgagttgtctatctgcaggtaccgaagactgcggaccccagtccccatttgcccgtcacgtctcaaatacgcgggcttggacggctctcctcagtgcatctggcccaggcggtcggactcccgctgggactccagtaccagagccactccctccaagcttcgacgaccatctggcttgccaggaagacctctcttgtgaagagtctgactcttgcgcgctggatgaggactgcggcaggagggccgagcccgcggctgcctggcgcgaccgaggtgcgccgggcaactcactgtgtagtctggacggtgagttggatattgagcagattgagaaaaattag

SEQ ID NO: 181357 - DNA, 1269 bp, Artificial Sequence
  derived and/or modified sequence
atggtgatggtcttaagcgagtctctgtcaactaggggcgctgactccatcgcttgcggcacattcagtagggaacttcacacccctaagaagatgtctcaagggccaacccttttctcttgtggcataatggagaacgatcgatggcgggacctggatagaaagtgcccactccagatcgatcagcccagtacaagcatctgggagtgtctcccggaaaaagattctagcttgtggcatcgggaagcggtgaccgcatgcgctgttacatcccttattaaggatctgagtatctcggatcacaacggcaatccatccgcgccacccagtaagaggcaatgtcggagtctttcattttcggacgagatgtcttcctgccgcacttcatggcggcctctcggatctaaagtgtggacccctgtcgaaaaaagacgatgctactctggaggcagcgtccagcgttactcgaacggcttctctacaatgcagagatctagcagctttagtctgcctagcagagctaacgtactgtcctccccatgcgaccaagccggacttcatcaccgatttgggggtcagccatgccagggtgtcccgggttctgccccttgcgggcaggcaggggacacgtggagtcctgacctgcacccagtcggtgggggaaggctggatctgcagaggtctctgtcctgttctcacgagcagttttcattcgtggagtactgtcccccatcagccaattccactccagctagtacccctgagctcgccagacgttcaagcggcctgagcagaagtagatcacagccctgcgtccttaatgataagaaggtgggagtgaagcggaggcgccctgaggaagtccaggaacagagaccgagcctggatttggccaagatggctcagaactgccagacctttagctccctgagctgcttgtccgccggaaccgaggattgcgggccacagtcgccatttgcaagacatgtgtctaacacacgggcatggacagctctgctttccgcctctggcccagggggtcgtactccagccggaactccagtcccagagcccctgccaccctcttttgatgaccacctggcttgtcaggaagatctttcttgcgaggagtctgactcctgtgcacttgatgaagactgcggtcggagggccgagcccgctgccgcatggagagatcgaggcgctccgggaaactcgctgtgtagtctggacggcgagctggacattgaacagatcgagaaaaattag

SEQ ID NO: 181358 - DNA, 1269 bp, Artificial Sequence
  derived and/or modified sequence
atggtaatggtgctgagtgaatcactttcaactcgaggtgcagattccatcgcttgcggaactttctccagggagctgcacacccctaagaagatgtcccaaggtcctacgttgtttagctgcggtataatggaaaatgatcgatggcgcgatctcgacaggaagtgccccctccagattgatcagccatccacttctatctgggagtgcctgcccgagaaagattcatctctgtggcatagggaagcagttacagcctgtgccgtaacttcattgattaaagacctgagtatcagcgaccacaacggtaatccttccgcgccacctagtaaaagacagtgcaggagcctgtcattctcagacgagatgagttcatgtagaacttcctggaggcctctgggtagtaaggtctggacgccagtcgagaagcgacgctgctactctggtggcagcgtccagagatattcaaacgggttttcaaccatgcaacgcagctcatccttcagtctcccaagccgggcaaatgtgttatcaagcccctgtgatcaggcgggattacaccaccgcttcgggggacagccttgtcaaggtgttcctggcagcgcgccatgcggacaggcgggagatacatggtcacccgacctgcatcccgttggaggaggcagattggacctccagcgttctctgagctgctcccacgaacagttctcttttgtcgagtattgccctccatcagccaactctaccccggcatccacaccagagctcgcaagaaggagcagtggcctcagtagatccagatcccagccctgtgtccttaatgacaaaaaagtgggggtcaaaagaagaagacctgaggaagtccaggagcaaagaccctccctggacttggcaaagatggcacagaattgtcaaactttcagctctctctcttgtctttctgccggaacggaggattgcggaccacagtcgccatttgccaggcacgtcagtaataccagggcctggactgccctgctgagcgcatcaggccctggcggacgaaccccagccggaacccctgtgccagaaccactgcccccatcttttgatgaccaccttgcctgtcaggaagacctgagttgtgaagagtccgattcctgtgctttggacgaagattgcgggaggagagccgagccagctgccgcatggcgcgaccgcggtgcccctggcaattccctatgcagcctggacggagaacttgatatagagcagattgaaaaaaactag

SEQ ID NO: 181359 - protein, 1572 aa, Artificial Sequence
  derived and/or modified sequence
MRTTKVYKLVIHKKGFGGSDDELVVNPKVFPHIKLGDIVEIAHPNDEYSPLLLQVKSLKEDLQKETISVDQTVTQVFRLRPYQDVYVNVVDPKDVTLDLVELTFKDQYIGRGDMWRLKKSLVSTCAYITQKVEFAGIRAQAGELWVKNEKVMCGYISEDTRVVFRSTSAMVYIFIQMSCEMWDFDIYGDLYFEKAVNGFLADLFTKWKEKNCSHEVTVVLFSRTFYDAKSVDEFPEINRASIRQDHKGRFYEDFYKVVVQNERREEWTSLLVTIKKLFIQYPVLVRLEQAEGFPQGDNSTSAQGNYLEAINLSFNVFDKHYINRNFDRTGQMSVVITPGVGVFEVDRLLMILTKQRMIDNGIGVDLVCMGEQPLHAVPLFKLHNRSAPRDSRLGDDYNIPHWINHSFYTSKSQLFCNSFTPRIKLAGKKPASEKAKNGRDTSLGSPKESENALPIQVDYDAYDAQVFRLPGPSRAQCLTTCRSVRERESHSRKSASSCDVSSSPSLPSRTLPTEEVRSQASDDSSLGKSANILMIPHPHLHQYEVSSSLGYTSTRDVLENMMEPPQRDSSAPGRFHVGSAESMLHVRPGGYTPQRALINPFAPSRMPMKLTSNRRRWMHTFPVGPSGEAIQIHHQTRQNMAELQGSGQRDPTHSSAELLELAYHEAAGRHSNSRQPGDGMSFLNFSGTEELSVGLLSNSGAGMNPRTQNKDSLEDSVSTSPDPMPGFCCTVGVDWKSLTTPACLPLTTDYFPDRQGLQNDYTEGCYDLLPEADIDRRDEDGVQMTAQQVFEEFICQRLMQGYQIIVQPKTQKPNPAVPPPLSSSPLYSRGLVSRNRPEEEDQYWLSMGRTFHKVTLKDKMITVTRYLPKYPYESAQIHYTYSLCPSHSDSEFVSCWVEFSHERLEEYKWNYLDQYICSAGSEDFSLIESLKFWRTRFLLLPACVTATKRITEGEAHCDIYGDRPRADEDEWQLLDGFVRFVEGLNRIRRRHRSDRMMRKGTAMKGLQMTGPISTHSLESTAPPVGKKGTSALSALLEMEASQKCLGEQQAAVHGGKSSAQSAESSSVAMTPTYMDSPRKVSVDQTATPMLDGTSLGICTGQSMDRGNSQTFGNSQNIGEQGYSSTNSSDSSSQQLVASSLTSSSTLTEILEAMKHPSTGVQLLSEQKGLSPYCFISAEVVHWLVNHVEGIQTQAMAIDIMQKMLEEQLITHASGEAWRTFIYGFYFYKIVTDKEPDRVAMQQPATTWHTAGVDDFASFQRKWFEVAFVAEELVHSEIPAFLLPWLPSRPASYASRHSSFSRSFGGRSQAAALLAATVPEQRTVTLDVDVNNRTDRLEWCSCYYHGNFSLNAAFEIKLHWMAVTAAVLFEMVQGWHRKATSCGFLLVPVLEGPFALPSYLYGDPLRAQLFIPLNISCLLKEGSEHLFDSFEPETYWDRMHLFQEAIAHRFGFVQDKYSASAFNFPAENKPQYIHVTGTVFLQLPYSKRKFSGQQRRRRNSTSSTNQNMFCEERVGYNWAYNTMLTKTWRSSATGDEKFADRLLKDFTDFCINRDNRLVTFWTSCLEKMHASAP

SEQ ID NO: 181360 - DNA, 4719 bp, Artificial Sequence
  derived and/or modified sequence
atgaggacaaccaaggtctacaagttggtgatccataagaaaggcttcggaggctcagatgatgaacttgtggtaaatccaaaagtgttccctcacataaagttaggagatattgtcgagattgcccatcctaatgatgaatattctcccctgctgctgcaagtaaagagtctgaaggaggatcttcaaaaagagacaatctctgttgaccagaccgtcacccaggtttttcgtctgcggccttatcaggatgtttacgtaaatgttgtggacccgaaggatgtaaccctggacttagttgaactgacttttaaggaccagtatatcgggcggggagacatgtggcgactgaagaaatctctggtcagcacatgtgcttacatcacccaaaaagtagagtttgctggaatcagggcgcaggcaggtgaactgtgggtgaagaatgagaaggtgatgtgtggatatatctccgaggacacccgggttgtctttaggagtacctctgctatggtttatatcttcatccagatgagctgcgagatgtgggattttgacatctatggtgacttgtacttcgaaaaggccgtcaacggcttcctcgctgacctgttcactaaatggaaagaaaagaactgttcacacgaggtgacggtggtgctctttagccgtacattctatgacgccaaatccgtcgatgagtttccggagatcaatagggctagcatacgacaagaccataagggaaggttttacgaagatttctacaaggtggttgtgcagaatgaacgaagggaggagtggacttccctgttagtgaccattaagaagctgttcatacagtatcctgtgctggtgcggttagagcaagctgagggatttccgcagggagacaattccacctcggcgcaggggaattacttggaagctattaatctatcgttcaatgtctttgataaacactacatcaatcgtaacttcgatagaaccggccagatgtcagtggtaataacccccggggtcggggtcttcgaggtggaccgactgctgatgattctgacaaaacaacggatgatcgacaacgggatcggcgtcgatctcgtctgcatgggcgaacagccactccacgcagtaccactcttcaagttgcataaccgatccgccccccgggactcaagactcggagatgactacaatatcccacactggataaaccactccttctatacttccaagagtcagctgttttgcaactcttttacaccacggattaagctggctggaaagaagcccgcctcagagaaagcaaagaatggaagagatacctctctgggctctcccaaagagtcggagaacgctcttcccatacaggtggattatgacgcgtatgatgcccaggtgttccggctccctgggcccagccgggcgcaatgcctcaccacgtgtaggtcagtgcgtgaacgggagagccactcaaggaagagtgcatctagctgcgatgtgtcatccagtccttctttaccttcccgcacactccctactgaggaggtgcggtctcaggcatccgacgattcttcactcgggaagtccgccaacatcctcatgataccccatccacacctccatcagtatgaagtgtcttcaagcctgggctatacctctacacgcgacgtcttggaaaacatgatggagccccctcaaagagactcttctgcacctggaaggttccacgttggcagcgcagagtcgatgctgcacgtgagacccggcgggtatacaccccagcgtgccctgatcaatccattcgcccctagcagaatgccaatgaaattaaccagcaaccgccgccgatggatgcacacctttcccgttggaccttctggagaggccattcaaatccatcaccagacccggcagaatatggctgagttgcaaggaagcgggcagcgggatcccactcacagttcggccgagctcctcgagctcgcttatcacgaggcggctggccgccacagcaattccagacagccaggagacggcatgagttttctcaacttcagcggaactgaggaattgtcagtcgggctgcttagtaattctggtgccggcatgaacccaaggactcagaacaaagattccctcgaagatagcgtctccacctcccccgacccgatgcccggattttgctgcactgttggcgtggactggaaatccctcacaactccggcttgtctgccgctgacgacggattattttcccgataggcaaggcttacaaaacgactacactgaaggttgctacgacttgctcccggaggccgatatcgaccggagggacgaggacggggtccagatgaccgcccagcaggtttttgaggagttcatatgtcagcgcttgatgcaaggatatcagatcatcgtccaacccaagactcagaagcccaacccagccgttccaccccccctgtccagctcaccactgtattctcgggggctagtgagtaggaatagaccagaggaggaggatcagtattggttatctatgggtcggacgttccataaggtgactttgaaggataaaatgatcaccgtgactcggtacctgccaaagtacccctacgagtccgcccaaattcattacacctacagtctatgtccaagccacagcgattccgaattcgtgtcatgctgggtcgaattttcccacgaacgattggaagagtataagtggaattacctggaccagtatatctgcagtgccgggagtgaggatttttccctgatcgagtcattgaaattttggcgaacaagatttctgctgctccctgcttgcgtaacagctacgaaaagaattacagagggggaagcccactgcgatatttatggagaccgacctcgcgcagatgaggacgaatggcaacttcttgacggttttgttagatttgtagagggattgaatcgaattcgaagaagacacagatccgatcggatgatgaggaagggaacggctatgaagggactgcagatgaccggacccatcagtactcacagtctggagagtactgcgccacctgtggggaaaaaaggcacttccgccctgtccgccttactggagatggaagcatctcaaaagtgcctgggagagcaacaggctgccgtgcatggcggcaaatcctccgcccagtctgccgagtcttcatctgtggctatgacaccgacctatatggattcaccaagaaaagtttcagttgatcagacagccactcccatgttagatggcaccagtctgggtatctgtaccgggcaaagcatggacaggggtaattcacagactttcgggaacagtcagaatatcggagaacagggatatagctccactaacagcagcgattcctccagccagcaactggtcgcctcttcgcttacgtcaagctccactctgaccgagatcctagaagcaatgaagcatccttccaccggcgtgcaactgctttccgaacagaagggcctgtccccctactgtttcatttccgccgaggtggtccattggctggttaatcatgtggaagggatacaaacccaggcaatggcaatcgatataatgcagaagatgctcgaagagcagttgattacccatgcatccggagaggcttggcgaacgtttatctatggcttctatttttacaagattgtcacagacaaagagccggaccgggtggcgatgcagcagccagccactacttggcacaccgccggggtggacgattttgccagctttcagagaaaatggttcgaggtcgcattcgtggccgaagagttggttcatagcgaaattccggcgttcctgctaccttggttacccagtaggccagcgagctacgcatctagacattcctccttcagcaggtccttcggcggcaggagccaagcggcagcattgctggctgcaacggttccagaacaacgtacagtgactctggacgtagacgttaacaatagaacggaccggcttgaatggtgctcttgctattaccatgggaacttcagcctgaatgcagccttcgagattaagctccactggatggccgtgactgccgcggtgttgttcgagatggtgcaagggtggcaccgaaaagccaccagctgcggattcctactggtgcctgttttggaaggccccttcgctcttccctcttacctctatggagatcctctccgagcacagctgtttataccattgaacataagctgcctgcttaaggagggatcggagcacttattcgatagcttcgaaccagaaacttattgggacaggatgcatctctttcaggaggccatcgcccacagattcggctttgtccaggacaagtatagcgcatccgcctttaattttcccgcagagaataagccacagtacatccacgtgaccggcacggtctttttgcagctcccttatagcaagcggaaatttagcggacagcagcggcgtcggcggaactccacatcctcaacaaatcagaatatgttctgcgaagagagggtcggttataactgggcatataatactatgttgaccaagacctggagatcatcagcaacaggggacgagaagttcgcagatcgacttctcaaagattttactgatttctgcatcaatagggataaccgtctcgtgactttctggacttcctgtctggaaaaaatgcacgccagtgccccctag

SEQ ID NO: 181361 - DNA, 4719 bp, Artificial Sequence
  derived and/or modified sequence
atgcgaactaccaaagtttataagctcgtgatccataagaagggttttggcggtagcgatgacgagcttgtcgtcaacccgaaagtgttcccacacatcaaactgggcgacatcgtcgagatcgcacacccaaacgacgaatacagcccccttctccttcaggtgaagagcctgaaggaagatctacagaaggagacaatctctgtggatcagacagtcactcaggttttcagactgaggccataccaggacgtgtacgtcaacgttgtggaccctaaggatgtcaccctggacctggtcgagctgacattcaaagatcagtacatcggccggggggacatgtggagactgaagaagtccctggtttcaacttgcgcgtatattactcaaaaagtcgagtttgctggcatcagagcacaggccggggagttgtgggtgaagaacgagaaggtcatgtgcggctacatttctgaggacacaagggtcgtttttaggagtacatccgcgatggtgtatattttcatccaaatgagctgtgaaatgtgggactttgacatttacggggacttgtactttgagaaagctgtgaatggcttcctggcagatctgtttactaagtggaaagaaaagaattgtagccacgaggtcacagtggttctcttctccagaacattttatgacgccaagtcggttgatgagtttcccgaaatcaacagagcaagcattcgccaggatcataagggtcgcttctacgaagatttctacaaagtggtggtacagaacgaaaggagagaggaatggacctctctgctggtgaccattaaaaagctgtttatccaatatcccgtcctcgttcgcttagagcaggccgaagggtttccacagggggataactccacatccgcacagggtaactacctcgaggccataaatttgtcgtttaatgttttcgataagcactacatcaacaggaacttcgacagaaccggccagatgtccgtcgtgataacccccggggtgggtgtgttcgaggtggataggcttctcatgattctgacgaagcaacggatgatcgacaacggaatcggagtcgatctggtctgcatgggcgagcaacctctgcacgccgtacccctgtttaaactccacaacagaagcgccccaagagattctcgactgggggatgattataatattccacattggatcaaccatagcttctacaccagtaagagtcagctcttttgtaactcctttactcctagaatcaagctcgctggaaaaaagcctgctagtgaaaaagcaaaaaacggccgggatacctccctcggctctccaaaggaaagtgagaacgcactgcctatacaggtggattacgatgcctatgatgcgcaggtgttccggctgcccggcccttcacgggctcagtgcctgactacgtgccgcagcgtcagagagagggaatcacactcccgaaaaagcgcttcttcatgcgacgtgtcaagtagtccatctcttccatcccggaccctaccgactgaggaggtgcgttcacaggcttccgatgacagctcattgggaaagagtgctaacatactgatgattccccatcctcacctccaccagtatgaagtaagctcaagcctgggatatacaagcactcgggacgtgctagaaaacatgatggaacctccacagcgagactcttctgctccgggcaggtttcatgtcggtagtgctgagtctatgctacatgtccgacctggaggatatacaccccagagagccctaatcaatccatttgcaccctccagaatgcctatgaagctgacttccaatagaagacgctggatgcacacattcccagtggggccgagtggagaagccattcagatccatcaccagactagacaaaacatggccgaactacagggcagcggacagagagatccaacgcacagctcggctgagttattagaactcgcttaccatgaggccgccggcagacactcaaacagcagacaaccaggcgatgggatgagctttctcaactttagtggaaccgaagagctgagtgttgggctcttaagtaactctggggctggtatgaatcctcgtactcagaacaaggactcattggaagactctgtaagcactagccctgatcctatgcctggattctgctgtaccgttggggtggattggaaatccctcactacaccggcctgtttaccccttactacagattatttcccagatcgccaaggattacaaaatgactacactgaaggttgctatgatctactcccagaggctgacattgaccgccgtgatgaggacggcgttcagatgaccgcacagcaagtgttcgaagaatttatttgtcaaaggctcatgcaggggtaccagattatcgtgcagcctaagacccaaaagcctaatcccgccgtaccccctcccctgagctctagtccgctctattctagggggctggtatcccgtaaccgacccgaggaagaagatcaatattggcttagcatggggcggacgtttcataaagtcacactaaaggataaaatgatcacagtgacaagatacttacctaagtacccctatgagtccgcacaaattcattatacatacagcctctgtccgtcgcatagcgacagtgagttcgtatcttgttgggtggaattttcacatgagaggctggaagaatacaaatggaactatctggaccagtatatttgcagcgcagggtcagaggacttttctctcatcgagagcctgaagttttggagaacccgtttccttttgcttccagcctgcgttaccgccactaaacggatcacagagggggaagctcactgtgatatctatggcgataggcccagggcggatgaagatgagtggcagcttctcgatggctttgtgaggtttgttgaaggtcttaacaggatcagaaggcgacatcgctctgaccgcatgatgcggaaggggactgctatgaagggcttacagatgaccgggcccatatctactcacagtcttgagtccaccgcccctccagtaggcaagaagggtacaagcgccctcagtgcgctgctcgagatggaggcaagccagaagtgcttgggtgagcaacaagctgcggtccacggaggaaaatccagcgcacagagcgccgaaagttccagcgtcgcaatgacaccaacctatatggatagtcccaggaaggtgtccgttgaccagacggccacgccaatgctcgacgggacaagcctcggcatctgcactggccagagcatggaccgtggaaattcacagacattcggcaacagccaaaacattggtgagcaaggatactcatctactaatagtagcgattcctccagtcagcagcttgttgcctcaagtctgaccagctcatccaccttgactgaaatcctggaggccatgaaacaccccagtaccggcgtgcagttattgtcagagcagaagggattgtctccctactgctttatcagtgctgaagttgtccattggctggttaaccatgtggaggggattcagacacaagccatggccattgatatcatgcagaagatgctagaagaacaattaatcactcacgctagcggggaggcatggagaaccttcatctatggattctatttttacaaaatagtcaccgacaaggaacccgatagggtggcaatgcaacagccagctacaacatggcatacagcaggggtggatgacttcgcctcctttcagaggaaatggtttgaagtggccttcgtggccgaagaacttgtccatagcgaaatccctgcttttctcttgccatggctgcctagccggcctgcctcttacgcatcgagacacagctcctttagtcgcagcttcggcggtcggagccaggctgccgcccttctggccgcaactgttccagaacaaaggacggttacattggacgtcgatgtgaataatagaaccgataggctggagtggtgttcctgttattaccatggcaatttctcattaaatgcagctttcgagatcaagctgcattggatggcagtcaccgccgccgttctttttgagatggtgcaaggttggcaccgcaaggcgaccagctgtgggttcctacttgttccagtgctggagggccccttcgccctccccagttacctatacggggatcctctgagagcccagttgtttatcccactgaatatcagctgtctattgaaggaagggagcgaacacctctttgattcgttcgagccggaaacctactgggacaggatgcatctcttccaggaagcaattgctcaccggttcggcttcgtgcaggacaaatatagcgctagcgcatttaacttccccgcggagaataagccacagtacatccacgtgaccggcacagtttttctgcaactgccgtattctaagaggaagttcagcggacaacaacgccggcgccgtaattccacatcctctacaaatcagaacatgttctgtgaggagagggtgggttacaactgggcctacaatacaatgttaaccaagacatggaggagcagcgccacgggggacgagaaattcgccgaccgcctgctgaaggatttcaccgatttctgcattaaccgcgacaatagattagtgactttttggaccagttgcctggaaaagatgcacgcaagcgctccctag

SEQ ID NO: 181362 - DNA, 4719 bp, Artificial Sequence
  derived and/or modified sequence
atgaggaccaccaaggtgtacaagctggtgatccacaagaagggctttggaggcagtgatgatgagctggtggtgaaccccaaggtgttcccccacatcaagctgggggacatcgtggagatcgcccaccccaatgatgagtacagccccctgctgctgcaggtgaagagcctgaaggaggacctgcagaaggagaccatctctgtggaccagacagtgacccaggtgttccggctgcggccctaccaggatgtgtatgtgaatgtggtggaccccaaggatgtgaccctggacctggtggagctgaccttcaaggaccagtacatcggccgcggggacatgtggaggctgaagaagagcctggtgtccacctgtgcctacatcacccagaaggtggagtttgctggcatccgggcccaggccggggagctgtgggtgaagaatgagaaggtgatgtgtggctacatcagcgaggacaccagggtggtgttccgcagcaccagcgccatggtgtacatcttcatccagatgagctgtgagatgtgggactttgacatctatggagacctgtactttgagaaggctgtgaatggcttcctggccgacctcttcaccaagtggaaggagaagaactgcagccatgaggtgacagtggtgctcttcagcaggaccttctatgatgccaagtctgtggatgagttccctgagatcaacagagccagcatccggcaggaccacaagggccgcttctatgaggacttctacaaggtggtggtgcagaatgaaagaagagaggagtggaccagcctgctggtgaccatcaagaagctgttcatccagtaccctgtgctggtgcggctggagcaggccgagggcttcccccagggcgacaacagcaccagcgcccagggcaactacctggaggccatcaacctgtccttcaacgtgtttgacaagcactacatcaacagaaactttgacagaacaggccagatgtctgtggtgatcaccccaggagtgggcgtgtttgaggtggaccggctgctgatgatcctgaccaagcagaggatgattgacaatggcatcggcgtggacctggtgtgcatgggagagcagcccctgcatgctgtgcccctcttcaagctgcacaacagaagtgccccccgggacagccggctgggagatgactacaacatcccccactggatcaaccacagcttctacaccagcaagagccagctgttctgcaacagcttcaccccccgcatcaagctggccggcaagaagccagccagcgagaaggccaagaatggccgggacaccagcctgggcagccccaaggagagtgaaaatgccctgcccatccaggtggactatgatgcctatgatgcccaggtgttccggctgcccggccccagccgggcccagtgcctgaccacctgccgctctgtgcgggagcgggagagccacagcaggaagagcgccagcagctgtgatgtgagcagcagccccagcctgcccagcaggaccctgcccacagaggaggtgcgcagccaggccagtgatgacagcagcctgggcaagagcgccaacatcctgatgatcccccacccccacctgcaccagtatgaggtgagcagcagcctgggctacaccagcaccagagatgtgctggagaacatgatggagcccccccagagggacagcagcgcccctggccgcttccacgtgggcagcgctgagagcatgctgcacgtgcggcctgggggctacaccccccagagggccctgatcaacccctttgcccccagcaggatgcccatgaagctgaccagcaacagaagacgctggatgcacaccttccctgtgggccccagcggggaggccatccagatccaccaccagacccggcagaacatggccgagctgcagggcagcggccagagggaccccacccacagcagcgctgagctgctggagctggcctaccacgaggccgccggccgccacagcaacagccggcagcctggagatggcatgtccttcctgaacttcagcggcacagaggagctgtctgtgggcctgctgagcaacagcggggccggcatgaaccccaggacccagaacaaggacagcctggaggacagcgtgtccaccagcccagaccccatgcctggcttctgctgcaccgtgggcgtggactggaagagcctgaccaccccagcctgcctgcccctgaccacagactacttcccagaccggcagggcctgcagaatgactacacagagggctgctatgacctgctgcctgaggccgacatcgacagaagagatgaagatggagtgcagatgacagcccagcaggtgtttgaggagttcatctgccagaggctgatgcagggctaccagatcatcgtgcagcccaagacccagaagcccaacccagctgtgcccccacccctgagcagcagccccctgtacagccggggcctggtgtccaggaacagacctgaggaggaggaccagtactggctgtccatgggccgcaccttccacaaggtgaccctgaaggacaagatgatcaccgtgacccgctacctgcccaagtacccctatgagagcgcccagatccactacacctacagcctgtgccccagccacagcgacagcgagtttgtgtcctgctgggtggagttcagccatgagcggctggaggagtacaagtggaactacctggaccagtacatctgcagcgctggcagcgaggacttcagcctgattgagagcctgaagttctggaggacccgcttcctgctgctgcctgcctgtgtgacagccaccaagaggatcacagaaggagaggcccactgtgacatctacggggaccggcccagggcagatgaagatgagtggcagctgctggatggctttgtgcgctttgtggagggcctgaaccgcatcagaagaagacacagaagtgacaggatgatgaggaaaggaacagccatgaagggcctgcagatgacaggccccatcagcacccacagcctggagagcacagcccctcctgtgggcaagaagggcaccagcgccctgagcgccctgctggagatggaggccagccagaagtgcctgggggagcagcaggccgctgtgcatggaggcaagagcagcgcccagagcgctgagagcagctctgtggccatgacccccacctacatggacagccccaggaaggtgtctgtggaccagacagccacccccatgctggatggcaccagcctgggcatctgcaccggccagagcatggaccggggcaacagccagacctttggaaacagccagaacattggagagcagggctacagcagcaccaacagcagtgacagcagcagccagcagctggtggccagcagcctgaccagcagcagcaccctgacagagatcctggaggccatgaagcaccccagcactggagtgcagctgctgtctgagcagaagggcctgagcccctactgcttcatctctgctgaggtggtgcactggctggtgaaccacgtggagggcatccagacccaggccatggccatcgacatcatgcagaagatgctggaggagcagctgatcacccacgccagcggggaggcctggaggaccttcatctacggcttctacttctacaagatcgtgacagacaaggagccagacagagtggccatgcagcagcctgccaccacctggcacacagctggggtggatgactttgccagcttccagaggaagtggtttgaggtggcctttgtggccgaggagctggtgcacagcgagatcccagccttcctgctgccctggctgcccagcaggcctgccagctatgccagccgccacagcagcttcagccgcagctttggaggccgcagccaggccgccgccctgctggccgccaccgtgcctgagcagaggacagtgaccctggatgtggatgtgaacaacagaacagaccggctggagtggtgcagctgctactaccacggcaacttcagcctgaatgctgcctttgagatcaagctgcactggatggctgtgacagctgctgtgctgtttgagatggtgcagggctggcacaggaaggccaccagctgtggcttcctgctggtgcctgtgctggagggcccctttgccctgcccagctacctgtatggagaccccctgcgggcccagctgttcatccccctgaacatcagctgcctgctgaaggagggcagcgagcacctgtttgacagctttgagcctgagacctactgggacaggatgcacctgttccaggaggccatcgcccacagatttggatttgtgcaggacaagtacagcgccagcgccttcaacttccctgctgagaacaagccccagtacatccacgtgactggaacagtgttcctgcagctgccctacagcaagaggaagttcagcggccagcagaggagaagaagaaacagcaccagcagcaccaaccagaacatgttctgtgaggagcgggtgggctacaactgggcctacaacaccatgctgaccaagacctggaggagcagcgccactggagatgagaagtttgctgaccggctgctgaaggacttcacagacttctgcatcaacagagacaaccggctggtgaccttctggaccagctgcctggagaagatgcacgccagcgccccctag

SEQ ID NO: 181363 - DNA, 4719 bp, Artificial Sequence
  derived and/or modified sequence
atgcggaccaccaaggtgtacaagctggtgatccacaagaagggctttggagggtctgatgatgaactcgtcgtcaatccaaaggtttttccccacatcaagttgggcgacattgtcgaaattgcccaccctaacgatgagtactcacccttactgcttcaagttaaaagccttaaggaggatttacaaaaagaaacaatttctgtggaccagaccgtgacgcaggtgtttaggctgcggccctaccaagacgtgtacgtcaatgttgtcgaccccaaggacgtaaccctcgatctggtagaactgacatttaaagatcagtatatagggcgcggcgacatgtggaggctgaagaaaagcctcgtgtccacctgcgcttatatcacccagaaagtggagttcgccggcattcgcgcccaggccggggaactgtgggtgaaaaatgaaaaggtcatgtgtggatatatttctgaagacacgagagtagtattccggtccacctccgcaatggtttacatcttcatccagatgtcgtgtgagatgtgggattttgacatctatggggatttgtatttcgagaaagcggtcaatgggttcctcgctgatttgttcaccaagtggaaagagaagaactgtagccatgaagttaccgtggtgctcttttctcgaactttctacgatgctaagagcgtcgacgagttccccgagatcaatcgggcgtctatacgccaagaccacaaggggcgattctatgaagacttctataaagtcgtggtccagaacgagagaagggaagagtggacttctctcctcgttacaattaaaaaactcttcattcagtatccagtcctcgtacggcttgagcaagccgaaggatttccccagggtgataattccacctctgcccaggggaattacctcgaagccatcaatttatccttcaatgtgttcgataaacactacatcaacagaaatttcgatagaacagggcaaatgtctgtggtgatcacccccggtgttggggtttttgaagtggaccgcttattaatgatcctgacaaaacaaagaatgatcgacaacgggatcggcgtggacctcgtgtgtatgggtgagcaaccacttcacgctgtgcccttgtttaaacttcacaatcgtagcgccccccgagactctcggctcggggatgattacaatataccccattggattaatcacagcttctacacttctaaaagtcaactgttttgcaatagttttacccctcgcatcaaactggccggtaagaagccggccagcgagaaggcaaaaaacggacgtgatacaagcctgggatctcccaaggagtctgagaacgccctgccgatccaagtggactatgacgcttatgatgcgcaagtatttcgcctccccggcccctccagggcccagtgtcttacaacctgccgaagtgttagagagagggaatcccatagtcggaagagcgcgtctagctgtgacgtcagttcatctccatcattgccttcacgcacactgcccaccgaggaggtacgctctcaggccagtgacgacagctctctcggcaagagcgccaacattctaatgattccacacccacacttacaccaatacgaagtttcctcttccctcggatatacgtccactcgcgacgtgcttgaaaatatgatggagcctccccaaagggattccagtgcacctggaaggtttcatgtggggtctgctgagagcatgctgcatgtgcggcctggcggatacacaccccagagagcactgattaacccatttgctccctccaggatgcccatgaaactgaccagcaacagacgccggtggatgcacaccttccctgtgggaccttcgggagaggcgatacagatccatcatcagaccagacagaacatggcggaattacaaggtagtggacaacgagatcccacccactcaagtgccgaactgcttgagttggcttatcatgaggccgccggccggcatagcaattctcggcagccaggtgatggcatgtccttcctgaacttttctgggacggaagagctgtctgtgggccttttatcgaatagcggcgccgggatgaatcctagaacacagaataaggattcgttagaagactcagtgtctaccagcccagatcccatgcctggcttttgctgcactgtcggcgtagactggaagagcctgacaactcctgcatgtctcccactcacaactgactattttcctgatagacagggactgcagaatgactacacggaaggatgctatgatctgctccccgaagccgacattgacagacgggatgaggatggcgtccaaatgactgcccagcaagtattcgaggaatttatttgtcagagattaatgcaaggataccaaattatcgttcagcctaagacccagaagcctaacccagctgtaccgccgcccctaagctcatcccctttgtatagcaggggtctggtatcccgcaaccgccccgaagaagaggaccagtactggctcagcatgggccggacctttcacaaagtgactctcaaggataaaatgatcactgtaacccgttacctccctaagtacccctatgagtcagcccaaattcactacacgtactctctgtgcccctctcattcggattcagagttcgtttcctgttgggtggaattcagccacgagcgtctggaggagtacaaatggaactatctcgatcagtacatctgcagcgctgggagcgaggatttctccctgatcgagagtcttaaattctggcgtaccaggttcttgctgctgccagcttgtgtgactgctacgaagcgcatcacagaaggggaggcccactgtgatatctacggcgaccggcctcgggcagacgaagacgaatggcagctactcgacggcttcgtaaggtttgtggagggtttaaataggattcgccgcaggcaccgcagtgatcggatgatgagaaagggtactgcaatgaagggccttcagatgactggacccatcagcacacatagcctcgagagcaccgcaccacctgttggtaaaaagggcacctctgctttatcagccctgctggagatggaagcttcccagaagtgcctgggggagcagcaggccgctgtgcatggaggaaaatccagtgcccagtctgccgagtcatcaagtgtggctatgacccccacatacatggactcccccagaaaagtcagcgtggaccaaactgccacccctatgctggacgggactagtctcggcatatgtactgggcagagtatggaccgagggaatagtcaaacattcgggaactcccaaaatataggagaacagggttatagtagcacaaacagctctgactcaagcagccagcagctcgtagccagctcgcttacaagctcttctacgctgactgaaatcctggaggccatgaaacatcccagtactggtgtccagcttttgtccgagcaaaaaggactctcaccttactgttttatctccgccgaagtcgtccattggttggtgaaccatgtagaagggattcagacccaggcaatggctatcgacatcatgcagaagatgctggaggagcaattaattacccatgcttccggcgaggcatggaggactttcatttacggcttctacttttacaaaattgtgacagataaggaaccagaccgtgtcgcaatgcagcaacctgcaactacatggcatacagctggcgtagatgacttcgccagcttccaacggaaatggtttgaagttgccttcgttgccgaggaactggtgcacagtgagatccctgcgttcttattaccgtggctgccatctagacccgcctcctatgcttccaggcattcaagttttagccggagcttcggagggcgcagccaggccgccgcacttctggcagctactgtaccagagcaacggaccgtcacacttgacgttgatgtcaataatcgcacagacagactcgaatggtgttcatgctactaccacggaaacttcagcttgaacgcagcttttgaaatcaaactccactggatggcggtcacagcagcagttttattcgagatggtgcagggctggcataggaaggctaccagttgtggctttcttctcgtccccgtgctggaaggcccattcgccctacccagttatctgtacggggaccccctaagggcccaactgtttataccactgaacatcagttgtctgctgaaggaaggatccgaacacttgtttgactcattcgagcctgaaacttattgggatagaatgcatctgtttcaggaggccattgctcatcgatttggattcgtccaggataaatacagcgcatcggcttttaactttcccgctgaaaataaaccccagtatatccacgtgacaggcaccgttttcttacaactgccctacagcaagcgcaaattttcaggtcaacagagacgacgtaggaactccacgtctagcacaaaccaaaacatgttttgcgaggaacgagtcgggtataattgggcttataatactatgctgacgaagacatggcgctctagcgcaaccggagatgaaaagttcgccgatcggctgttaaaggactttacagacttttgcatcaatcgcgataacagactggttacattctggacaagctgcctcgaaaagatgcacgcgagcgcaccgtag

SEQ ID NO: 181364 - DNA, 4719 bp, Artificial Sequence
  derived and/or modified sequence
atgcggaccaccaaggtgtacaagctggtgatccacaagaagggcttcggtgggagtgacgacgaactagtggtgaatccaaaagtctttccgcatatcaagctgggcgatatcgtcgaaattgcccaccccaacgacgaatactctccgttgctcctacaggtcaagtccttaaaggaagacctgcagaaagagacaatctcagtggatcagactgttacccaagtatttagactacgcccttaccaggacgtttatgtgaatgttgtcgacccgaaagacgtgactttggacttggtggagctcactttcaaggaccagtacatcggaagaggtgacatgtggcgcctgaagaagagcctcgtgagtacatgcgcttacataactcaaaaggtcgagtttgctggaatccgggctcaagccggggaattatgggttaaaaacgaaaaagtgatgtgtggatatatctctgaggatacgagagtggtgtttcgctccacctccgccatggtgtacattttcatccagatgagctgcgagatgtgggatttcgacatctacggggatttgtactttgagaaagccgtcaacggatttttggccgatctgttcactaaatggaaagagaagaattgtagtcatgaagtgacggtcgtgctgtttagccgtacattttacgatgctaaatctgtggacgagtttcctgagattaatcgagcttccataaggcaagaccacaaaggtaggttttatgaagatttctataaggtcgtggtacagaatgaacgaagagaagagtggacgagcctgctggttaccataaagaagctgtttatacaatatcctgtgctggtgcgcctggaacaggccgaaggattcccacagggagataatagcacatctgcccagggaaactatctcgaggcaatcaacctgagtttcaacgtgtttgataaacattacataaacaggaactttgatagaactggccaaatgtccgtagtcatcactccaggggtgggggtatttgaagtcgaccggttgcttatgattctgactaaacaaaggatgatcgataacgggattggggtcgacctggtgtgtatgggggaacagcccctacatgctgtgccactctttaaacttcacaacaggtccgcccctcgagacagtagactaggagacgattataacatcccacactggatcaatcattctttctatacctctaaatcacagcttttctgcaatagcttcactccacggatcaagctggctggaaagaagcctgcgagtgaaaaagctaagaacggccgagatactagccttggaagcccgaaagagagtgagaatgcgttgcccattcaggtcgattacgacgcgtatgacgcccaggtttttcggctgcccggcccatctagggctcagtgtctgaccacttgtaggtcagtacgagagcgagagtcccactcccggaagtctgcaagctcatgtgacgtgagttcctctccaagcctgccatctcggactctgccaacggaagaggtgcgaagccaggcgtcagacgattccagccttgggaaatccgccaacattctgatgatcccacatccccatctacatcagtacgaggtgagctcatcgctgggatacacaagcacgagagacgttttggagaatatgatggagcctccacagcgtgacagcagcgctcctgggaggtttcacgtcggatcggcggagagcatgctgcacgttaggcctggaggctacactccacagcgggccctcatcaatcccttcgccccatcgagaatgcctatgaaacttacgtcaaacagacgacgatggatgcacacctttccagtgggcccttcaggcgaggcaatccagatccatcaccagacccgacaaaatatggcagaactccagggctccgggcaacgagacccaactcactcaagtgcagagcttttagagctggcttaccacgaggccgcagggagacactccaattcgcgacagccaggcgacgggatgtcttttttaaatttctcaggaaccgaggaactttctgtcggcctgctgtccaactccggcgctggcatgaatccgcgtacccagaataaggactcactggaggattcggttagtaccagccccgatcctatgcccgggttttgctgcaccgtcggggtcgattggaagagtttgaccactcccgcctgcctcccactgaccaccgactacttccctgacagacaagggctacagaacgattacacggaaggttgctatgatttgttacccgaagctgatatcgatcgaagggacgaagatggtgttcagatgaccgcacagcaggtctttgaggaattcatctgccagagactcatgcaaggataccagattattgttcagcccaaaacacagaagcctaacccagcagtgccacctcccctgtcttctagcccgctgtactcacgaggccttgtttcccgaaaccgtccagaagaggaggatcagtattggctctccatgggacgcacatttcataaggtgactttgaaggacaaaatgatcacagtgactagatatctacctaaatatccctacgaatccgcccagattcactatacctatagtctgtgcccctcccacagcgattcagagttcgtctcatgttgggtcgaattttcccatgagagacttgaggagtataaatggaactacttagaccagtatatctgttccgcagggagcgaggatttctcactgattgagtcgctaaaattttggcgaacgcgcttcctgctcttgcctgcctgtgtgactgccaccaagagaatcactgaaggcgaagcacactgtgacatttatggggataggccccgggccgacgaggatgagtggcaacttcttgacggtttcgtgcgattcgtagaaggcctgaaccgtattcgtagaagacaccgctccgatagaatgatgagaaagggcactgcaatgaaaggtctccagatgacaggcccaatttcgactcatagccttgagtctactgcacctcctgtgggcaaaaaagggacgtcagctctttctgcactactggagatggaagcctcccagaagtgcctgggagagcagcaggctgccgtgcacggggggaagagctctgcacaatcagcggagtccagctccgtggctatgacccccacatacatggatagccctcggaaagtgtcagttgaccagaccgctacccctatgctggatggaacctcccttggcatctgcactggccagtctatggatagagggaactcgcagacgtttggaaattcacaaaatatcggcgagcagggatacagttccacaaattcaagtgattcctcctcacagcagctggtggcctcctcgttgacgtcgagctcgaccctgaccgaaattctcgaagcaatgaagcacccaagcacaggtgtccaactgctgagtgagcagaaaggcttgagcccctattgtttcatcagcgctgaggtcgttcattggctggtgaatcacgtcgagggaattcagacccaagccatggcaattgacatcatgcagaagatgttggaagagcagctcattacacatgcgagcggggaggcttggcgcacttttatttatggcttttacttctacaaaatcgtcactgacaaggaacctgacagagtagcaatgcaacaaccagcaacaacctggcatactgcaggcgtggatgatttcgccagcttccagcgaaaatggtttgaagttgctttcgtggcagaggagttggtgcacagcgagatcccagcgttcctacttccttggctcccctccagaccggcgtcttacgcatcccggcactctagtttttcccggagcttcggcggcagaagtcaggcagcggcgttgctcgctgctacggtgcctgagcagagaacagtcactctggatgtcgacgtgaataacaggaccgacaggcttgagtggtgcagctgttattatcacggcaatttctcgttaaatgccgcctttgagatcaaactgcattggatggccgtaaccgctgctgtgcttttcgaaatggtgcaaggctggcacaggaaagccaccagctgcggcttcctattagtgccagtgcttgagggaccgttcgcgctaccatcctacctttacggcgaccctctgcgcgcgcagttgttcatccccctcaacatttcttgccttctaaaagaggggtctgagcacctgttcgactcctttgagcccgagacatattgggaccggatgcatcttttccaggaagcaatcgcccaccggttcggattcgtccaggacaagtatagtgcaagtgcttttaacttccccgctgagaataaaccccagtacatccacgtgacaggaaccgtcttcctgcaactgccttatagtaagcgcaaatttagcggacagcaaagacggcgccgaaacagtaccagttctacgaatcagaacatgttttgtgaagaacgggtggggtacaattgggcctacaataccatgctgacaaagacctggagatcgtctgccacaggtgacgaaaagttcgccgatcgcctgctaaaggacttcaccgatttctgcattaacagggataatcgacttgtcaccttttggacctcctgcctggagaaaatgcacgcgtcggccccctag

SEQ ID NO: 181365 - DNA, 4719 bp, Artificial Sequence
  derived and/or modified sequence
atgcgaaccacaaaagtgtataagttggtcatccacaagaaggggttcggaggatcagacgacgaactggtcgttaaccctaaggtctttccccacattaagctaggcgatatcgtggagatagcgcatccaaacgatgaatattctcctttactgctgcaggttaaatccttgaaggaggacctccaaaaggagacgatatccgtcgaccagacagtcactcaggtgttccggctcagaccgtaccaggacgtctacgtgaacgttgtggatcctaaggatgtgacccttgacctggtggagctcacattcaaagatcaatacataggtaggggggacatgtggcgactaaagaaatctctcgtgtcgacgtgtgcctatattacacagaaagttgagttcgcaggcatccgggcacaagccggtgagctgtgggttaaaaatgagaaagttatgtgtgggtacatttctgaggacactcgggtggtgtttcgctcaacatctgcaatggtatacatcttcatacagatgagctgcgagatgtgggactttgatatttacggagatttatactttgaaaaggcggttaatggctttcttgcagacttgttcactaagtggaaggagaagaactgtagccatgaagtaaccgtcgtcttgttctcccgaaccttctatgatgccaaatccgtagacgagtttcctgaaataaacagggcgagcatccgtcaagaccacaaaggtcggttctatgaggatttctataaggtcgtcgtgcagaacgaaaggcgagaagaatggacatccctgcttgtgacaatcaagaagctttttattcagtatccggttcttgtgcgcctggaacaggctgaaggattcccccagggcgacaattccactagcgcacaaggaaactacctggaggcaattaacttgtcgtttaatgtgttcgacaagcactacatcaaccggaattttgacaggacagggcagatgagtgtggtaataacccccggagtgggggtgtttgaggtagatagactactgatgattctgacaaaacaaaggatgattgataacggcattggcgtggacctggtgtgcatgggggaacagccactccacgctgttcctttatttaagctccataatcggagtgctccaagggattctcgtctcggagatgattacaacatcccacactggatcaatcattccttttacaccagcaaaagtcagctgttctgtaacagcttcaccccccgaattaaactggcgggtaaaaaacccgcttccgaaaaagccaagaacggaagagatacgtcactgggctcccccaaggagtcagagaatgcgctcccaatacaggtggattatgacgcctatgacgcgcaggtttttaggcttccgggaccatcccgggctcagtgcctcacaacttgcaggtctgtgcgcgaaagagaatcccactcaaggaaatccgccagtagctgcgatgtatcatctagtcccagccttccttccaggacattgcccacggaagaggttaggagccaggcgtccgatgactcgagtttggggaagtcagctaatatactcatgatacctcatccacacctccaccagtatgaggtctcatcctctctggggtacaccagcacaagggacgtattggagaacatgatggagcccccacagagagactcatcagctccgggtagattccacgtgggctcagccgagtctatgctgcacgtaaggcctggcggttacacgccgcagagggccttgattaatccgttcgccccttctcggatgccaatgaagttgacgtctaaccgcagaaggtggatgcacacattccccgtgggaccttcgggcgaggctatccaaattcatcaccagactcgtcagaacatggcagagttgcaggggagcggccagcgggatcccactcactcctcagccgaactcctggagctcgcatatcacgaggctgcagggcgacactcaaactcaaggcaaccgggagacggcatgtcttttttaaacttcagcggaactgaagaactttccgtcggactccttagcaactcgggagccggaatgaaccctcggacccagaacaaggattccctggaggattccgtgagcacaagccccgaccccatgcccggattttgctgtacggtcggcgtcgattggaagtccctcaccactccagcctgtctgcctctgaccacagactatttccccgatcggcagggattgcagaacgattataccgagggatgctatgacctgcttcccgaagctgacatagaccgcagagatgaggatggcgtgcagatgacagcccagcaagtttttgaagagtttatctgtcagcgtctgatgcaaggttaccaaatcattgtgcagccaaagacccagaagcccaaccctgcggttcccccacctctgtcgtcatctcccctctatagtcgaggactggtcagcaggaacagacccgaagaggaagaccagtactggttgagcatggggagaaccttccacaaagtgacccttaaggacaagatgatcaccgtaactaggtatctaccaaaatacccttacgagagcgctcagatccactacacctattctttgtgcccctcccattcagactcagagtttgtatcctgctgggttgaattcagtcatgagcgcctggaagagtacaagtggaattatttagaccagtatatctgttctgctgggagtgaggactttagcctcattgagtcactgaaattctggagaacacgcttcctgctcctgccagcctgcgttactgctaccaaacggataaccgagggggaagcccattgcgatatctatggtgacaggcctcgggcagacgaggacgagtggcagctcttagatggcttcgtgcggtttgtggagggtcttaacaggattaggcgtagacaccgctctgaccggatgatgcggaaaggcacggcaatgaaaggtttgcaaatgacaggacccatatcaactcattcactcgagtctaccgctccccctgtgggaaagaagggcacatccgctctgagcgcgttgctggagatggaagcaagtcagaagtgcctaggtgagcagcaggccgctgtacatggtggaaaaagttcagcccagtcagccgagagcagtagtgttgccatgactcccacatatatggacagtccaagaaaggtcagcgtagatcagacggccacaccaatgctcgatgggacctcactcggcatctgcacgggccaaagcatggacagggggaattcccagaccttcggtaacagtcagaatattggggaacaagggtactcttctactaattcctctgattcctcctcacagcagctggttgcttcatccctcacttccagctcaacgttgactgaaatattggaagccatgaaacaccctagtacaggggtccaactgctgtccgaacagaagggcctgtctccgtactgcttcatcagcgccgaggttgtgcactggttggtgaaccatgtggagggtatacagacccaagcgatggctatcgatattatgcaaaagatgttagaagaacaactgatcacacatgcctcgggagaggcctggaggaccttcatctacggcttctacttttataaaattgttaccgataaggaacctgatcgagtcgctatgcagcagccagccacgacatggcacaccgcaggcgtggacgatttcgcaagttttcagcgcaaatggtttgaagtagcctttgtggcggaggaattggtacattccgaaattccagccttcctccttccctggctgccatcgcggcctgcctcttatgcctcccgccactcttcattctcacgcagcttcggcggaagatcgcaggccgcagccctgcttgccgctacggtgcccgagcagagaacagtcaccctcgatgtggacgtcaacaatcggacagatcggctggagtggtgctcctgctattaccacggaaacttcagtttgaatgccgcttttgagatcaagctgcactggatggcggtgacggctgccgtactgttcgaaatggttcagggatggcacaggaaagctacgagttgcggattcctcctggtccctgtgcttgagggccctttcgcattaccaagctacctttatggggaccccctgcgcgcacagctgtttatacccctgaacatttcttgtctcctgaaggaaggatccgaacacctcttcgatagctttgaacccgaaacatactgggaccggatgcacctgtttcaagaggccattgcacaccggtttggctttgttcaggataaatattccgcgtccgctttcaatttccctgccgagaataagcctcagtatatccacgttactggcaccgtgtttttgcagctcccctattcaaagcggaagtttagtggacaacagaggcgaaggagaaattccacttcatctaccaatcagaacatgttctgcgaggagcgcgtgggttacaattgggcatacaacaccatgttgactaagacctggaggtcctctgccacaggtgatgaaaaattcgccgatcggctgctgaaagatttcactgacttttgcattaatcgcgataatcggcttgtgacgttctggacctcttgtttggaaaaaatgcatgcgtccgcaccatag

SEQ ID NO: 181366 - DNA, 4719 bp, Artificial Sequence
  derived and/or modified sequence
atgagaaccacgaaggtgtataaattggtgattcataagaaaggctttggcggtagtgatgacgagctggtggtcaacccgaaagtgtttcctcacatcaagctcggtgacatcgtagaaattgcacatcctaatgatgaatattctcctctccttttgcaggtgaaatctctaaaagaggatttgcagaaagaaactatatctgtggatcagaccgtaacacaggtgttccgcttgcgtccatatcaagatgtgtatgtgaacgtggtcgaccctaaagatgtgactctagacctcgtggaacttaccttcaaagatcagtacatcgggaggggagatatgtggaggcttaagaagtcgttagtgtctacttgcgcgtatatcactcagaaggttgagtttgctgggatcagggctcaggccggtgagctgtgggtgaaaaatgagaaggtgatgtgcggctacatctcggaagacactagagttgttttccggtcaacatccgctatggtgtatatattcattcagatgtcctgcgagatgtgggactttgatatctatggcgacctgtatttcgaaaaagctgttaatgggtttctcgctgacttgttcacaaagtggaaagagaaaaattgctcccatgaagtgacagttgtcctattctccaggactttttatgacgccaagtctgtggatgagtttcctgagataaacagggctagtatcagacaagatcacaagggccgtttctacgaagatttctacaaggttgtggttcagaatgaacgtcgcgaagagtggaccagcttgcttgtgacgataaagaagcttttcattcagtacccagtactggtgcgtttggagcaggccgaaggctttcctcaaggtgataatagcacatcggcccagggcaactacctggaggctatcaatctgagttttaacgtatttgacaaacattatatcaatcggaatttcgacaggaccgggcaaatgagcgttgtcattacccccggagtaggagtcttcgaggttgacaggctgttgatgattctcacgaaacagcgaatgattgacaacgggattggcgtagacttggtttgcatgggggaacagccgctgcacgcagtcccattgttcaaattgcataaccgctccgccccaagggactcgcggctgggcgatgactataatatccctcactggatcaaccactccttttacacctcaaaaagccaattgttttgtaatagctttaccccaagaattaagctcgccggaaagaaacctgcttcagaaaaggccaagaatggccgagatactagcctgggctctcctaaggagagtgaaaacgccttacccattcaggttgactatgacgcctacgacgcccaggtttttcgtttaccgggaccatccagagcacagtgccttaccacctgtcgtagcgtgagggagagagaatctcacagcagaaaatccgcgagttcctgtgacgtgagcagtagcccttcgttaccctccaggacactaccaacagaggaggtacgaagccaggctagcgacgattcctctctgggaaaatcagctaatatcctaatgatcccacacccccatctccatcagtacgaggtctccagttccttaggttatacctccaccagagatgtccttgaaaacatgatggaaccaccccagagagattcgagcgcacccggaagatttcatgtcggctcagccgaatctatgctgcatgtgcgaccgggaggctacacaccccagagagcactgattaatccctttgctccatcccgcatgccaatgaagctgacgagcaatcgccgtcgctggatgcatacttttcccgtgggaccatctggagaggcaattcagatccatcaccaaacacggcagaatatggccgaactgcaagggtccgggcagcgggatcctactcattcttcggccgaattattggagttggcttatcatgaggctgcgggtcgccattccaactcacgacagcccggagacggcatgtccttcctgaacttctctggcacagaagaactgagcgttggactactttcaaattctggtgctggtatgaatcctagaactcagaacaaggactccctcgaggacagcgtgagcacttctcctgatccaatgccagggttctgttgcacagtcggggttgactggaagagcctgacaacacctgcctgtttgccacttactaccgattacttccccgatagacaagggctccaaaacgactacacagagggatgctacgacctgctgccagaagcggacatcgaccggagggacgaggatggcgtccaaatgacagcgcaacaggtgtttgaggagttcatatgccagaggttgatgcagggctaccagatcattgttcagccaaaaacacaaaaaccaaacccagccgtacccccacctctgagttcaagccctctttattctcgtggactagtaagtcggaaccgcccagaagaagaggaccagtattggctcagtatggggcgtactttccataaagtcaccctgaaggataaaatgattaccgttacaaggtacctgcccaaatacccatacgagtcagcccagatccactacacttactctctctgtccatcacatagtgattcagagtttgtctcttgttgggtggagttcagccacgagagactcgaggaatacaaatggaattatcttgatcagtatatttgttccgccggttccgaggatttttctctcattgagtcattaaaattctggagaactaggtttttgttgttacccgcttgcgtcactgcgacaaagaggattaccgaaggggaggcccactgcgatatctatggtgaccggccacgcgcagacgaggatgaatggcagctgctcgacggattcgtacgctttgttgagggcctgaaccgtattagacggaggcacagatcagaccgtatgatgcgtaaagggaccgcaatgaaaggccttcagatgaccggtccgataagcacacactctctcgaaagtacagcgccacctgtcggcaaaaaagggacttctgccctgtctgccctcctcgagatggaggcatcccaaaaatgtttgggcgaacagcaagccgctgtgcatggaggaaagtccagtgcacagtccgctgagagttctagtgtcgctatgacacctacgtacatggactcacccagaaaggtgtcagtagatcagaccgccacacctatgttggatggtacttcactcgggatttgtaccggacagagcatggacaggggtaattcgcaaacgttcggcaatagtcaaaacataggagaacaggggtatagttccacgaactcctctgatagctccagccagcagttggtggcatctagcttgacctcatccagtacactgacagaaatcttggaagccatgaagcaccccagtactggcgttcagctgctatcagagcagaaaggcctctcaccctactgcttcatttctgccgaggttgtacactggctggtcaaccacgtggaggggattcaaacacaggcaatggcaatcgatatcatgcaaaaaatgctcgaagagcagctgatcactcacgccagcggcgaggcctggaggacattcatctatggattttatttctacaagatcgttacagacaaagaacccgaccgagtcgcaatgcagcagcccgcaaccacgtggcataccgcaggagtggatgactttgcaagttttcagcgcaaatggtttgaggtggcctttgtggcggaagagttggtgcacagcgagatacctgcattcttgttgccatggctgccgtcaaggccagcctcctacgcttctcggcatagctccttcagtagatctttcggaggacgcagtcaagcagccgcacttctggctgctacagtgccggaacagagaaccgtaactctagacgttgatgtcaataaccgcaccgaccgactcgagtggtgtagctgctattatcatgggaacttttcgcttaatgctgcgttcgaaatcaagcttcattggatggccgtgaccgccgctgtcctattcgaaatggtacaaggatggcaccgcaaggcaacttcctgcgggtttcttctggtgcccgttctcgaaggaccattcgccttaccaagctatctatacggagatcctctccgcgctcagctgtttatcccattgaacatatcatgcctcctgaaggaaggatccgaacacctcttcgactcatttgaaccagaaacatactgggacagaatgcacctgttccaagaggccatcgcacacagattcggcttcgttcaggataagtatagcgccagtgcattcaattttcccgcagaaaacaaaccacagtacatccacgtcacaggcaccgtgttcctgcagctgccatatagcaagaggaagttttcagggcagcagcgccgtcgacgaaattccacatccagtactaaccagaacatgttctgcgaagaacgagtcggatacaattgggcgtacaacaccatgctaactaagacgtggcgctcaagcgctacaggcgatgaaaagtttgcagataggttgctgaaggattttaccgatttctgcattaaccgagataatcggctcgtgaccttttggacatcatgtttggaaaaaatgcacgcctctgccccttag

SEQ ID NO: 181367 - DNA, 4719 bp, Artificial Sequence
  derived and/or modified sequence
atgagaaccaccaaggtgtacaagctggtgatccacaagaagggcttcggcggcagcgacgacgagctggtggtgaaccccaaggtgttcccccacatcaagctgggcgacatcgtggagatcgcccaccccaacgacgagtacagccccctgctgctgcaggtgaagagcctgaaggaggacctgcagaaggagaccatcagcgtggaccagaccgtgacccaggtgttcagactgagaccctaccaggacgtgtacgtgaacgtggtggaccccaaggacgtgaccctggacctggtggagctgaccttcaaggaccagtacatcggcagaggcgacatgtggagactgaagaagagcctggtgagcacctgcgcctacatcacccagaaggtggagttcgccggcatcagagcccaggccggcgagctgtgggtgaagaacgagaaggtgatgtgcggctacatcagcgaggacaccagagtggtgttcagaagcaccagcgccatggtgtacatcttcatccagatgagctgcgagatgtgggacttcgacatctacggcgacctgtacttcgagaaggccgtgaacggcttcctggccgacctgttcaccaagtggaaggagaagaactgcagccacgaggtgaccgtggtgctgttcagcagaaccttctacgacgccaagagcgtggacgagttccccgagatcaacagagccagcatcagacaggaccacaagggcagattctacgaggacttctacaaggtggtggtgcagaacgagagaagagaggagtggaccagcctgctggtgaccatcaagaagctgttcatccagtaccccgtgctggtgagactggagcaggccgagggcttcccccagggcgacaacagcaccagcgcccagggcaactacctggaggccatcaacctgagcttcaacgtgttcgacaagcactacatcaacagaaacttcgacagaaccggccagatgagcgtggtgatcacccccggcgtgggcgtgttcgaggtggacagactgctgatgatcctgaccaagcagagaatgatcgacaacggcatcggcgtggacctggtgtgcatgggcgagcagcccctgcacgccgtgcccctgttcaagctgcacaacagaagcgcccccagagacagcagactgggcgacgactacaacatcccccactggatcaaccacagcttctacaccagcaagagccagctgttctgcaacagcttcacccccagaatcaagctggccggcaagaagcccgccagcgagaaggccaagaacggcagagacaccagcctgggcagccccaaggagagcgagaacgccctgcccatccaggtggactacgacgcctacgacgcccaggtgttcagactgcccggccccagcagagcccagtgcctgaccacctgcagaagcgtgagagagagagagagccacagcagaaagagcgccagcagctgcgacgtgagcagcagccccagcctgcccagcagaaccctgcccaccgaggaggtgagaagccaggccagcgacgacagcagcctgggcaagagcgccaacatcctgatgatcccccacccccacctgcaccagtacgaggtgagcagcagcctgggctacaccagcaccagagacgtgctggagaacatgatggagcccccccagagagacagcagcgcccccggcagattccacgtgggcagcgccgagagcatgctgcacgtgagacccggcggctacaccccccagagagccctgatcaaccccttcgcccccagcagaatgcccatgaagctgaccagcaacagaagaagatggatgcacaccttccccgtgggccccagcggcgaggccatccagatccaccaccagaccagacagaacatggccgagctgcagggcagcggccagagagaccccacccacagcagcgccgagctgctggagctggcctaccacgaggccgccggcagacacagcaacagcagacagcccggcgacggcatgagcttcctgaacttcagcggcaccgaggagctgagcgtgggcctgctgagcaacagcggcgccggcatgaaccccagaacccagaacaaggacagcctggaggacagcgtgagcaccagccccgaccccatgcccggcttctgctgcaccgtgggcgtggactggaagagcctgaccacccccgcctgcctgcccctgaccaccgactacttccccgacagacagggcctgcagaacgactacaccgagggctgctacgacctgctgcccgaggccgacatcgacagaagagacgaggacggcgtgcagatgaccgcccagcaggtgttcgaggagttcatctgccagagactgatgcagggctaccagatcatcgtgcagcccaagacccagaagcccaaccccgccgtgcccccccccctgagcagcagccccctgtacagcagaggcctggtgagcagaaacagacccgaggaggaggaccagtactggctgagcatgggcagaaccttccacaaggtgaccctgaaggacaagatgatcaccgtgaccagatacctgcccaagtacccctacgagagcgcccagatccactacacctacagcctgtgccccagccacagcgacagcgagttcgtgagctgctgggtggagttcagccacgagagactggaggagtacaagtggaactacctggaccagtacatctgcagcgccggcagcgaggacttcagcctgatcgagagcctgaagttctggagaaccagattcctgctgctgcccgcctgcgtgaccgccaccaagagaatcaccgagggcgaggcccactgcgacatctacggcgacagacccagagccgacgaggacgagtggcagctgctggacggcttcgtgagattcgtggagggcctgaacagaatcagaagaagacacagaagcgacagaatgatgagaaagggcaccgccatgaagggcctgcagatgaccggccccatcagcacccacagcctggagagcaccgccccccccgtgggcaagaagggcaccagcgccctgagcgccctgctggagatggaggccagccagaagtgcctgggcgagcagcaggccgccgtgcacggcggcaagagcagcgcccagagcgccgagagcagcagcgtggccatgacccccacctacatggacagccccagaaaggtgagcgtggaccagaccgccacccccatgctggacggcaccagcctgggcatctgcaccggccagagcatggacagaggcaacagccagaccttcggcaacagccagaacatcggcgagcagggctacagcagcaccaacagcagcgacagcagcagccagcagctggtggccagcagcctgaccagcagcagcaccctgaccgagatcctggaggccatgaagcaccccagcaccggcgtgcagctgctgagcgagcagaagggcctgagcccctactgcttcatcagcgccgaggtggtgcactggctggtgaaccacgtggagggcatccagacccaggccatggccatcgacatcatgcagaagatgctggaggagcagctgatcacccacgccagcggcgaggcctggagaaccttcatctacggcttctacttctacaagatcgtgaccgacaaggagcccgacagagtggccatgcagcagcccgccaccacctggcacaccgccggcgtggacgacttcgccagcttccagagaaagtggttcgaggtggccttcgtggccgaggagctggtgcacagcgagatccccgccttcctgctgccctggctgcccagcagacccgccagctacgccagcagacacagcagcttcagcagaagcttcggcggcagaagccaggccgccgccctgctggccgccaccgtgcccgagcagagaaccgtgaccctggacgtggacgtgaacaacagaaccgacagactggagtggtgcagctgctactaccacggcaacttcagcctgaacgccgccttcgagatcaagctgcactggatggccgtgaccgccgccgtgctgttcgagatggtgcagggctggcacagaaaggccaccagctgcggcttcctgctggtgcccgtgctggagggccccttcgccctgcccagctacctgtacggcgaccccctgagagcccagctgttcatccccctgaacatcagctgcctgctgaaggagggcagcgagcacctgttcgacagcttcgagcccgagacctactgggacagaatgcacctgttccaggaggccatcgcccacagattcggcttcgtgcaggacaagtacagcgccagcgccttcaacttccccgccgagaacaagccccagtacatccacgtgaccggcaccgtgttcctgcagctgccctacagcaagagaaagttcagcggccagcagagaagaagaagaaacagcaccagcagcaccaaccagaacatgttctgcgaggagagagtgggctacaactgggcctacaacaccatgctgaccaagacctggagaagcagcgccaccggcgacgagaagttcgccgacagactgctgaaggacttcaccgacttctgcatcaacagagacaacagactggtgaccttctggaccagctgcctggagaagatgcacgccagcgccccctag

SEQ ID NO: 181368 - DNA, 5296 bp, Artificial Sequence
  derived and/or modified sequence
gaggcaagatgacttctctgccccaagcttggaacagctaaagggaaaaacagtgcaagatgagaacaacaaaggtctacaaactcgtcatccacaagaagggctttgggggcagtgatgatgagctagttgtgaaccccaaagtgttccctcacatcaagcttggagacattgtagagattgcacaccccaacgatgaatacagccctctgcttttgcaggtcaagtctcttaaggaagatttacagaaggaaactatcagtgtggaccagactgtgactcaagtgttccggctgagaccttatcaggatgtctatgttaatgtcgtagaccctaaggatgtgacccttgacctagtggaattaacttttaaggatcagtatattggccgtggggatatgtggcgactaaagaaaagtttggtcagcacatgtgcctatatcacccagaaggtggagtttgctggcatcagagcacaggctggtgaactgtgggttaagaatgagaaggtcatgtgtggctacatcagtgaagataccagggtggtgtttcgttctacgtcggctatggtttacatatttattcagatgagctgtgaaatgtgggattttgatatttatggggatttgtattttgagaaagctgtgaatggtttccttgctgatctatttaccaagtggaaggagaagaactgtagtcatgaagtgacagtggtcctgttttctagaactttctatgatgcaaaatctgttgatgaatttcctgaaataaaccgagcctcaattcgacaggatcacaaggggagattctatgaagacttttacaaagtggtggtgcagaatgagagaagagaagaatggacttcacttctcgtaaccattaaaaaactcttcatccagtatccagtgttggtgcgactggaacaggcagagggctttcctcaaggagataattctacctcagcacaaggaaactacctggaggccatcaatctgtcattcaatgtgtttgataagcactacatcaaccgcaactttgaccgaactgggcagatgtcagtggtgatcacgcccggggtgggtgtctttgaagtggaccgcctactcatgatcctgaccaagcagcggatgatagataatggaattggtgtggatttggtgtgcatgggagagcaaccgttacatgctgtcccattgttcaagctccataatcggagtgctccccgtgattctcgtctgggcgatgactataatatccctcactggataaaccacagtttctacacatccaaaagccagctcttttgtaatagtttcaccccacgaataaaactggcaggaaagaagcccgcctctgagaaagcaaaaaatggccgtgatacatctctcgggagtccaaaagaatctgagaacgcccttcccatccaagtagattatgacgcctatgacgctcaagtgttcaggctgcccggcccatcccgggcccagtgcctcaccacctgcagatctgtgcgagagcgagagagtcacagtcgaaagagtgccagctcctgtgatgtttcatccagcccttccctaccaagccgcacactgcccactgaggaagtgaggagccaggcttctgacgacagctccctaggcaagagtgccaacatcctgatgatcccacacccccacctgcaccagtatgaagtcagcagctccttgggatacaccagcactcgagatgtcctggagaacatgatggagccaccacagcgagactccagtgcaccagggaggtttcacgttggcagtgcagaatccatgctgcatgttcgacctggtggatacacgccccagagagcactgattaaccccttcgctccctctcggatgcccatgaagcttacgtccaacagaaggcgctggatgcacacttttcctgtggggccatccggagaagccatccagatccaccaccagacccgacagaatatggcggagctacaaggcagcgggcagagggatccaactcactcctctgcagagctgctggagttagcatatcatgaagctgctggaaggcacagcaattcccgccagcctggtgacggcatgtccttcttgaacttcagtggaacagaggagctttctgtcggcctgcttagcaacagtggtgcaggtatgaatcctaggacccagaataaggattctctagaggacagtgtttctacctctccagacccaatgccaggcttctgttgcacagttggagtggactggaagtctctcactactccggcgtgcctcccccttaccaccgactacttccctgaccgccagggcctgcagaatgactacacagagggctgttatgatctccttccagaagcagacatcgacaggagggacgaagatggtgtgcagatgacagcccagcaggtatttgaagagtttatttgccaacgtctcatgcagggctaccaaatcatagtgcagcccaagacacagaaacccaatcctgctgtcccgcccccgctgagcagtagcccactctatagccgaggccttgtgtcccgaaaccgccctgaggaggaggaccagtattggctgagtatgggcagaacgttccacaaagtgacgctgaaggataagatgatcacagtgacgcgataccttcccaagtatccttatgaatctgcccagatccactacacctacagcctctgtccttcccactcagactcagagttcgtctcctgctgggtggaattctcccacgaacggctggaggagtacaagtggaattacttagatcagtatatctgttctgccggctctgaagacttcagcttaattgagtccctgaagttctggaggacccgcttcctgctgctgccagcctgtgtcaccgccaccaagcgcatcacggagggggaggcccactgcgacatctatggggacaggccccgtgcagacgaggacgagtggcaactcctggatggttttgtccgctttgtggagggcttgaatcgcattcgcaggcggcatcgctcggatcgcatgatgcggaaagggaccgccatgaaaggcttgcagatgactgggcccatttccacgcattctctggagtcaactgcacccccagtggggaagaagggaacctcagctctctctgccctgttggagatggaggccagtcagaagtgcctgggagaacagcaggcagctgtgcatggtgggaagagctccgcccagtcagccgagagcagcagcgttgccatgactcccacctacatggacagcccacgaaaggtatctgtggaccaaacagccactcctatgttggacggcaccagtttgggcatatgcacaggccaatccatggacagaggcaacagccagacctttgggaactcccagaacataggagaacagggctactcctccacaaactccagtgacagcagctctcagcagctggtggcaagctccttgacctcatcctctaccctgacagagatcctggaagccatgaagcacccctcgacaggagtccagctgctctctgaacagaagggcctctcaccgtactgcttcatcagcgcggaggtggtacactggttggtgaaccacgtggaggggatccagacacaggcgatggccattgacatcatgcagaaaatgctggaagagcagctcatcacacatgcatctggcgaagcctggcggaccttcatctacggcttctatttctacaagatagtaacggacaaagagcccgaccgagtggccatgcagcagcccgccaccacctggcacacagcaggagtggacgacttcgccagcttccagcgcaagtggtttgaggtggcctttgtggcagaagagctcgtgcactctgagattcctgcctttctcctgccctggctgcctagccggccagcctcctatgcaagtaggcacagctcctttagccgaagttttggaggacggagccaggcggcagcacttttagctgccactgtcccagagcagaggactgtgaccctggatgttgacgtgaacaaccgcacagaccggctggagtggtgcagctgttattaccatggcaacttttctctgaatgcagcctttgagatcaagctgcactggatggcggtgaccgcagcagtactcttcgagatggtccaaggttggcatcggaaagccacctcctgtggcttcttgttagtcccagttttggaggggccttttgcactgcccagttacctgtatggcgacccccttcgtgcccagctcttcatcccactcaacatcagctgcttgctcaaggagggcagcgagcacctgtttgatagctttgaacccgaaacgtactgggatcgaatgcacctcttccaggaagccattgcacacaggtttgggtttgtacaagataaatattctgcctctgcttttaacttccctgctgagaacaagcctcagtatatccacgttacaggaacagtgtttctgcagctgccctactccaagcgcaagttctcagggcagcagcggcggcggcggaactccaccagctccaccaaccagaacatgttctgcgaggagcgggtcggctacaactgggcctacaacaccatgctcaccaaaacatggcgctccagcgccacaggggatgaaaagtttgctgatcggctgctgaaggacttcacggacttctgcatcaaccgtgacaaccggctggtcacgttctggacaagttgcctggagaagatgcatgccagtgccccgtgaggccaggctgcacctgtgctgggggaaggtgggtgagccactgccctcaaacccggggcggaggattccaggcaggctctaggagtcaggtgtccgtttgctgctatcagtgagtgggggccattgttttttgtttgtttgtttgtttgtttgtttgtttttggcccccacgacaagtcttctactctagaagaaagactttggaagcagctgctgctgctgccaccactcctgtcagcaagtgctcagagcaggtgggaggcacagattgtccgtgggagggctccagtgtctgggaagagggcaggcggcccccatgaatgtcctcggaagggggtggctcctggtagcatccttttccttcaccatctatgggatattaggggcagaatctgccacttcttgcccaggagtgtgcacagatgtaagataattttgtgaaataatgtaccatagactctcaccaactgtatatacctgtacatatcagaagcaaataaagagctccacgtgcatca

SEQ ID NO: 181369 - DNA, 5378 bp, Artificial Sequence
  derived and/or modified sequence
atctggaggaggcgcagggaacctggagagggtccagccctcagtgccccggccagaggcgggaaggggctctagagcttcgggaggcaagatgacttctctgccccaagcttggaacagctaaagggaaaaacagtgcaagatgagaacaacaaaggtctacaaactcgtcatccacaagaagggctttgggggcagtgatgatgagctagttgtgaaccccaaagtgttccctcacatcaagcttggagacattgtagagattgcacaccccaacgatgaatacagccctctgcttttgcaggtcaagtctcttaaggaagatttacagaaggaaactatcagtgtggaccagactgtgactcaagtgttccggctgagaccttatcaggatgtctatgttaatgtcgtagaccctaaggatgtgacccttgacctagtggaattaacttttaaggatcagtatattggccgtggggatatgtggcgactaaagaaaagtttggtcagcacatgtgcctatatcacccagaaggtggagtttgctggcatcagagcacaggctggtgaactgtgggttaagaatgagaaggtcatgtgtggctacatcagtgaagataccagggtggtgtttcgttctacgtcggctatggtttacatatttattcagatgagctgtgaaatgtgggattttgatatttatggggatttgtattttgagaaagctgtgaatggtttccttgctgatctatttaccaagtggaaggagaagaactgtagtcatgaagtgacagtggtcctgttttctagaactttctatgatgcaaaatctgttgatgaatttcctgaaataaaccgagcctcaattcgacaggatcacaaggggagattctatgaagacttttacaaagtggtggtgcagaatgagagaagagaagaatggacttcacttctcgtaaccattaaaaaactcttcatccagtatccagtgttggtgcgactggaacaggcagagggctttcctcaaggagataattctacctcagcacaaggaaactacctggaggccatcaatctgtcattcaatgtgtttgataagcactacatcaaccgcaactttgaccgaactgggcagatgtcagtggtgatcacgcccggggtgggtgtctttgaagtggaccgcctactcatgatcctgaccaagcagcggatgatagataatggaattggtgtggatttggtgtgcatgggagagcaaccgttacatgctgtcccattgttcaagctccataatcggagtgctccccgtgattctcgtctgggcgatgactataatatccctcactggataaaccacagtttctacacatccaaaagccagctcttttgtaatagtttcaccccacgaataaaactggcaggaaagaagcccgcctctgagaaagcaaaaaatggccgtgatacatctctcgggagtccaaaagaatctgagaacgcccttcccatccaagtagattatgacgcctatgacgctcaagtgttcaggctgcccggcccatcccgggcccagtgcctcaccacctgcagatctgtgcgagagcgagagagtcacagtcgaaagagtgccagctcctgtgatgtttcatccagcccttccctaccaagccgcacactgcccactgaggaagtgaggagccaggcttctgacgacagctccctaggcaagagtgccaacatcctgatgatcccacacccccacctgcaccagtatgaagtcagcagctccttgggatacaccagcactcgagatgtcctggagaacatgatggagccaccacagcgagactccagtgcaccagggaggtttcacgttggcagtgcagaatccatgctgcatgttcgacctggtggatacacgccccagagagcactgattaaccccttcgctccctctcggatgcccatgaagcttacgtccaacagaaggcgctggatgcacacttttcctgtggggccatccggagaagccatccagatccaccaccagacccgacagaatatggcggagctacaaggcagcgggcagagggatccaactcactcctctgcagagctgctggagttagcatatcatgaagctgctggaaggcacagcaattcccgccagcctggtgacggcatgtccttcttgaacttcagtggaacagaggagctttctgtcggcctgcttagcaacagtggtgcaggtatgaatcctaggacccagaataaggattctctagaggacagtgtttctacctctccagacccaatgccaggcttctgttgcacagttggagtggactggaagtctctcactactccggcgtgcctcccccttaccaccgactacttccctgaccgccagggcctgcagaatgactacacagagggctgttatgatctccttccagaagcagacatcgacaggagggacgaagatggtgtgcagatgacagcccagcaggtatttgaagagtttatttgccaacgtctcatgcagggctaccaaatcatagtgcagcccaagacacagaaacccaatcctgctgtcccgcccccgctgagcagtagcccactctatagccgaggccttgtgtcccgaaaccgccctgaggaggaggaccagtattggctgagtatgggcagaacgttccacaaagtgacgctgaaggataagatgatcacagtgacgcgataccttcccaagtatccttatgaatctgcccagatccactacacctacagcctctgtccttcccactcagactcagagttcgtctcctgctgggtggaattctcccacgaacggctggaggagtacaagtggaattacttagatcagtatatctgttctgccggctctgaagacttcagcttaattgagtccctgaagttctggaggacccgcttcctgctgctgccagcctgtgtcaccgccaccaagcgcatcacggagggggaggcccactgcgacatctatggggacaggccccgtgcagacgaggacgagtggcaactcctggatggttttgtccgctttgtggagggcttgaatcgcattcgcaggcggcatcgctcggatcgcatgatgcggaaagggaccgccatgaaaggcttgcagatgactgggcccatttccacgcattctctggagtcaactgcacccccagtggggaagaagggaacctcagctctctctgccctgttggagatggaggccagtcagaagtgcctgggagaacagcaggcagctgtgcatggtgggaagagctccgcccagtcagccgagagcagcagcgttgccatgactcccacctacatggacagcccacgaaaggtatctgtggaccaaacagccactcctatgttggacggcaccagtttgggcatatgcacaggccaatccatggacagaggcaacagccagacctttgggaactcccagaacataggagaacagggctactcctccacaaactccagtgacagcagctctcagcagctggtggcaagctccttgacctcatcctctaccctgacagagatcctggaagccatgaagcacccctcgacaggagtccagctgctctctgaacagaagggcctctcaccgtactgcttcatcagcgcggaggtggtacactggttggtgaaccacgtggaggggatccagacacaggcgatggccattgacatcatgcagaaaatgctggaagagcagctcatcacacatgcatctggcgaagcctggcggaccttcatctacggcttctatttctacaagatagtaacggacaaagagcccgaccgagtggccatgcagcagcccgccaccacctggcacacagcaggagtggacgacttcgccagcttccagcgcaagtggtttgaggtggcctttgtggcagaagagctcgtgcactctgagattcctgcctttctcctgccctggctgcctagccggccagcctcctatgcaagtaggcacagctcctttagccgaagttttggaggacggagccaggcggcagcacttttagctgccactgtcccagagcagaggactgtgaccctggatgttgacgtgaacaaccgcacagaccggctggagtggtgcagctgttattaccatggcaacttttctctgaatgcagcctttgagatcaagctgcactggatggcggtgaccgcagcagtactcttcgagatggtccaaggttggcatcggaaagccacctcctgtggcttcttgttagtcccagttttggaggggccttttgcactgcccagttacctgtatggcgacccccttcgtgcccagctcttcatcccactcaacatcagctgcttgctcaaggagggcagcgagcacctgtttgatagctttgaacccgaaacgtactgggatcgaatgcacctcttccaggaagccattgcacacaggtttgggtttgtacaagataaatattctgcctctgcttttaacttccctgctgagaacaagcctcagtatatccacgttacaggaacagtgtttctgcagctgccctactccaagcgcaagttctcagggcagcagcggcggcggcggaactccaccagctccaccaaccagaacatgttctgcgaggagcgggtcggctacaactgggcctacaacaccatgctcaccaaaacatggcgctccagcgccacaggggatgaaaagtttgctgatcggctgctgaaggacttcacggacttctgcatcaaccgtgacaaccggctggtcacgttctggacaagttgcctggagaagatgcatgccagtgccccgtgaggccaggctgcacctgtgctgggggaaggtgggtgagccactgccctcaaacccggggcggaggattccaggcaggctctaggagtcaggtgtccgtttgctgctatcagtgagtgggggccattgttttttgtttgtttgtttgtttgtttgtttgtttttggcccccacgacaagtcttctactctagaagaaagactttggaagcagctgctgctgctgccaccactcctgtcagcaagtgctcagagcaggtgggaggcacagattgtccgtgggagggctccagtgtctgggaagagggcaggcggcccccatgaatgtcctcggaagggggtggctcctggtagcatccttttccttcaccatctatgggatattaggggcagaatctgccacttcttgcccaggagtgtgcacagatgtaagataattttgtgaaataatgtaccatagactctcaccaactgtatatacctgtacatatcagaagcaaataaagagctccacgtgcatc

SEQ ID NO: 181370 - protein, 625 aa, Artificial Sequence
  derived and/or modified sequence
MLNMWKVRELVDKATNVVMNYSEIESKVREATNDDPWGPSGQLMGEIAKATFMYEQFPELMNMLWSRMLKDNKKNWRRVYKSLLLLAYLIRNGSERVVTSAREHIYDLRSLENYHFVDEHGKDQGINIRQKVKELVEFAQDDDRLREERKKAKKNKDKYVGVSSDSVGGFRYSERYDPEPKSKWDEEWDKNKSAFPFSDKLGELSDKIGSTIDDTISKFRRKDREDSPERCSDSDEEKKARRGRSPKGEFKDEEETVTTKHIHITQATETTTTRHKRTANPSKTIDLGAAAHYTGDKASPDQNASTHTPQSSVKTSVPSSKSSGDLVDLFDGTSQSTGGSADLFGGFADFGSAAASGSFPSQVTATSGNGDFGDWSAFNQAPSGPVASSGEFFGSASQPAVELVSGSQSALGPPPAASNSSDLFDLMGSSQATMTSSQSMNFSMMSTNTVGLGLPMSRSQNTDMVQKSVSKTLPSTWSDPSVNISLDNLLPGMQPSKPQQPSLNTMIQQQNMQQPMNVMTQSFGAVNLSSPSNMLPVRPQTNALIGGPMPMSMPNVMTGTMGMAPLGNTPMMNQSMMGMNMNIGMSAAGMGLTGTMGMGMPNIAMTSGTVQPKQDAFANFANFSK

SEQ ID NO: 181371 - DNA, 1878 bp, Artificial Sequence
  derived and/or modified sequence
atgctgaatatgtggaaggtgagggagcttgtggacaaggctactaatgtagtgatgaactacagcgagatcgaaagtaaggttcgcgaagccaccaatgatgatccatggggaccgagtggacagttaatgggggagattgctaaagcaactttcatgtatgagcagtttcctgagctgatgaatatgctttggagcaggatgcttaaagacaataaaaaaaattggcgaagggtgtacaagagccttctgctgctggcctatctcattaggaatgggagcgagagggttgttactagcgctcgtgagcatatttatgatcttcgtagcctagagaactaccattttgtggatgagcatggcaaggaccagggtattaacatcaggcaaaaggtgaaagaactggtggagtttgcccaggatgacgatcgactccgcgaggagagaaagaaagctaagaaaaacaaagataaatacgtgggtgtatcatcagactcagttggagggtttcgatactccgaaaggtacgatccagagcccaaatccaaatgggatgaggagtgggacaagaataaaagcgcttttcccttttctgacaagctgggggaactcagcgacaagatcggcagcacaattgacgataccatttcgaaatttagacgcaaggacagagaagacagccctgagcgctgttcagactcagacgaggaaaagaaggctcgaaggggtaggtcaccgaagggagaattcaaagatgaggaggagaccgtgacgacaaagcatatccacatcacacaagctacagaaacgacgaccaccaggcacaaaaggacggccaatccgagcaaaactatagatctgggcgcagcagctcactatacaggagataaggcttcccccgatcagaacgcctctactcatactccccagtccagcgtgaagaccagcgttccttcctctaagagcagcggagacctcgtggacctgttcgacgggacaagccagagtacagggggctccgcggacctgtttgggggatttgctgattttggatcggcggctgcatctggctcgttcccttcccaggtaacagctacaagcggcaacggcgacttcggtgactggtcagcttttaaccaggccccgtccggcccagtggcctcttctggtgaatttttcggtagtgccagtcagcccgctgtcgaactcgttagtggatcccaatccgctttgggtccacctccagctgcgagcaatagcagtgatctattcgatctcatgggtagcagccaagcaaccatgacctctagtcagagtatgaactttagcatgatgagcacgaacaccgtcggtctaggcctgcctatgtctcgtagtcagaatacggacatggtccagaaatccgttagcaaaacactaccctctacatggtctgatcccagtgtgaatatctccttggacaaccttctcccgggcatgcagccctcgaaaccccagcagcccagcctgaacaccatgatacagcaacagaacatgcagcaacccatgaacgtaatgacccagtcatttggagcggttaacctgtcctctccctccaacatgctgccggtgcggcctcaaaccaatgccctaattggtggcccaatgcctatgagcatgcccaacgtgatgactggcaccatgggcatggcaccattgggcaacacacccatgatgaaccagagcatgatgggaatgaatatgaatatcggcatgtcggcagcagggatggggttgaccggcaccatgggtatggggatgccaaacattgcaatgacctccggcacagttcaaccaaaacaagacgcttttgcaaacttcgccaacttttccaaatag

SEQ ID NO: 181372 - DNA, 1878 bp, Artificial Sequence
  derived and/or modified sequence
atgctgaacatgtggaaggtgcgggagctggtggacaaggccaccaacgtggtgatgaactacagcgagattgagagcaaggtgcgggaggccaccaatgatgacccctggggccccagcggccagctgatgggagaaattgccaaggccaccttcatgtatgagcagtttcctgagctgatgaacatgctgtggagcaggatgctgaaggacaacaagaagaactggaggagagtgtacaagagcctgctgctgctggcctacctgatcagaaatggcagcgagcgggtggtgaccagcgcccgggagcacatctatgacctgcggagcctggagaactaccactttgtggatgagcacggcaaggaccagggcatcaacatccggcagaaggtgaaggagctggtggagtttgcccaggatgatgaccggctgcgggaggagaggaagaaggccaagaagaacaaggacaagtatgtgggcgtgtccagtgacagcgtgggcggcttccgctacagcgagagatatgaccctgagcccaagagcaagtgggatgaggagtgggacaagaacaagagcgccttccccttcagtgacaagctgggggagctgagtgacaagattggcagcaccattgatgacaccatcagcaagttccggaggaaggaccgggaggacagccctgagcgctgcagcgacagtgatgaggagaagaaggcccggcggggccgcagccccaagggggagttcaaggatgaggaggagaccgtgaccaccaagcacatccacatcacccaggccacagagaccaccaccaccaggcacaagaggacagccaaccccagcaagaccatcgacctgggcgccgccgcccactacaccggggacaaggccagcccagaccagaatgccagcacccacaccccccagagctctgtgaagacctctgtgcccagcagcaagagcagcggggacctggtggacctgtttgatggcaccagccagagcactggaggcagcgctgacctgtttggaggctttgctgactttggcagcgctgctgccagcggcagcttccccagccaggtgacagccaccagcggaaatggagactttggagactggagcgccttcaaccaggcccccagcggccctgtggccagcagtggagagttctttggaagtgccagccagcctgctgtggagctggtgtctggcagccagagcgccctgggccccccacctgctgccagcaacagcagtgacctgtttgacctgatgggcagcagccaggccaccatgaccagcagccagagcatgaacttctccatgatgagcaccaacacagtgggcctgggcctgcccatgagccgcagccagaacacagacatggtgcagaagtctgtgtccaagaccctgcccagcacctggagcgaccccagcgtgaacatcagcctggacaacctgctgcccggcatgcagcccagcaagccccagcagcccagcctgaacaccatgatccagcagcagaacatgcagcagcccatgaatgtgatgacccagagctttggagctgtgaacctgagcagccccagcaacatgctgcctgtgcggccccagaccaatgccctgattggaggccccatgcccatgtccatgcccaacgtgatgacaggcaccatgggcatggcccccctgggcaacacccccatgatgaaccagagcatgatgggcatgaacatgaacatcggcatgtctgctgctggcatgggcctgaccggcaccatgggcatgggcatgcccaacatcgccatgaccagcggcaccgtgcagcccaagcaggatgcctttgccaactttgccaacttcagcaagtag

SEQ ID NO: 181373 - DNA, 1878 bp, Artificial Sequence
  derived and/or modified sequence
atgctgaacatgtggaaggtgcgggagctggtggacaaggccaccaacgtggtcatgaattatagtgaaattgagtccaaggtgagagaagcaacaaatgatgacccctggggaccaagcgggcagcttatgggggagatcgctaaggcaacctttatgtatgagcagttcccagagctcatgaatatgttatggtctagaatgttgaaggacaataagaagaattggaggagggtctataagtccctgctgctactagcctatctcatccgcaatggcagcgaaagggtcgtgacctcagcccgcgagcacatctacgacctccggtctctggagaactaccacttcgtggacgaacacgggaaagatcagggaatcaacattcgtcagaaagtgaaggagcttgtcgaatttgcacaggatgatgaccgcctaagagaagaacgcaagaaagccaaaaaaaataaagacaagtacgtaggcgtctcatctgactccgtgggtgggtttcgctattccgaacgttatgatcccgaacccaaaagcaagtgggacgaggagtgggataaaaataagagcgcctttcctttctccgacaaacttggggaattgtcagacaagattggcagtacgattgatgatactatcagcaagtttcgccgaaaagacagggaagattctcctgagagatgttcggatagtgacgaggaaaagaaggcaagacgcggacgcagcccgaaaggtgaattcaaggacgaggaggagacggtgacgactaagcatatacatataacgcaggcaaccgaaaccaccacgactcgccataagcgaacagccaacccttcaaagacaattgacctcggcgccgctgcacattatacaggagacaaggcaagtcccgatcaaaatgcctcaacccacacgccccagtcaagtgtgaagacgagcgttccttctagcaagtcttccggggacctggtcgaccttttcgacggcacgagccagtccacaggcggctccgcagacctgttcggtggattcgcagatttcggttctgctgcagcatctgggagctttcccagccaagtgaccgctacaagtggtaatggcgatttcggtgactggtccgcctttaaccaggctccctcggggcctgttgccagcagcggcgagtttttcggttctgctagccagccagcagttgagctggtgtctgggtctcaaagcgccttgggacccccaccggccgcatccaattccagcgatttgttcgacttgatggggtcatcccaggcgaccatgacatcctctcaatccatgaactttagcatgatgtccacaaacactgttggcctcggcctgcctatgtcccgaagtcaaaacacagacatggtccagaaatccgtcagcaaaactctgccatctacttggtccgacccctctgtgaatatctccctcgataacctcctgcctggcatgcagccaagcaaaccgcaacagccaagcctgaataccatgatacagcaacagaacatgcagcagccaatgaatgtcatgactcagtcatttggtgcagtaaacctgagttccccatctaatatgctcccagtcaggccacagacgaacgcgctaatcggcgggccaatgccaatgagcatgcctaatgtaatgaccggaaccatgggaatggcacccctagggaatacgcccatgatgaatcaaagtatgatgggcatgaatatgaatatcggtatgtctgccgccggaatgggtctgacaggtacgatgggcatgggaatgcctaacattgccatgaccagcggcacggtgcaaccgaagcaggacgcttttgccaacttcgcgaatttttcgaaatag

SEQ ID NO: 181374 - DNA, 1878 bp, Artificial Sequence
  derived and/or modified sequence
atgcttaacatgtggaaagtgcgggagctcgtggacaaggctaccaacgtcgtgatgaattactccgagattgagagcaaagttcgagaggccaccaacgacgacccttgggggcctagcggacagctgatgggtgaaattgctaaagccaccttcatgtatgagcaattcccagagctgatgaacatgctttggagtagaatgctgaaggataataagaaaaactggcggagagtgtataagtctctgctcttgttagcttaccttatcaggaacgggagcgagcgcgtggtgacatccgccagagaacacatctacgatctgcgcagtttagagaattatcactttgtagatgagcacggcaaggaccaggggatcaatattcggcagaaggtaaaggagctcgtggagtttgcccaagacgatgaccgtctgcgggaagagaggaaaaaagctaagaagaacaaggacaagtacgtgggtgtttcctccgattcagttggaggatttcgatacagtgaacggtacgatcctgagcccaaatccaaatgggacgaggagtgggacaaaaacaagtctgcctttccatttagtgacaaacttggggagctctctgataaaatcggctcgacaattgatgataccatctccaaatttcggcgtaaagatcgggaagatagtccggagcgatgtagcgatagcgatgaagaaaagaaggccaggcggggacgctcgcccaagggtgagtttaaagacgaagaggaaacagtgaccactaagcatatccacatcacacaagcgacagaaaccacaacaacccgccataaacgcactgccaacccctctaagactattgatctgggggctgcagcacactacacaggtgacaaagcaagtcccgaccaaaacgcctccacacatactccgcagtcgtccgtcaagacgtcagtgccttcctcgaagagtagtggcgatctagttgacctgttcgacggcacaagccagtctacaggcggttctgccgatttgttcgggggattcgccgatttcgggtccgccgcagccagcggtagttttccttcacaggtgactgccacaagcggaaacggggacttcggcgactggtctgcgtttaatcaggcgccatccggtcctgtcgcaagcagcggcgagttttttggatctgctagtcagcctgccgtagaactcgtgtcaggctctcagtctgcactgggtccgcctcccgctgcgagcaactcatcagacttgtttgacctcatggggtctagtcaagccacaatgacgtctagtcagtccatgaacttttccatgatgtccacaaataccgtgggcctgggtttacctatgagccgcagtcagaacaccgacatggttcagaagtccgtttctaagacactgccaagcacgtggtctgatccaagtgtgaatatcagccttgataatctgttgcctgggatgcagccaagtaaacctcagcagccatctctcaacactatgatccaacagcagaacatgcagcaacctatgaacgttatgacgcagtcgtttggagccgtcaacctgtcgagtcccagcaacatgttaccagtgcgccctcagactaacgcactcattggcggtcccatgccgatgtcgatgccgaacgtgatgaccggcaccatgggaatggcacctctgggaaatactccaatgatgaaccagagcatgatgggcatgaacatgaatatcggaatgtctgcagccggtatggggcttactggaaccatgggcatggggatgcctaacatcgccatgaccagtggcacagtgcaacccaagcaggacgcttttgcaaattttgcaaacttcagtaagtag

SEQ ID NO: 181375 - DNA, 3440 bp, Artificial Sequence
  derived and/or modified sequence
acttccgctccacgcagcgcctgtgctgccgcgtctcgacgtgtcaccggcggcgccgctgctgtggcaaaggaaggagctgactgggggagttcgaggcggcgggcggcggtgaccccggcctggaactgccccggtacggaagtgttccggggtccgtggggagcaggagagggaggcggcggaccgtcccgcgcggggcacgatgttgaacatgtggaaggtgcgcgagctggtggacaaagccaccaatgttgttatgaattattcagagatcgagtctaaggttcgagaggcaacgaacgatgatccttggggaccttctgggcaactcatgggagagattgccaaggctacatttatgtatgaacaatttccagaacttatgaacatgctttggtcacgaatgttaaaagacaacaaaaagaattggagaagagtttataagtcgttgctgctcctagcttacctcataaggaatggatcagagcgtgttgttacaagtgccagagaacacatttatgatttacgatccctggaaaattaccactttgtagatgagcatggtaaggatcaaggtataaatattcgacagaaggtgaaggaattggttgaatttgcccaggatgacgacaggcttcgtgaagagcgaaagaaagcaaagaagaacaaagacaagtatgttggggtttcctcagacagtgttggaggattcagatacagtgaaagatatgatcctgagcccaaatcaaaatgggatgaggagtgggataaaaacaagagtgcttttccattcagtgataaattaggtgagctgagtgataaaattggaagcacaattgatgacaccatcagcaagttccggaggaaagatagagaagactctccagaaagatgcagcgacagcgatgaggaaaagaaagcgagaagaggcagatctcccaaaggtgaattcaaagatgaagaggagactgtgacgacaaagcatattcatatcacacaggccacagagaccaccacaaccagacacaagcgcacagcaaatccttccaaaaccattgatcttggagcagcagcacattacacaggggacaaagcaagtccagatcagaatgcttcaacccacacacctcagtcttcagttaagacttcagtgcctagcagcaagtcatctggtgaccttgttgatctgtttgatggcaccagccagtcaacaggaggatcagctgatttattcggaggatttgctgactttggctcagctgctgcatcaggcagtttcccttcccaagtaacagcaacaagtgggaatggagactttggtgactggagtgccttcaaccaagccccatcaggccctgttgcttccagtggcgagttctttggcagtgcctcacagccagcggtagaacttgttagtggctcacaatcagctctaggcccacctcctgctgcctcaaattcttcagacctgtttgatcttatgggctcgtcccaggcaaccatgacatcttcccagagtatgaatttctctatgatgagcactaacactgtgggacttggtttgcctatgtcaagatcacagaatacagatatggtccagaaatcagtcagcaaaaccttgccctctacttggtctgaccccagtgtaaacatcagcctagacaacttactacctggtatgcagccttccaaaccccagcagccatcactgaatacaatgattcagcaacagaatatgcagcagcctatgaatgtgatgactcaaagttttggagctgtgaacctcagttctccatcgaacatgcttcctgtccggccccaaactaatgctttgatagggggacccatgcctatgagcatgcccaatgtgatgactggcaccatgggaatggcccctcttggaaatactccgatgatgaaccagagcatgatgggcatgaacatgaacatagggatgtccgctgctgggatgggcttgacaggcacaatgggaatgggcatgcccaacatagccatgacttctggaactgtgcaacccaagcaagatgcctttgcaaatttcgccaattttagcaaataagagattgtaaaagaagcagattgaatgaagaatttttagctgtgcagataggtgatgttgggatggaaaatgctaatcaactaccctttcttttatcaagtaattaaaataaatctacataaagaaccaaaaaggctgttttataaaagtgaaatatccagtatttcagagggccaggcaagagcacttcagatgaggcagtcaaaatcatttttttccagtgaggatagaccacaagtgggtggtgagaccattgaaagcctttatcaactgaagagtccatttaacagcataatttgtgggaagactggaatagggctgaataaatgtgtttgaatctctaattttatactttcttttcctgaggaacttgatttttctgtccctggatcgccttgtcataattgggtctgttccttttactaccactcttgagtccatatatgaaatcattaaagttggatgatcagttttttataaaaatatatatttttgtccaagaaaaaaaaaagcatacatatgtgattatggctaaatcaaaggtaactggaatgtatatacttttgctaatgttccagcaacactgctattatactatccaaatttttattgtaacaaaacctctttaagcaattggtgattgccatgggacttttcccatgtcttctgctgtaattatcctgtgcagaactaggaagaaatttttttcaggactgctctatggtttcctttaaaagaaaaaaacttctgtttgtttttagcagtcattatttacaatttgcagtgattaacttggcaaggcttccttccgtgtttatccctgtagccatcatttaagtcaggaacagtcagaaaaatatttattttattttttttttgggtgtctgcaaaggtaaaaatccattaaaaccttaagttaaatataaatgttacaactcaatgtttgcttttagattttatacagtatttgttttgttttggttttgagtgtatataatgcagcattagcaatatggttccaatagaggagttaaatatatattgttaaaggagacctgtagcagtcaaagattttattgatttaatgacaaaggaaattaatgaaaatgtttttgtttttctgctgtaattctgcattaagctcacatgaaaatcatgattctagagtttggaatgcaaaattaattgttttaccctcaagctgggaatatttttcaaaataaatactataatatagatatcaaattattacctccccatgttatgttgaaaatttttttattaaattgataaaactttatttccattatattcataatgttctgttatacataacattaaaatgttcattaaaatc

SEQ ID NO: 181376 - DNA, 1878 bp, Artificial Sequence
  derived and/or modified sequence
atgctgaacatgtggaaggtgagagagctggtggacaaggccaccaacgtggtgatgaactacagcgagatcgagagcaaggtgagagaggccaccaacgacgacccctggggccccagcggccagctgatgggcgagatcgccaaggccaccttcatgtacgagcagttccccgagctgatgaacatgctgtggagcagaatgctgaaggacaacaagaagaactggagaagagtgtacaagagcctgctgctgctggcctacctgatcagaaacggcagcgagagagtggtgaccagcgccagagagcacatctacgacctgagaagcctggagaactaccacttcgtggacgagcacggcaaggaccagggcatcaacatcagacagaaggtgaaggagctggtggagttcgcccaggacgacgacagactgagagaggagagaaagaaggccaagaagaacaaggacaagtacgtgggcgtgagcagcgacagcgtgggcggcttcagatacagcgagagatacgaccccgagcccaagagcaagtgggacgaggagtgggacaagaacaagagcgccttccccttcagcgacaagctgggcgagctgagcgacaagatcggcagcaccatcgacgacaccatcagcaagttcagaagaaaggacagagaggacagccccgagagatgcagcgacagcgacgaggagaagaaggccagaagaggcagaagccccaagggcgagttcaaggacgaggaggagaccgtgaccaccaagcacatccacatcacccaggccaccgagaccaccaccaccagacacaagagaaccgccaaccccagcaagaccatcgacctgggcgccgccgcccactacaccggcgacaaggccagccccgaccagaacgccagcacccacaccccccagagcagcgtgaagaccagcgtgcccagcagcaagagcagcggcgacctggtggacctgttcgacggcaccagccagagcaccggcggcagcgccgacctgttcggcggcttcgccgacttcggcagcgccgccgccagcggcagcttccccagccaggtgaccgccaccagcggcaacggcgacttcggcgactggagcgccttcaaccaggcccccagcggccccgtggccagcagcggcgagttcttcggcagcgccagccagcccgccgtggagctggtgagcggcagccagagcgccctgggccccccccccgccgccagcaacagcagcgacctgttcgacctgatgggcagcagccaggccaccatgaccagcagccagagcatgaacttcagcatgatgagcaccaacaccgtgggcctgggcctgcccatgagcagaagccagaacaccgacatggtgcagaagagcgtgagcaagaccctgcccagcacctggagcgaccccagcgtgaacatcagcctggacaacctgctgcccggcatgcagcccagcaagccccagcagcccagcctgaacaccatgatccagcagcagaacatgcagcagcccatgaacgtgatgacccagagcttcggcgccgtgaacctgagcagccccagcaacatgctgcccgtgagaccccagaccaacgccctgatcggcggccccatgcccatgagcatgcccaacgtgatgaccggcaccatgggcatggcccccctgggcaacacccccatgatgaaccagagcatgatgggcatgaacatgaacatcggcatgagcgccgccggcatgggcctgaccggcaccatgggcatgggcatgcccaacatcgccatgaccagcggcaccgtgcagcccaagcaggacgccttcgccaacttcgccaacttcagcaagtag

SEQ ID NO: 181377 - protein, 290 aa, Artificial Sequence
  derived and/or modified sequence
METPLDVLSRAASLVHADDEKREAALRGEPRIQTLPVASALSSHRTGPPPISPSKRKFSMEPGDEDLDCDNDHVSKMSRIFNPHLNKTANGDCRRDPRERSRSPIERAVAPTMSLHGSHLYTSLPSLGLEQPLALTKNSLDASRPAGLSPTLTPGERQQNRPSVITCASAGARNCNLSHCPIAHSGCAAPGPASYRRPPSAATTCDPVVEEHFRRSLGKNYKEPEPAPNSVSITGSVDDHFAKALGDTWLQIKAAKDGASSSPESASRRGQPASPSAHMVSHSHSPSVVS

SEQ ID NO: 181378 - protein, 169 aa, Artificial Sequence
  derived and/or modified sequence
METPLDVLSRAASLVHADDEKREAALRGEPRIQTLPVASALSSHRTGPPPISPSKRKFSMEPGDEDLDCDNDHVSKMSRIFNPHLNKTANGDCRRDPRERSRSPIERAVAPTMSLHGSHLYTSLPSLGLEQPLALTKNSLDASRPAGLSPTLTPGERQQVGLCLGGWRG

SEQ ID NO: 181379 - protein, 200 aa, Artificial Sequence
  derived and/or modified sequence
METPLDVLSRAASLVHADDEKREAALRGEPRIQTLPVASALSSHRTGPPPISPSKRKFSMEPGDEDLDCDNDHVSKMSRIFNPHLNKTANGDCRRDPRERSRSPIERAVAPTMSLHGSHLYTSLPSLGLEQPLALTKNSLDASRPAGLSPTLTPGERQQNRPSVITCASAGARNCNLSHCPIAHSGCAAPGPASYRRPPS

SEQ ID NO: 181380 - protein, 127 aa, Artificial Sequence
  derived and/or modified sequence
METPLDVLSRAASLVHADDEKREAALRGEPRIQTLPVASALSSHRTGPPPISPSKRKFSMEPGDEDLDCDNDHVSKMSRIFNPHLNKTANGDCRRDPRERSRSPIERAVAPTMSLHGSHLYTSLPSL

SEQ ID NO: 181381 - protein, 224 aa, Artificial Sequence
  derived and/or modified sequence
METPLDVLSRAASLVHADDEKREAALRGEPRIQTLPVASALSSHRTGPPPISPSKRKFSMEPGDEDLDCDNDHVSKMSRIFNPHLNKTANGDCRRDPRERSRSPIERAVAPTMSLHGSHLYTSLPSLGLEQPLALTKNSLDASRPAGLSPTLTPGERQQNRPSVITCASAGARNCNLSHCPIAHSGCAAPGPASYRRPPSAATTCDPVVEEHFRRSLGKNYKEP

SEQ ID NO: 181382 - DNA, 873 bp, Artificial Sequence
  derived and/or modified sequence
atggagacccccctggacgtgctgagcagagccgccagcctggtgcacgccgacgacgagaagagagaggccgccctgagaggcgagcccagaatccagaccctgcccgtggccagcgccctgagcagccacagaaccggccccccccccatcagccccagcaagagaaagttcagcatggagcccggcgacgaggacctggactgcgacaacgaccacgtgagcaagatgagcagaatcttcaacccccacctgaacaagaccgccaacggcgactgcagaagagaccccagagagagaagcagaagccccatcgagagagccgtggcccccaccatgagcctgcacggcagccacctgtacaccagcctgcccagcctgggcctggagcagcccctggccctgaccaagaacagcctggacgccagcagacccgccggcctgagccccaccctgacccccggcgagagacagcagaacagacccagcgtgatcacctgcgccagcgccggcgccagaaactgcaacctgagccactgccccatcgcccacagcggctgcgccgcccccggccccgccagctacagaagaccccccagcgccgccaccacctgcgaccccgtggtggaggagcacttcagaagaagcctgggcaagaactacaaggagcccgagcccgcccccaacagcgtgagcatcaccggcagcgtggacgaccacttcgccaaggccctgggcgacacctggctgcagatcaaggccgccaaggacggcgccagcagcagccccgagagcgccagcagaagaggccagcccgccagccccagcgcccacatggtgagccacagccacagccccagcgtggtgagctag

SEQ ID NO: 181383 - DNA, 510 bp, Artificial Sequence
  derived and/or modified sequence
atggagacccccctggacgtgctgagcagagccgccagcctggtgcacgccgacgacgagaagagagaggccgccctgagaggcgagcccagaatccagaccctgcccgtggccagcgccctgagcagccacagaaccggccccccccccatcagccccagcaagagaaagttcagcatggagcccggcgacgaggacctggactgcgacaacgaccacgtgagcaagatgagcagaatcttcaacccccacctgaacaagaccgccaacggcgactgcagaagagaccccagagagagaagcagaagccccatcgagagagccgtggcccccaccatgagcctgcacggcagccacctgtacaccagcctgcccagcctgggcctggagcagcccctggccctgaccaagaacagcctggacgccagcagacccgccggcctgagccccaccctgacccccggcgagagacagcaggtgggcctgtgcctgggcggctggagaggctag

SEQ ID NO: 181384 - DNA, 603 bp, Artificial Sequence
  derived and/or modified sequence
atggagacccccctggacgtgctgagcagagccgccagcctggtgcacgccgacgacgagaagagagaggccgccctgagaggcgagcccagaatccagaccctgcccgtggccagcgccctgagcagccacagaaccggccccccccccatcagccccagcaagagaaagttcagcatggagcccggcgacgaggacctggactgcgacaacgaccacgtgagcaagatgagcagaatcttcaacccccacctgaacaagaccgccaacggcgactgcagaagagaccccagagagagaagcagaagccccatcgagagagccgtggcccccaccatgagcctgcacggcagccacctgtacaccagcctgcccagcctgggcctggagcagcccctggccctgaccaagaacagcctggacgccagcagacccgccggcctgagccccaccctgacccccggcgagagacagcagaacagacccagcgtgatcacctgcgccagcgccggcgccagaaactgcaacctgagccactgccccatcgcccacagcggctgcgccgcccccggccccgccagctacagaagaccccccagctag

SEQ ID NO: 181385 - DNA, 384 bp, Artificial Sequence
  derived and/or modified sequence
atggagacccccctggacgtgctgagcagagccgccagcctggtgcacgccgacgacgagaagagagaggccgccctgagaggcgagcccagaatccagaccctgcccgtggccagcgccctgagcagccacagaaccggccccccccccatcagccccagcaagagaaagttcagcatggagcccggcgacgaggacctggactgcgacaacgaccacgtgagcaagatgagcagaatcttcaacccccacctgaacaagaccgccaacggcgactgcagaagagaccccagagagagaagcagaagccccatcgagagagccgtggcccccaccatgagcctgcacggcagccacctgtacaccagcctgcccagcctgtag

SEQ ID NO: 181386 - DNA, 675 bp, Artificial Sequence
  derived and/or modified sequence
atggagacccccctggacgtgctgagcagagccgccagcctggtgcacgccgacgacgagaagagagaggccgccctgagaggcgagcccagaatccagaccctgcccgtggccagcgccctgagcagccacagaaccggccccccccccatcagccccagcaagagaaagttcagcatggagcccggcgacgaggacctggactgcgacaacgaccacgtgagcaagatgagcagaatcttcaacccccacctgaacaagaccgccaacggcgactgcagaagagaccccagagagagaagcagaagccccatcgagagagccgtggcccccaccatgagcctgcacggcagccacctgtacaccagcctgcccagcctgggcctggagcagcccctggccctgaccaagaacagcctggacgccagcagacccgccggcctgagccccaccctgacccccggcgagagacagcagaacagacccagcgtgatcacctgcgccagcgccggcgccagaaactgcaacctgagccactgccccatcgcccacagcggctgcgccgcccccggccccgccagctacagaagaccccccagcgccgccaccacctgcgaccccgtggtggaggagcacttcagaagaagcctgggcaagaactacaaggagccctag

SEQ ID NO: 181387 - DNA, 873 bp, Artificial Sequence
  derived and/or modified sequence
atggaaacacctctagacgtcctctctcgggcagcatcgctcgttcacgctgatgatgaaaagcgggaggcagcccttcggggggagccacgcattcagacattgcccgtggccagcgccctgtccagtcaccgtactggcccacctcctatctctccctccaagaggaagtttagtatggaacccggagatgaggatcttgattgtgacaacgatcatgtgagcaagatgtcccggatattcaacccacacttaaataagactgctaacggggactgtcggcgggaccctagggaacggtcaagatccccgatcgaacgggccgttgcgccaactatgagtctgcacgggagccacctgtacacgagtttgccttcacttggactcgaacagccactagccctaacaaagaacagtcttgatgcgtcaaggccagccggactttcacccactctcacgccaggggagcgacagcagaatcgaccaagtgttattacgtgtgccagcgcgggtgcacgaaattgtaatctgagccactgtcccatagctcatagcggatgtgcagcacccggtcctgcttcataccgcaggccccccagtgctgccacaacgtgcgatccagtcgttgaagaacactttagaagaagcctgggcaagaattacaaagaaccggagcctgctccaaattctgtgtccatcaccggtagtgtcgacgatcattttgccaaggcactgggcgatacgtggttgcagatcaaggcggctaaagatggagcatcctcgagccctgaatctgcttcacgtagaggccaaccagccagtccctccgcccacatggtatcccactcccactccccatcagtggtcagctag

SEQ ID NO: 181388 - DNA, 510 bp, Artificial Sequence
  derived and/or modified sequence
atggagacccccctggacgtcctgagtcgggcggcgtccctggtacatgctgatgacgagaagcgggaggctgctctccgtggggaacctcgcatccaaacccttccagtagcatccgccctttcttctcaccgaactggtccccccccaattagcccgtcaaagagaaaattttccatggaacccggcgacgaagatttggactgcgacaacgaccatgtatcaaaaatgagtaggatcttcaatccgcacttaaacaagactgccaatggagattgccggcgcgacccccgggagagatcccgaagccctatcgaacgggccgtggctcccacaatgagcctgcacggctctcacctgtataccagcctcccttcattgggactcgagcaaccactagccctaactaaaaacagtctggatgcatctcgtcccgcagggctttctccaactcttactcccggggagcggcaacaagtcggactgtgcttggggggatggcgagggtag

SEQ ID NO: 181389 - DNA, 603 bp, Artificial Sequence
  derived and/or modified sequence
atggagacgccactggacgttctttctagggcagcttcactcgtgcacgccgatgacgagaaacgagaagcagccctccggggagaacctcgaatccagaccctgcctgtggcttctgccctcagcagccaccgcaccggcccaccgcccattagcccctccaaacgcaagtttagcatggagcccggcgacgaggacctggactgcgacaacgaccatgtgtctaagatgtcgagaatcttcaatccgcatctcaataaaacagcaaatggagattgtcggcgcgatccccgggagcgcagccgaagtccgatcgaaagggcggtagcccctacaatgagcttgcatggtagccacctttacacctccctaccaagcctgggactggagcagcctctggcccttactaaaaactctctggacgctagtcggcctgcgggcttgtcccctaccctgacacctggggagagacaacaaaacaggccttctgtaatcacatgcgctagcgctggagcccgtaattgcaacctgagtcactgtcctatcgcccacagcgggtgcgccgctcccggaccagcttcttataggagacctccaagttag

SEQ ID NO: 181390 - DNA, 384 bp, Artificial Sequence
  derived and/or modified sequence
atggagacccctctggatgtcctcagtagggccgcctctctcgtgcacgcggatgatgaaaagcgcgaggcagctttgcgcggcgagccccggatacagacactccccgtggctagcgctctgtcatctcatcggaccggcccacctcctatatccccgtctaagcggaagttttctatggaaccaggcgatgaagacctggattgtgacaatgatcacgtttctaaaatgagccgcatcttcaacccacacctcaataaaactgcgaacggagactgccgaagagacccgcgagagcgatccaggtcacccatcgagcgggccgtggcccctactatgagcctccatggaagccacctgtatacttcgctgccgtccctgtag

SEQ ID NO: 181391 - DNA, 675 bp, Artificial Sequence
  derived and/or modified sequence
atggagactccactggacgtgctgtctcgagcagcgtccctggtccatgccgacgacgaaaaacgtgaagccgctttacggggcgaaccacgaatacagacacttcccgttgcctcggccctctcctctcacagaaccggtccgcccccaatctcaccttcaaagaggaaattctccatggagcccggggatgaggacttggactgtgataatgatcatgtctccaagatgtccaggatcttcaacccccaccttaacaaaaccgcgaatggggactgcaggagagacccacgcgaacgttccagatcacccatcgaacgggccgttgcaccaaccatgtccctgcacgggagtcacctgtataccagcttaccttcgcttggtctggagcagcctttggccctgaccaaaaatagcctcgatgccagccgccccgctggtctctcccccacattaacacccggagaaaggcagcaaaacaggccctccgtgatcacgtgcgctagtgctggggcccggaactgcaacctgagtcactgccccatcgcccatagtggttgtgctgctcccggcccagcctcttataggcgaccgccgagtgctgccacgacctgcgacccagtggtagaagagcacttccggcggtctctcggcaaaaactataaggaaccgtag

SEQ ID NO: 181392 - DNA, 873 bp, Artificial Sequence
  derived and/or modified sequence
atggagacccccctggatgtgctgagcagagctgccagcctggtgcatgctgatgatgagaagcgggaggccgccctgcggggggagccccgcatccagaccctgcctgtggccagcgccctgagcagccacaggacaggccccccacccatcagccccagcaagaggaagttctccatggagcctggagatgaggacctggactgtgacaatgaccacgtgtccaagatgagccgcatcttcaacccccacctgaacaagacagccaacggggactgccggcgggacccccgggagaggagccgcagccccatcgagagagctgtggcccccaccatgagcctgcacggcagccacctgtacaccagcctgcccagcctgggcctggagcagcccctggccctgaccaagaacagcctggatgccagcaggcctgctggcctgagccccaccctgaccccaggagagcggcagcagaaccggcccagcgtcatcacctgtgccagcgctggggccaggaactgcaacctgagccactgccccatcgcccacagcggctgtgccgcccctggccctgccagctaccgccggccccccagcgctgccaccacctgtgaccctgtggtggaggagcacttccgccgcagcctgggcaagaactacaaggagcctgagcccgcccccaacagcgtgtccatcaccggctctgtggatgaccactttgccaaggccctgggggacacctggctgcagatcaaggccgccaaggatggagccagcagcagccctgagagcgccagccggcggggccagcctgccagccccagcgcccacatggtgagccacagccacagccccagcgtggtgtcctag

SEQ ID NO: 181393 - DNA, 510 bp, Artificial Sequence
  derived and/or modified sequence
atggagacccccctggatgtgctgagcagagctgccagcctggtgcatgctgatgatgagaagcgggaggccgccctgcggggggagccccgcatccagaccctgcctgtggccagcgccctgagcagccacaggacaggccccccacccatcagccccagcaagaggaagttctccatggagcctggagatgaggacctggactgtgacaatgaccacgtgtccaagatgagccgcatcttcaacccccacctgaacaagacagccaacggggactgccggcgggacccccgggagaggagccgcagccccatcgagagagctgtggcccccaccatgagcctgcacggcagccacctgtacaccagcctgcccagcctgggcctggagcagcccctggccctgaccaagaacagcctggatgccagcaggcctgctggcctgagccccaccctgaccccaggagagcggcagcaggtgggcctgtgcctgggcggctggaggggctag

SEQ ID NO: 181394 - DNA, 603 bp, Artificial Sequence
  derived and/or modified sequence
atggagacccccctggatgtgctgagcagagctgccagcctggtgcatgctgatgatgagaagcgggaggccgccctgcggggggagccccgcatccagaccctgcctgtggccagcgccctgagcagccacaggacaggccccccacccatcagccccagcaagaggaagttctccatggagcctggagatgaggacctggactgtgacaatgaccacgtgtccaagatgagccgcatcttcaacccccacctgaacaagacagccaacggggactgccggcgggacccccgggagaggagccgcagccccatcgagagagctgtggcccccaccatgagcctgcacggcagccacctgtacaccagcctgcccagcctgggcctggagcagcccctggccctgaccaagaacagcctggatgccagcaggcctgctggcctgagccccaccctgaccccaggagagcggcagcagaaccggcccagcgtcatcacctgtgccagcgctggggccaggaactgcaacctgagccactgccccatcgcccacagcggctgtgccgcccctggccctgccagctaccgccggccccccagctag

SEQ ID NO: 181395 - DNA, 384 bp, Artificial Sequence
  derived and/or modified sequence
atggagacccccctggatgtgctgagcagagctgccagcctggtgcatgctgatgatgagaagcgggaggccgccctgcggggggagccccgcatccagaccctgcctgtggccagcgccctgagcagccacaggacaggccccccacccatcagccccagcaagaggaagttctccatggagcctggagatgaggacctggactgtgacaatgaccacgtgtccaagatgagccgcatcttcaacccccacctgaacaagacagccaacggggactgccggcgggacccccgggagaggagccgcagccccatcgagagagctgtggcccccaccatgagcctgcacggcagccacctgtacaccagcctgcccagcctgtag

SEQ ID NO: 181396 - DNA, 675 bp, Artificial Sequence
  derived and/or modified sequence
atggagacccccctggatgtgctgagcagagctgccagcctggtgcatgctgatgatgagaagcgggaggccgccctgcggggggagccccgcatccagaccctgcctgtggccagcgccctgagcagccacaggacaggccccccacccatcagccccagcaagaggaagttctccatggagcctggagatgaggacctggactgtgacaatgaccacgtgtccaagatgagccgcatcttcaacccccacctgaacaagacagccaacggggactgccggcgggacccccgggagaggagccgcagccccatcgagagagctgtggcccccaccatgagcctgcacggcagccacctgtacaccagcctgcccagcctgggcctggagcagcccctggccctgaccaagaacagcctggatgccagcaggcctgctggcctgagccccaccctgaccccaggagagcggcagcagaaccggcccagcgtcatcacctgtgccagcgctggggccaggaactgcaacctgagccactgccccatcgcccacagcggctgtgccgcccctggccctgccagctaccgccggccccccagcgctgccaccacctgtgaccctgtggtggaggagcacttccgccgcagcctgggcaagaactacaaggagccctag

SEQ ID NO: 181397 - DNA, 873 bp, Artificial Sequence
  derived and/or modified sequence
atggagacccccctggacgtgctgagccgggccgccagcctggtgcacgctgatgatgagaaacgggaggcagccctgagaggggagcccaggattcagacactgcccgtcgcctcagccttgagctcacatcgcacaggacccccccccatttctccttcaaaacgtaagttctcaatggagcctggtgacgaggatctcgattgcgataatgaccacgtgtccaagatgtcaagaatttttaacccccacttaaataagacggctaatggcgattgtcggagggatcctagagaacggagtcgctctcctatcgaaagggcagttgcccctacaatgtcactccatgggtcccacctgtatacaagcctgccaagtttaggactggagcagcccttggccctcacaaaaaattccctggacgcttctagacccgctggtcttagtccgaccctcactccaggagagcgccagcagaacagacccagtgttatcacctgcgcttccgcaggagcgagaaactgtaatttgtcacactgtcctatagctcattcgggctgcgcagctcccggccccgctagttataggagaccaccctctgcagccacaacctgtgatcctgtcgtggaggagcatttcagacgctctcttggaaaaaattataaggagcctgaaccagcccctaatagcgtgtccatcaccggaagtgtagatgaccatttcgctaaagccctaggcgatacttggctgcagattaaggccgcaaaagatggcgcttccagtagtcccgaatcagcaagccgcagggggcaaccagcaagtccttctgcacatatggtctcacactcacacagtccgtccgtcgtgtcctag

SEQ ID NO: 181398 - DNA, 510 bp, Artificial Sequence
  derived and/or modified sequence
atggagacccccctggacgtgctgagccgggccgccagcctggtgcatgcagacgatgagaagcgagaagccgcactgcggggcgaacctagaattcaaactctgcctgtggcatcagctcttagttcacatcggaccggcccaccacccatttccccaagcaaacgcaaattctccatggagcccggagacgaagaccttgactgcgataatgatcatgtgtcaaagatgagccgcatcttcaacccgcacctcaacaagacagcaaatggtgattgtcgcagagaccccagagaacgttctagaagccccattgagagggccgtcgcccccactatgagcctccacggctcacacctttatacatccctgccgagcctaggtcttgagcaacctctggccctgacgaaaaactccctggatgcctctagaccggccggactatctcccacactaaccccgggggagaggcagcaggtgggcctctgccttgggggctggaggggatag

SEQ ID NO: 181399 - DNA, 603 bp, Artificial Sequence
  derived and/or modified sequence
atggagacccccctggacgtgctgagccgggccgccagcctggtgcatgccgacgacgaaaaacgggaagcagctttgcgcggggaaccaagaatccaaacgttacctgtggcaagtgcgctgtccagtcacaggacaggcccccccccaatttctccgtccaaacgcaaattctcaatggagccaggtgacgaagatctggactgtgataacgatcacgtaagtaaaatgagccgaatttttaacccacacctcaataaaaccgcgaacggcgactgccgccgggacccccgagagagatcacggagcccaatcgagagagctgtagccccaacaatgtcactccacggctctcacctgtacacaagcctgcccagtttagggctggaacagcctcttgcactgaccaagaactctctggacgccagtcgcccagccggcttgagtccgactctgacacctggcgagaggcaacaaaaccggccatctgttattacatgcgcgtcagcaggtgccagaaattgcaatctgtcccattgtcctattgcccacagtggctgtgctgccccagggcccgccagctaccgccgccccccatcttag

SEQ ID NO: 181400 - DNA, 384 bp, Artificial Sequence
  derived and/or modified sequence
atggagacccccctggacgtgctgagccgggccgccagcctggtgcacgcggacgacgaaaaaagggaagccgctctacgcggggaacccaggattcaaacactgcctgtggccagcgccctatcttcccatcgaaccggtccaccaccaatcagcccttccaagaggaagttcagcatggaacctggcgatgaggacctggattgcgacaacgatcacgttagcaagatgagtcgcatctttaacccacacttgaataaaacagctaatggtgactgccggcgggaccctcgcgagcgctctcggtctccaatcgaaagagcagtggctcccactatgtccctccacggcagtcatctatacacttcactccccagcctatag

SEQ ID NO: 181401 - DNA, 675 bp, Artificial Sequence
  derived and/or modified sequence
atggagacccccctggacgtgctgagccgggccgccagcctggtgcacgcagacgacgaaaaacgtgaggctgcactacgcggtgagccacggattcagacactgccggtagctagtgcactttcttcacaccgcaccggtcccccacccatctccccttccaaacggaagttctcgatggagccaggggacgaggacctggattgcgacaacgatcatgtctccaagatgtctcggatctttaatccccacctgaacaaaaccgccaatggtgattgccgtcgcgatccacgggagaggagtcgttccccaatcgagcgagcggtggcccctaccatgtccctgcatggctctcacctgtacacctcactgccatcgcttggattggagcaacccctcgctttaacaaaaaactccctggacgcgagccgaccagctggcttatcaccaacactgactccaggggagaggcaacagaatcgtcccagcgttatcacctgcgccagcgctggcgcacgtaattgtaacctcagccactgccctattgcccatagtggatgcgccgcccccggacccgcttcgtaccggcgtcccccatctgccgccactacatgcgatccagtggtcgaggaacatttcaggagatcactcggcaagaactacaaagaaccttag

SEQ ID NO: 181402 - DNA, 873 bp, Artificial Sequence
  derived and/or modified sequence
atggagaccccgttggacgtgctttcaagggcagctagcctcgttcatgccgatgatgaaaaacgagaagccgcacttaggggcgagccacgaatccagaccctccctgtggcaagcgcactgtcttcccaccggacaggaccccctcccataagccccagcaaaagaaaattctccatggagcccggagacgaggacctggactgtgataacgatcacgtgagtaagatgtcgcggatttttaatcctcatcttaataaaactgctaacggagattgccgtcgagacccccgagaacgcagtcgatcacctatcgagagggcagtggcgccaaccatgagtttacatggcagtcatttgtacacaagcctcccatcactgggactggagcagcccctggcgctcaccaagaatagtctggatgcctctcgcccagccggattgtcaccaacactgacgccaggcgagaggcagcagaacagacccagcgtcattacatgtgccagcgcaggtgctcgtaactgcaatctgagtcactgtcctattgcccattccggttgcgcagcccctgggccagcgagttatcggcgtcctccttccgcggcaacgacatgcgatccggtggtggaggagcacttcaggaggagcctcggtaaaaactacaaagagcctgagccggctcccaactcagtatctataacaggttcagtggatgatcacttcgcgaaagcgctcggcgacacctggctgcagatcaaagccgctaaggacggagcatctagttccccagagagcgcatcacgtaggggacagcctgcatcaccctctgcccacatggtttcccacagtcatagtccctcagtggtttcttag

SEQ ID NO: 181403 - DNA, 510 bp, Artificial Sequence
  derived and/or modified sequence
atggagactccgctggacgtgctgagtcgggctgcgagcttggtacatgccgacgacgagaagcgggaggctgcgctgaggggggaacccagaattcagactctccccgttgcatctgccctgtcaagtcatcgcacaggccctcccccaatctcccccagcaaacgcaagttctcaatggaaccaggcgacgaggacctggactgtgacaacgatcacgtctccaaaatgagtagaatcttcaaccctcacttgaacaaaacagcaaatggggactgtcggcgagatccgcgagagcggagtaggtcccccattgaaagggccgtcgcccctaccatgagcctacacggtagccacctgtacacttcccttccctccctgggcctagagcagccattggcgctcactaaaaacagtctcgatgcttcaagaccagctgggctgagccccacactcacgccaggcgaaaggcaacaagtgggactttgcctggggggatggagaggttag

SEQ ID NO: 181404 - DNA, 603 bp, Artificial Sequence
  derived and/or modified sequence
atggagacacctttagatgtgctgtcacgtgcggcaagcctggtccatgctgacgatgagaaacgggaagctgctctgcggggtgaaccaagaatccagacactaccagtggcctccgctctaagttcacacaggacaggacccccacctatctcacctagcaagagaaagtttagtatggagccgggtgacgaagacctggactgcgataacgatcacgtgtcaaaaatgagcaggatttttaacccccacttgaataagactgcaaacggggattgtcgcagagatcccagggaaagatcacgatcacccatcgagcgggcagtggctccaaccatgtccctccatggttcccacctctacacatccctgccttcactggggctggagcaacccttggcccttaccaaaaactccctcgatgctagccgcccagcgggactcagccctacattaacaccaggagaaagacagcagaatcgcccttcggttattacctgtgcctctgcgggtgcacgcaactgtaacctctctcattgtcctattgcccattcggggtgtgctgccccaggacccgcttcatacagacgacccccttcctag

SEQ ID NO: 181405 - DNA, 384 bp, Artificial Sequence
  derived and/or modified sequence
atggagacccccctggatgttctctccagagccgcatccctggttcatgctgatgacgagaagcgagaggcagccctcagaggcgagcctaggattcagacactgcctgtcgcttctgccctttctagccacaggacaggacctcccccaattagcccgagcaagaggaagtttagcatggagccaggtgatgaagatttagattgtgataacgatcatgtgtcaaagatgtcccgcatctttaatcctcatctgaacaaaactgctaatggggactgccggcgagaccccagggaacgctcaagatctcctattgagagggccgtggcgcctaccatgagcttacacgggtcccatttatacacatcgttacccagtctctag

SEQ ID NO: 181406 - DNA, 675 bp, Artificial Sequence
  derived and/or modified sequence
atggaaactccattagatgttctgtcccgagccgctagtctggtgcatgctgatgatgagaaacgcgaggcagcccttcgcggagagcctcggattcagactctaccagttgccagtgctctgagctcacatcgcacaggccctcctcctatcagtcccagcaaacgaaaattctcaatggagccaggagacgaggatctggattgtgacaatgaccacgtctcaaagatgtcaaggatattcaaccctcatctaaacaaaacggcgaatggcgactgccggcgagacccacgtgaaaggagccgctcccccattgagcgggctgtggccccaaccatgtctttgcatggcagtcacttatacacgtccttgcccagcctcgggttagagcagccgctggcgttgacgaagaatagcctcgacgcctctcgacccgcaggcctctctccaactctgacaccaggggagcggcaacagaacagaccatccgttattacttgcgccagcgccggagcaaggaactgcaatctgtcgcattgcccaattgcacactctggatgtgctgcgccaggcccagcaagttataggcggccaccctccgcagctactacatgcgatcctgttgttgaggaacactttcgacgatctctaggcaagaactataaggaaccatag

SEQ ID NO: 181407 - DNA, 3725 bp, Artificial Sequence
  derived and/or modified sequence
acatttcagagcagtccgggttgtggacgccaggagtttgccaaacacagcaaacactggtgtgtgagcggctgaaggggactctttccactccgatctccctccctcccagcctgttttgatttactaggacttcctcctccgggcgaggcgggggaaggacgccgccgagcgcctggagttgtgcgcgtgtgcgtgtgcgcgtgtgcgagtgtgaagtgcagcgctggagtgcaacatgctgtaatgggaggaaacccagcggcgtcggagcgcccgggaccgccgcggccgttctgagcgcagtggcgccgagcagcccctcccgcagccggtgtgacctgtcccttcaggctccaaccaggaatggagacgccattggatgttttgtccagggcagcatctctggtgcatgctgatgacgaaaaacgcgaagctgctctcaggggagaacccagaatacagaccctgccggtggcctctgccctcagcagtcaccgcaccggccctcccccaatcagccccagcaagaggaagttcagcatggagccaggtgacgaggacctagactgtgacaacgaccacgtctccaaaatgagtcgcatcttcaacccccatctgaacaagactgccaatggagactgccgcagagacccccgggagcggagccgcagccccatcgagcgcgctgtggcccccaccatgagcctgcacggcagccacctgtacacctccctccccagccttggcctggagcagcccctcgcactgaccaagaacagcctggacgccagcaggccagccggcctctcgcccacactgaccccgggggagcggcagcagaaccggccctccgtgatcacctgtgcctcggctggcgcccgcaactgcaacctctcgcactgccccatcgcgcacagcggctgtgccgcgcccgggcctgccagctaccggaggccaccgagcgctgccaccacctgtgaccccgtggtggaggagcatttccgcaggagcctgggcaagaattacaaggagcccgagccggcacccaactccgtgtccatcacgggctccgtggacgaccactttgccaaagctctgggtgacacgtggctccagatcaaagcggccaaggacggagcatccagcagccctgagtccgcctctcgcaggggccagcccgccagcccctctgcccacatggtcagccacagtcactccccctctgtggtctcctgaagggagcgcctcctccaacaacacgtggatctgcatggtttgcctgagctttgaacagtcagtacttaaaaaaaaaaaaatcatgggggtggggtggggggaagggaagggatggtttatttgcaaaaaccatgttgttgggatttgtgttctgtttttgtacttgcttggtatccgtacaagggggccctcaaacatgatagcaggaactacgcgtggaacatctgtctaatgtagcatccttacttcctgcctcagttaccaaagaaacctctgatgcaggtctgctgccccgacggggccaggactccacagcgctttctcagtcacaagccatgatgaattggtgactcagacgctttgtgctttttcctttgcttcttgagaccggggtgtgtgtggctcagcttccacggcgtgtttggttcggtccatgtgtgtgcgtgtgtatacttgaagagaactgtcgtgtctgatttgcactattggaggaggactaaagttgcctgacaactttatgtgttatgccagaactctgagggcaaactgctgaaaaacaaagggtttaaggatgacatttctgaccatttgtgtgtttgttgttgttactgtttttgttttttttaatgtagacaatacagctttggaaggggaagtctcatacaggttataggtctttctctctctagatttcaggtgcttgcaactggactgcagactctaccaatcacgggcattttatcttctctgaacactgcagtttgttagactagagctgaggttggaggattccatagtgctttaaacgtgatgcatgttttaatggagaaaaaatagctggtttctattaattatatagacagtaaacaaaaaccttaatacttactatcttcttttcagaattagtttatttttgtcagttacagtcctagatatacttactgctggtacagttgtactctaagattggtatttgatattcactttactcacaagtagtgcgggaggccagctcctggcaggccctcgcgatgagcagtgggtcagctgcggtgtgggatgctggagtttggctgcaggctgacatcatttatttttgcatccctgtctgctttgttacaagctcccaggggaggtggggtttgtgtcttccaacttccctacatgcagaaactgctccctttgaactctcttggctgaacagcagattactgacagacaatctgtgatatggtgttttatacgcttcctcgtacgctggggccaaggcagtatacattcctctgactttatactgttattactgcatttattatttgctatattaatagctactaactagaaattagatgaagcaagcatgacagacacagctgtggaggtcacagctgctcctttttggtcaatgagcgtttctatcccctccccctggggtgtgctgtgtcccacctggcccaccagaggctcacgacgatggcacctgaccaggtgacgtgggcgtggtcacctcacctgcaaggctttgtggactctgcacaccgtatgacccccggttttacagtttttagctgttgaattttggaaattggcactgggtgaaaaggtcggaggactggctcttgtagtcacagagtggctgcaggcctttgaaaagtggaggaaagaaaagcccttctccttgccccgcacacatttcactcccactgtactgggcttccaagctttggcattcaggcccctatattttctgtaggaaaaatcgttgagaacacttttctatatgggtgattttgagaccatcgttacgctgtgcgtaaagaatgtacagagaaatttgtaggtattttttgaagaacattaatttgttaatgatatgtagctatttaatttttccctttcctattgtaatcattcattttttttgttgttcggaaaaaaaaagttgatctttttttttgtcgtagatttgtctgtaaaagtgcaggaacagttattctatgagaacactgcatctgcattcatagccacgagtttgttattgctacaggctactgagcgtcgtaacaggaaaaccacccacagctgaccggctcggtggaggacactcctgggacaggtctctttgtcagtgaacaagggcgtcactctgggaggggtcggcggtgctggcggccgggtccctggtgcactgacctatctgggataggcagtaccctggaggggggcctggggcagaggaggcagcagaaaaccaaacatttcactgagaaagccccctccctgctctaagaaggggctccgtgaagttcttcccagagccgcgctgcctgcagtgcgctctgaccttctcttcatgtgtgtaaatctgtaatataccattctctgtggcctgtttttcctggaagaagaaaaaaaaaggtttggcaggccatctttttttgtacttaaaagtagccttaagaacaataataaagtgctcttaaacc

SEQ ID NO: 181408 - DNA, 581 bp, Artificial Sequence
  derived and/or modified sequence
agggattcctcgcgctcccgcgctcccgtccgccggcccggtccgcgcgtgcgtgtgcgtgctccaaccaggaatggagacgccattggatgttttgtccagggcagcatctctggtgcatgctgatgacgaaaaacgcgaagctgctctcaggggagaacccagaatacagaccctgccggtggcctctgccctcagcagtcaccgcaccggccctcccccaatcagccccagcaagaggaagttcagcatggagccaggtgacgaggacctagactgtgacaacgaccacgtctccaaaatgagtcgcatcttcaacccccatctgaacaagactgccaatggagactgccgcagagacccccgggagcggagccgcagccccatcgagcgcgctgtggcccccaccatgagcctgcacggcagccacctgtacacctccctccccagccttggcctggagcagcccctcgcactgaccaagaacagcctggacgccagcaggccagccggcctctcgcccacactgaccccgggggagcggcagcaggtgggcctctgtctgggagggtggcgtgggg

SEQ ID NO: 181409 - DNA, 792 bp, Artificial Sequence
  derived and/or modified sequence
gcgcgtgcgtgtgcgtgtgcgtgtttggcgggggcccgtgcgggggctcgggcgcgagcccgcctgtgcgtctgcgcgccctcggggtgcgccccgcgtgcccaggtcccgtccccgcccctgggtcccccgcagggccaggccggccccaggcgggcgcgcccagagccgccgggcggctccaaccaggaatggagacgccattggatgttttgtccagggcagcatctctggtgcatgctgatgacgaaaaacgcgaagctgctctcaggggagaacccagaatacagaccctgccggtggcctctgccctcagcagtcaccgcaccggccctcccccaatcagccccagcaagaggaagttcagcatggagccaggtgacgaggacctagactgtgacaacgaccacgtctccaaaatgagtcgcatcttcaacccccatctgaacaagactgccaatggagactgccgcagagacccccgggagcggagccgcagccccatcgagcgcgctgtggcccccaccatgagcctgcacggcagccacctgtacacctccctccccagccttggcctggagcagcccctcgcactgaccaagaacagcctggacgccagcaggccagccggcctctcgcccacactgaccccgggggagcggcagcagaaccggccctccgtgatcacctgtgcctcggctggcgcccgcaactgcaacctctcgcactgccccatcgcgcacagcggctgtgccgcgcccgggcctgccagctaccggaggccaccgagcg

SEQ ID NO: 181410 - DNA, 466 bp, Artificial Sequence
  derived and/or modified sequence
ggcaggaacacctggcagtttgaatgtgattcctccgatgctcacccccctggcctccacatctagacaaggctccaaccaggaatggagacgccattggatgttttgtccagggcagcatctctggtgcatgctgatgacgaaaaacgcgaagctgctctcaggggagaacccagaatacagaccctgccggtggcctctgccctcagcagtcaccgcaccggccctcccccaatcagccccagcaagaggaagttcagcatggagccaggtgacgaggacctagactgtgacaacgaccacgtctccaaaatgagtcgcatcttcaacccccatctgaacaagactgccaatggagactgccgcagagacccccgggagcggagccgcagccccatcgagcgcgctgtggcccccaccatgagcctgcacggcagccacctgtacacctccctccccagccttg

SEQ ID NO: 181411 - DNA, 726 bp, Artificial Sequence
  derived and/or modified sequence
gggttgtggacgccaggagtttgccaaacacagcaaacactggctccaaccaggaatggagacgccattggatgttttgtccagggcagcatctctggtgcatgctgatgacgaaaaacgcgaagctgctctcaggggagaacccagaatacagaccctgccggtggcctctgccctcagcagtcaccgcaccggccctcccccaatcagccccagcaagaggaagttcagcatggagccaggtgacgaggacctagactgtgacaacgaccacgtctccaaaatgagtcgcatcttcaacccccatctgaacaagactgccaatggagactgccgcagagacccccgggagcggagccgcagccccatcgagcgcgctgtggcccccaccatgagcctgcacggcagccacctgtacacctccctccccagccttggcctggagcagcccctcgcactgaccaagaacagcctggacgccagcaggccagccggcctctcgcccacactgaccccgggggagcggcagcagaaccggccctccgtgatcacctgtgcctcggctggcgcccgcaactgcaacctctcgcactgccccatcgcgcacagcggctgtgccgcgcccgggcctgccagctaccggaggccaccgagcgctgccaccacctgtgaccccgtggtggaggagcatttccgcaggagcctgggcaagaattacaaggagcc

SEQ ID NO: 181412 - protein, 200 aa, Artificial Sequence
  derived and/or modified sequence
MLLEQNLITVDMQKHSLTFWWLVECWPQVFNKLIRRYKYLEKGFEDEVKKLLLFLKGFSESERNKLAMLTGVLLANGTLNASILNSLYNENLVKEGVSAAFAVKLFKSWINEKDINAVAASLRKVSMDNRLMELFPANKQSVEHFTKYFTEAGLKELSEYVRNQQTIGARKELQKELQEQMSRGDPFKDIILYVKEEMKK

SEQ ID NO: 181413 - DNA, 489 bp, Artificial Sequence
  derived and/or modified sequence
atgaacaaccagaagcagcagaagcccaccctgagcggccagagattcaagaccagaaagagagacgagaaggagagattcgaccccacccagttccaggactgcatcatccagggcctgaccgagaccggcaccgacctggaggccgtggccaagttcctggacgccagcggcgccaagctggactacagaagatacgccgagaccctgttcgacatcctggtggccggcggcatgctggcccccggcggcaccctggccgacgacatgatgagaaccgacgtgtgcgtgttcgccgcccaggaggacctggagaccatgcaggccttcgcccaggtgttcaacaagctgatcagaagatacaagtacctggagaagggcttcgaggacgaggtgaagaagctgctgctgttcctgaagggcttcagcgagagcgagagaaacaagctggccatgctgaccggcgtgctgctggccaacggcacctag

SEQ ID NO: 181414 - DNA, 603 bp, Artificial Sequence
  derived and/or modified sequence
atgctgctggagcagaacctgatcaccgtggacatgcagaagcacagcctgaccttctggtggctggtggagtgctggccccaggtgttcaacaagctgatcagaagatacaagtacctggagaagggcttcgaggacgaggtgaagaagctgctgctgttcctgaagggcttcagcgagagcgagagaaacaagctggccatgctgaccggcgtgctgctggccaacggcaccctgaacgccagcatcctgaacagcctgtacaacgagaacctggtgaaggagggcgtgagcgccgccttcgccgtgaagctgttcaagagctggatcaacgagaaggacatcaacgccgtggccgccagcctgagaaaggtgagcatggacaacagactgatggagctgttccccgccaacaagcagagcgtggagcacttcaccaagtacttcaccgaggccggcctgaaggagctgagcgagtacgtgagaaaccagcagaccatcggcgccagaaaggagctgcagaaggagctgcaggagcagatgagcagaggcgaccccttcaaggacatcatcctgtacgtgaaggaggagatgaagaagtag

SEQ ID NO: 181415 - DNA, 468 bp, Artificial Sequence
  derived and/or modified sequence
atgaacaaccagaagcagcagaagcccaccctgagcggccagagattcaagaccagaaagagagacgagaaggagagattcgaccccacccagttccaggactgcatcatccagggcctgaccgagaccggcaccgacctggaggccgtggccaagttcctggacgccagcggcgccaagctggactacagaagatacgccgagaccctgttcgacatcctggtggccggcggcatgctggcccccggcggcaccctggccgacgacatgatgagaaccgacgtgtgcgtgttcgccgcccaggaggacctggagaccatgcaggccttcgcccaggtgttcaacaagctgatcagaagatacaagtacctggagaagggcttcgaggacgaggtgaagaagctgctgctgttcctgaagggcttcagcgagagcgagagaaacaagctggccatgctgaccggctag

SEQ ID NO: 181416 - DNA, 651 bp, Artificial Sequence
  derived and/or modified sequence
atgaacaaccagaagcagcagaagcccaccctgagcggccagagattcaagaccagaaagagagacgagaaggagagattcgaccccacccagttccaggactgcatcatccagggcctgaccgagaccggcaccgacctggaggccgtggccaagttcctggacgccagcggcgccaagctggactacagaagatacgccgagaccctgttcgacatcctggtggccggcggcatgctggcccccggcggcaccctggccgacgacatgatgagaaccgacgtgtgcgtgttcgccgcccaggaggacctggagaccatgcaggccttcgcccaggtgttcaacaagctgatcagaagatacaagtacctggagaagggcttcgaggacgaggtgaagaagctgctgctgttcctgaagggcttcagcgagagcgagagaaacaagctggccatgctgaccggcgtgctgctggccaacggcaccctgaacgccagcatcctgaacagcctgtacaacgagaacctggtgaaggagggcgtgagcgccgccttcgccgtgaagctgttcaagagctggatcaacgagaaggacatcaacgccgtggccgccagcctgagaaaggtgagcatggacaacagactgatgtag

SEQ ID NO: 181417 - DNA, 489 bp, Artificial Sequence
  derived and/or modified sequence
atgaataatcagaaacagcagaagcctacactgtccggacagagattcaaaacacgtaaacgcgatgaaaaagagagattcgaccctactcaatttcaagactgcatcattcagggacttacggaaaccggaactgacctggaggccgtagctaagtttttggatgcctcaggcgccaagcttgactatagacgttacgcggaaaccctgtttgatatacttgtggccggaggcatgctcgcccccggcggcactctggcagacgacatgatgaggaccgatgtctgtgtgtttgcagcccaagaagacttagaaaccatgcaagcgtttgcacaagtcttcaacaagctgatcagacgatacaaatatctcgagaaagggttcgaagacgaagtgaaaaaattactgttgttcctcaaaggcttctcagagtctgagcggaacaagctagccatgcttacaggggtgcttctggctaatgggacctag

SEQ ID NO: 181418 - DNA, 603 bp, Artificial Sequence
  derived and/or modified sequence
atgctcttggaacagaatctgatcacagtggacatgcaaaagcatagtctcaccttttggtggttagtggagtgctggccccaggtgtttaacaagctaatccgccgatataagtatctcgaaaagggctttgaagacgaagtcaagaagttgctgctgttcttgaaaggcttttcagagtccgagaggaacaaactggctatgctgaccggtgtgttgctcgcaaacggcaccctgaacgcgtctatcctaaactccctgtataatgagaacctcgtcaaggagggcgtgtctgcagctttcgcagttaagctgttcaagtcctggataaacgagaaagatattaatgcagtggcggcctccctgcgaaaggtttccatggataatcgactgatggagttgtttcccgctaacaaacaaagcgttgagcatttcactaagtacttcaccgaggccggcctgaaagagctcagcgagtatgtacggaaccagcagacaatcggagcaagaaaggaacttcagaaagaacttcaggagcagatgagtcgaggtgacccatttaaagacatcatcctgtatgtaaaagaggagatgaaaaagtag

SEQ ID NO: 181419 - DNA, 468 bp, Artificial Sequence
  derived and/or modified sequence
atgaacaaccaaaagcagcagaagcctactctttccggtcagcgctttaaaacacggaagcgggatgagaaagagagattcgatccaacccagtttcaggattgtatcatacaaggcctgaccgagaccgggacagatcttgaagctgttgctaagtttctggatgcttccggcgctaagctggactaccggaggtatgctgagacgttgttcgatattcttgtggccggaggaatgcttgcccccggcggcactctcgcagacgacatgatgagaacagatgtgtgcgtctttgccgcccaggaggacctggaaactatgcaggccttcgcccaggtgtttaacaagcttatccgaaggtacaagtatcttgaaaaaggctttgaagacgaggttaaaaaactgctgctgtttctaaagggtttctccgagtcggaacgcaacaaactggctatgttgacagggtag

SEQ ID NO: 181420 - DNA, 651 bp, Artificial Sequence
  derived and/or modified sequence
atgaacaatcagaaacagcagaagccaaccctgtctggacagaggtttaagacaaggaagcgcgatgaaaaagagcgctttgatccgacacagtttcaagattgtattattcaggggctcaccgagactgggacagaccttgaggcagtggccaagttcctagatgcttccggagccaagctcgactaccgtcggtatgctgaaacgctctttgatattttagtggcaggagggatgttggcccccggcggcacattggctgatgatatgatgaggactgacgtttgcgtgttcgcagcccaggaagatttagagacgatgcaggctttcgcacaggtcttcaacaagctgatccgccggtacaaatatttagaaaaaggctttgaggacgaggttaaaaagctgctgctgttcttgaaggggttttcagagagcgaacgcaacaagttggctatgctgaccggggtgttgttagccaacggtaccctcaacgccagcattctcaactctctgtataacgagaacctcgtgaaggaaggggtgagtgctgccttcgcggtgaagttattcaaatcttggattaacgagaaggacatcaacgcagttgctgccagcctgcggaaagtctctatggacaaccggttgatgtag

SEQ ID NO: 181421 - DNA, 489 bp, Artificial Sequence
  derived and/or modified sequence
atgaacaaccagaagcagcagaagcccaccctgagcggccagcgcttcaagaccaggaagagagatgagaaggagagatttgaccccacccagttccaggactgcatcatccagggcctgacagaaacaggaacagacctggaggccgtggccaagttcctggatgccagcggggccaagctggactaccgccgctatgcagagaccctgtttgacatcctggtggccggcggcatgctggcccctgggggcaccctggctgatgacatgatgaggacagatgtgtgtgtgtttgctgcccaggaggacctggagaccatgcaggcctttgcccaggtgttcaacaagctgatccgccgctacaagtacctggagaagggctttgaagatgaggtgaagaagctgctgctcttcctgaagggcttcagcgagagcgagaggaacaagctggccatgctgactggagtgctgctggccaacggcacctag

SEQ ID NO: 181422 - DNA, 603 bp, Artificial Sequence
  derived and/or modified sequence
atgctgctggagcagaacctgatcaccgtggacatgcagaagcacagcctgaccttctggtggctggtggagtgctggccccaggtgttcaacaagctgatccgccgctacaagtacctggagaagggctttgaagatgaggtgaagaagctgctgctcttcctgaagggcttcagcgagagcgagaggaacaagctggccatgctgactggagtgctgctggccaacggcaccctgaatgccagcatcctgaacagcctgtacaatgaaaacctggtgaaggagggcgtgtctgctgcctttgctgtgaagctgttcaagtcctggatcaatgagaaggacatcaatgctgtggccgccagcctgaggaaggtgtccatggacaaccggctgatggagctgtttcctgccaacaagcagagcgtggagcacttcaccaagtacttcacagaggccggcctgaaggagctgtctgaatatgtgaggaaccagcagaccatcggggccaggaaggagctgcagaaggagctgcaggagcagatgagcagaggagaccccttcaaggacatcatcctgtatgtgaaggaggagatgaagaagtag

SEQ ID NO: 181423 - DNA, 468 bp, Artificial Sequence
  derived and/or modified sequence
atgaacaaccagaagcagcagaagcccaccctgagcggccagcgcttcaagaccaggaagagagatgagaaggagagatttgaccccacccagttccaggactgcatcatccagggcctgacagaaacaggaacagacctggaggccgtggccaagttcctggatgccagcggggccaagctggactaccgccgctatgcagagaccctgtttgacatcctggtggccggcggcatgctggcccctgggggcaccctggctgatgacatgatgaggacagatgtgtgtgtgtttgctgcccaggaggacctggagaccatgcaggcctttgcccaggtgttcaacaagctgatccgccgctacaagtacctggagaagggctttgaagatgaggtgaagaagctgctgctcttcctgaagggcttcagcgagagcgagaggaacaagctggccatgctgaccggctag

SEQ ID NO: 181424 - DNA, 651 bp, Artificial Sequence
  derived and/or modified sequence
atgaacaaccagaagcagcagaagcccaccctgagcggccagcgcttcaagaccaggaagagagatgagaaggagagatttgaccccacccagttccaggactgcatcatccagggcctgacagaaacaggaacagacctggaggccgtggccaagttcctggatgccagcggggccaagctggactaccgccgctatgcagagaccctgtttgacatcctggtggccggcggcatgctggcccctgggggcaccctggctgatgacatgatgaggacagatgtgtgtgtgtttgctgcccaggaggacctggagaccatgcaggcctttgcccaggtgttcaacaagctgatccgccgctacaagtacctggagaagggctttgaagatgaggtgaagaagctgctgctcttcctgaagggcttcagcgagagcgagaggaacaagctggccatgctgactggagtgctgctggccaacggcaccctgaatgccagcatcctgaacagcctgtacaatgaaaacctggtgaaggagggcgtgtctgctgcctttgctgtgaagctgttcaagtcctggatcaatgagaaggacatcaatgctgtggccgccagcctgaggaaggtgtccatggacaaccggctgatgtag

SEQ ID NO: 181425 - DNA, 489 bp, Artificial Sequence
  derived and/or modified sequence
atgaacaaccagaagcagcagaagcccaccctgagcggccagcggttcaaaaccagaaaacgagacgagaaagaaagatttgatccaacccagtttcaggattgtattattcagggcttgacagaaaccggcacagatctggaggcggtggcgaaatttctcgacgcaagcggggctaagctggattacagaaggtacgccgaaactttgtttgacattttagtagccggaggaatgctggcaccggggggcaccctggccgacgacatgatgaggaccgacgtttgcgtgttcgccgcacaggaggacctggagacaatgcaagcgttcgcccaagtctttaacaagctgattaggcggtacaaatacctcgaaaagggcttcgaggacgaggtgaagaagctccttctcttcttgaagggattttccgagagtgagcgcaataaactagctatgctgactggagttctgctggctaatggcacatag

SEQ ID NO: 181426 - DNA, 603 bp, Artificial Sequence
  derived and/or modified sequence
atgctgctggagcagaacctgatcaccgtggacatgcagaagcactccctgacattctggtggctggtggagtgctggccgcaggttttcaataaactgataagacggtacaaatatctcgaaaaggggttcgaggatgaagtgaagaagctccttctgttcttgaaaggctttagcgagtccgaacgcaataagctggctatgctgacaggcgtgttactcgctaacggtacactgaatgcctctatcctgaactccctgtataacgaaaatctggtaaaggagggcgtttctgcggccttcgcggtaaaactgttcaagagttggatcaacgaaaaggacatcaacgccgtggcagctagtctgcgaaaggtgagcatggataacagactcatggaacttttcccggcgaacaagcagtcagttgaacacttcacaaagtattttacagaggccggactcaaagagttatcggagtacgtgaggaaccagcaaacaataggtgcccgaaaggagctgcagaaagagctacaggaacaaatgtcccgcggcgatccctttaaggatatcatcctgtatgtgaaggaggagatgaagaaatag

SEQ ID NO: 181427 - DNA, 468 bp, Artificial Sequence
  derived and/or modified sequence
atgaacaaccagaagcagcagaagcccaccctgagcggccagcggtttaaaaccaggaagcgggacgaaaaagaacgattcgaccccactcagttccaggactgtataatccagggactgactgaaactggcaccgacctggaagcagtggctaagtttcttgacgcatccggcgcaaaactcgattatagacggtatgccgaaaccttattcgatatattagttgccggaggaatgttggcccctggtgggacactggccgatgacatgatgagaacagatgtttgtgtgttcgcagcccaggaagatctggagaccatgcaggccttcgcccaggtcttcaacaagttaatccgtaggtataagtacttggagaaggggtttgaggacgaagtcaagaagctgctgttgtttctcaaaggcttctcggagtcagagcggaacaagctcgcgatgctgaccgggtag

SEQ ID NO: 181428 - DNA, 651 bp, Artificial Sequence
  derived and/or modified sequence
atgaacaaccagaagcagcagaagcccaccctgagcggccagcggttcaaaacaagaaagagggatgaaaaggagcggtttgatccaacccagtttcaggattgtattatccagggcttgaccgaaaccgggaccgacctggaggccgtcgcaaagtttctggatgcctccggcgccaaactcgactataggcgctatgcagagaccctgttcgacatcctcgtggcaggtggaatgctggcgccgggcggtacccttgcagacgatatgatgcggactgatgtgtgtgtgtttgccgctcaggaagatctcgagactatgcaagcttttgcccaggtcttcaataaattgatacgtcggtacaagtacctagagaagggattcgaggacgaagtgaagaaactcctcctgtttctaaagggctttagcgagtcggagcgaaataaattggcaatgcttacgggagtcctcctggccaatgggaccctgaacgcaagcatcttgaactcattatataacgaaaatttagttaaggaaggagtcagcgctgcctttgctgtgaaactgttcaaaagttggatcaacgagaaggatatcaacgctgtcgcggcctctctgagaaaagtctcaatggataaccgcctcatgtag

SEQ ID NO: 181429 - DNA, 489 bp, Artificial Sequence
  derived and/or modified sequence
atgaacaaccagaagcagcagaagcccactttatctggccagcgcttcaagacgcgcaagcgcgatgaaaaggaacgcttcgacccgacgcagttccaggattgcattatccagggattaacggagactggcaccgatcttgaggcagtcgcaaagtttctggacgcctccggagctaagctcgattatcggcgttatgctgaaactttatttgacatcctcgtggccggaggtatgctggcgccaggtggtactttggccgacgacatgatgcggacagacgtgtgtgtgtttgctgctcaagaggacttggaaacaatgcaggcatttgctcaagtctttaacaaactgataaggcgatacaaatacctggagaagggcttcgaggatgaggtgaagaagctgttgctgtttcttaagggcttctcggaatccgaaagaaataagctggctatgctgaccggcgtgctgcttgcgaacggcacctag

SEQ ID NO: 181430 - DNA, 603 bp, Artificial Sequence
  derived and/or modified sequence
atgctcttggaacagaacctaatcactgttgatatgcagaagcattcactcaccttctggtggcttgtggaatgttggccacaggtgttcaacaaactcatacggaggtacaagtacctggagaaaggcttcgaggatgaggtgaagaagctcttattgttcctgaaggggttctccgaatctgaacgcaataaactggcaatgttgacaggcgttctcctcgcgaacggcaccttaaatgcatctatactcaacagcctgtataacgaaaatctcgtgaaagagggggtgagcgccgcatttgcagtcaaactgtttaagtcatggataaatgaaaaagacattaacgcagtagctgcatccctgcggaaggtgtcaatggataacaggttaatggagctgttccctgccaataagcagtccgtagagcacttcaccaagtatttcactgaagccggactgaaggagctgagcgagtatgtcaggaatcagcagacaatcggagcacgcaaggaattacagaaggaactccaggagcagatgagccggggagacccttttaaggacatcatcctctatgtgaaggaagagatgaagaagtag

SEQ ID NO: 181431 - DNA, 468 bp, Artificial Sequence
  derived and/or modified sequence
atgaacaatcagaagcagcaaaaaccaaccctctctggccaaaggttcaaaacccgcaagcgcgatgaaaaagagcgctttgacccaactcagtttcaggattgcatcattcagggactgactgagacaggtactgacctggaggcggttgctaaatttctcgatgccagtggcgctaaactggattatagacgatacgccgagaccctgtttgacatattagtggcaggcggtatgttagcgccaggcggtaccctggccgatgatatgatgcgtactgacgtgtgcgtgtttgccgcacaagaggatttggaaaccatgcaggcatttgctcaggtcttcaacaaattgattaggcgttacaagtacttagaaaaagggtttgaagacgaagtaaaaaaactcctgctgtttctgaaaggattctcagagagcgaaaggaataaactcgccatgctgacggggtag

SEQ ID NO: 181432 - DNA, 651 bp, Artificial Sequence
  derived and/or modified sequence
atgaacaaccagaaacagcaaaaacccacattatccggccagagatttaaaacccggaagcgtgacgagaaagaacgctttgaccctacacaattccaggattgtattattcaggggctcaccgaaaccggcacagatttagaggccgttgccaagtttttagacgccagcggcgctaaactggattaccggaggtatgcagagaccctattcgatattcttgtggcagggggaatgctggctccgggaggtactctggccgacgatatgatgagaacggatgtctgcgtgttcgccgctcaggaggatttggaaacgatgcaggcctttgctcaagtctttaataaactcatccgaaggtataaatacctggagaaggggtttgaggacgaggtaaaaaagctcctgctctttctgaagggattctctgaaagtgagcgaaacaaacttgcaatgctaactggagtgctgctggccaacggaacactcaacgccagcatcctaaattccctgtataacgaaaatctcgtgaaggagggggtttctgccgctttcgcagtgaagctttttaagtcttggataaacgagaaggacattaatgcagtggcagccagcttaaggaaagtgtctatggacaaccgtctgatgtag

SEQ ID NO: 181433 - DNA, 1059 bp, Artificial Sequence
  derived and/or modified sequence
gacttccggtgctggaggagggggccggcggcgagggactccaggaggacgcgtccaacttcgagaccggcgggggccggctccgctcttccaacccctccatgtgtgaagagggcggacgacgcagcgggggaagaaaaataagctagtctaggacaagtgtccaggcgacgtggaacccagtaagggaataaagaagactggaaacgtctctcccctcccctatcccagtccctcaccctaatccgcgcgcaatagaaaaggcggaagcgcctgtccacgatcagggcggggcaaggggaagaaatctcgcgataggagagcggtccgggcgggggtggcacctctccctcctcctggcgttagttccggtcgcagaggagacaccgccgcagttgccgggtgtcttttatgaataatcaaaagcagcaaaagccaacgctatcaggccagcgttttaaaactagaaaaagagatgaaaaagagaggtttgaccctactcagtttcaagactgtattattcaaggcttaactgaaaccggtactgatttggaagcagtagctaagtttcttgatgcttctggagcaaaacttgattaccgtcgatatgcagaaacactctttgacattctggtggctggtggaatgctggccccaggtggtacactggcagatgacatgatgcgtacagatgtctgcgtgtttgcagcccaagaagatctagagaccatgcaagcatttgctcaggtttttaacaagttaatcaggcgctacaaatacctggagaaaggttttgaagatgaagtaaaaaagctgctgctgttcttgaagggtttttcagagtcggagaggaacaagctagctatgttgactggtgttcttctggctaatggaacacttaatgcatccattcttaatagcctttataatgaaaatttggttaaagaaggagtttcagcagcttttgctgtgaagctctttaaatcatggataaatgaaaaagatatcaatgcagtagctgcaagtcttcggaaagtcagcatggataacagactgatg

SEQ ID NO: 181434 - protein, 1083 aa, Artificial Sequence
  derived and/or modified sequence
MFSFEGDFKTRPKVSLGGASRKEEKASLLHRTQEERRKREEERRRLKNAIIIQSFIRGYRDRKQQYSIQRSAFDRCATLSQSGGAFPIANGPNLTLLVRQLLFFYKQNEDSKRLIWLYQNLIKHSSLFVKQLDGSERLTCLFQIKRLMSLCCRLLQNCNDDSLNVALPMRMLEVFSSENTYLPVLQDASYVVSVIEQILHYMIHNGYYRSLYLLINSKLPSSIEYSDLSRVPIAKILLENVLKPLHFTYNSCPEGARQQVFTAFTEEFLAAPFTDQIFHFIIPALADAQTVFPYEPFLNALLLIESRCSRKSGGAPWLFYFVLTVGENYLGALSEEGLLVYLRVLQTFLSQLPVSPASASCHDSASDSEEESEEADKPSSPEDGRLSVSYITEECLKKLDTKQQTNTLLNLVWRDSASEEVFTTMASVCHTLMVQHRMMVPKVRLLYSLAFNARFLRHLWFLISSMSTRMITGSMVPLLQVISRGSPMSFEDSSRIIPLFYLFSSLFSHSLISIHDNEFFGDPIEVVGQRQSSMMPFTLEELIMLSRCLRDACLGIIKLAYPETKPEVREEYITAFQSIGVTTSSEMQQCIQMEQKRWIQLFKVITNLVKMLKSRDTRRNFCPPNHWLSEQEDIKADKVTQLYVPASRHVWRFRRMGRIGPLQSTLDVGLESPPLSVSEERQLAVLTELPFVVPFEERVKIFQRLIYADKQEVQGDGPFLDGINVTIRRNYIYEDAYDKLSPENEPDLKKRIRVHLLNAHGLDEAGIDGGGIFREFLNELLKSGFNPNQGFFKTTNEGLLYPNPAAQMLVGDSFARHYYFLGRMLGKALYENMLVELPFAGFFLSKLLGTSADVDIHHLASLDPEVYKNLLFLKSYEDDVEELGLNFTVVNNDLGEAQVVELKFGGKDIPVTSANRIAYIHLVADYRLNRQIRQHCLAFRQGLANVVSLEWLRMFDQQEIQVLISGAQVPISLEDLKSFTNYSGGYSADHPVIKVFWRVVEGFTDEEKRKLLKFVTSCSRPPLLGFKELYPAFCIHNGGSDLERLPTASTCMNLLKLPEFYDETLLRSKLLYAIECAAGFELS

SEQ ID NO: 181435 - DNA, 3252 bp, Artificial Sequence
  derived and/or modified sequence
atgttcagcttcgagggcgacttcaagaccagacccaaggtgagcctgggcggcgccagcagaaaggaggagaaggccagcctgctgcacagaacccaggaggagagaagaaagagagaggaggagagaagaagactgaagaacgccatcatcatccagagcttcatcagaggctacagagacagaaagcagcagtacagcatccagagaagcgccttcgacagatgcgccaccctgagccagagcggcggcgccttccccatcgccaacggccccaacctgaccctgctggtgagacagctgctgttcttctacaagcagaacgaggacagcaagagactgatctggctgtaccagaacctgatcaagcacagcagcctgttcgtgaagcagctggacggcagcgagagactgacctgcctgttccagatcaagagactgatgagcctgtgctgcagactgctgcagaactgcaacgacgacagcctgaacgtggccctgcccatgagaatgctggaggtgttcagcagcgagaacacctacctgcccgtgctgcaggacgccagctacgtggtgagcgtgatcgagcagatcctgcactacatgatccacaacggctactacagaagcctgtacctgctgatcaacagcaagctgcccagcagcatcgagtacagcgacctgagcagagtgcccatcgccaagatcctgctggagaacgtgctgaagcccctgcacttcacctacaacagctgccccgagggcgccagacagcaggtgttcaccgccttcaccgaggagttcctggccgcccccttcaccgaccagatcttccacttcatcatccccgccctggccgacgcccagaccgtgttcccctacgagcccttcctgaacgccctgctgctgatcgagagcagatgcagcagaaagagcggcggcgccccctggctgttctacttcgtgctgaccgtgggcgagaactacctgggcgccctgagcgaggagggcctgctggtgtacctgagagtgctgcagaccttcctgagccagctgcccgtgagccccgccagcgccagctgccacgacagcgccagcgacagcgaggaggagagcgaggaggccgacaagcccagcagccccgaggacggcagactgagcgtgagctacatcaccgaggagtgcctgaagaagctggacaccaagcagcagaccaacaccctgctgaacctggtgtggagagacagcgccagcgaggaggtgttcaccaccatggccagcgtgtgccacaccctgatggtgcagcacagaatgatggtgcccaaggtgagactgctgtacagcctggccttcaacgccagattcctgagacacctgtggttcctgatcagcagcatgagcaccagaatgatcaccggcagcatggtgcccctgctgcaggtgatcagcagaggcagccccatgagcttcgaggacagcagcagaatcatccccctgttctacctgttcagcagcctgttcagccacagcctgatcagcatccacgacaacgagttcttcggcgaccccatcgaggtggtgggccagagacagagcagcatgatgcccttcaccctggaggagctgatcatgctgagcagatgcctgagagacgcctgcctgggcatcatcaagctggcctaccccgagaccaagcccgaggtgagagaggagtacatcaccgccttccagagcatcggcgtgaccaccagcagcgagatgcagcagtgcatccagatggagcagaagagatggatccagctgttcaaggtgatcaccaacctggtgaagatgctgaagagcagagacaccagaagaaacttctgcccccccaaccactggctgagcgagcaggaggacatcaaggccgacaaggtgacccagctgtacgtgcccgccagcagacacgtgtggagattcagaagaatgggcagaatcggccccctgcagagcaccctggacgtgggcctggagagcccccccctgagcgtgagcgaggagagacagctggccgtgctgaccgagctgcccttcgtggtgcccttcgaggagagagtgaagatcttccagagactgatctacgccgacaagcaggaggtgcagggcgacggccccttcctggacggcatcaacgtgaccatcagaagaaactacatctacgaggacgcctacgacaagctgagccccgagaacgagcccgacctgaagaagagaatcagagtgcacctgctgaacgcccacggcctggacgaggccggcatcgacggcggcggcatcttcagagagttcctgaacgagctgctgaagagcggcttcaaccccaaccagggcttcttcaagaccaccaacgagggcctgctgtaccccaaccccgccgcccagatgctggtgggcgacagcttcgccagacactactacttcctgggcagaatgctgggcaaggccctgtacgagaacatgctggtggagctgcccttcgccggcttcttcctgagcaagctgctgggcaccagcgccgacgtggacatccaccacctggccagcctggaccccgaggtgtacaagaacctgctgttcctgaagagctacgaggacgacgtggaggagctgggcctgaacttcaccgtggtgaacaacgacctgggcgaggcccaggtggtggagctgaagttcggcggcaaggacatccccgtgaccagcgccaacagaatcgcctacatccacctggtggccgactacagactgaacagacagatcagacagcactgcctggccttcagacagggcctggccaacgtggtgagcctggagtggctgagaatgttcgaccagcaggagatccaggtgctgatcagcggcgcccaggtgcccatcagcctggaggacctgaagagcttcaccaactacagcggcggctacagcgccgaccaccccgtgatcaaggtgttctggagagtggtggagggcttcaccgacgaggagaagagaaagctgctgaagttcgtgaccagctgcagcagaccccccctgctgggcttcaaggagctgtaccccgccttctgcatccacaacggcggcagcgacctggagagactgcccaccgccagcacctgcatgaacctgctgaagctgcccgagttctacgacgagaccctgctgagaagcaagctgctgtacgccatcgagtgcgccgccggcttcgagctgagctag

SEQ ID NO: 181436 - DNA, 3252 bp, Artificial Sequence
  derived and/or modified sequence
atgttttcgttcgaaggcgactttaagacgaggcccaaggtgagtttgggcggcgctagtaggaaggaggagaaagcgtctctgctccatagaacccaggaagaaaggcggaagcgcgaggaagagcgcagacggctaaagaatgcgataatcatacaaagtttcatccgcggctaccgcgataggaagcagcagtacagcatccaacgcagcgctttcgacagatgcgctacattgtcccagtctgggggcgcctttccaatcgctaacgggccaaacctgaccctgctagtgagacagttgttgttcttctacaaacagaatgaagatagcaagagactgatttggctgtaccagaacctgattaaacattcaagccttttcgtcaaacagttggacggctcggaacgactgacctgcctgtttcagattaaacgtcttatgagcctgtgctgccggcttctgcagaactgtaacgacgatagtctcaatgtagccctacccatgagaatgctggaagttttcagcagcgaaaacacgtatctcccagttttgcaagacgccagctacgtagtttctgttatcgagcagatcctccattatatgatacataacggttattatcgatctctgtacctgctgatcaatagcaagctacccagttccatcgaatactctgacctgtctagggttcccattgcaaagatcctgctagaaaacgtcctcaagcctctgcactttacctacaacagttgcccggaaggagccagacagcaggtattcactgcattcacagaggagtttctagcagcccctttcacagaccagattttccattttatcatacccgcgctggcagacgcacagaccgtgttcccctatgagccgttcctaaacgcccttttacttattgaaagcagatgcagtcggaagtcagggggagccccctggctcttctattttgtgctgactgttggcgagaattacctgggggcattgagcgaagagggattgttggtgtatctgcgggtcctgcagacgttcctgagccagcttcccgtcagtcctgctagtgcctcttgtcacgacagtgcctctgattccgaggaagaatccgaagaagcggacaagcctagctcccccgaggatgggcgtttgtccgttagctacattaccgaagaatgcttgaagaaattggacacaaagcagcaaaccaacacgctcctcaatctcgtctggcgggattccgccagcgaagaggtgtttacgacaatggcctccgtgtgtcacacactcatggtgcaacataggatgatggtcccaaaggtgcgcctgctctatagccttgccttcaatgccaggttcctccgacatctttggttcctcatttcatctatgagcacaaggatgatcaccgggagtatggtccctttgttgcaggtgatttctcgaggatcccctatgtcatttgaggatagctcacgcatcatcccactgttctatttgttctcatcactcttttcccatagcctcattagtattcacgacaatgaattctttggcgaccccatcgaggtggtgggacagcgccagagcagcatgatgccttttaccctcgaagaactcatcatgctctctcgctgtctaagagacgcctgcctcgggatcatcaaactggcctaccctgagaccaagcccgaagtgagagaggagtacatcaccgcgtttcaaagcattggagtcactacctccagcgagatgcagcagtgcatccagatggagcagaagcggtggatccaattatttaaggtcattacaaatctcgtgaagatgttaaagtctcgcgacaccagaagaaacttttgccctcccaatcactggctttcagagcaagaggatatcaaggctgacaaagtaacccagctctatgtgcccgctagccggcatgtgtggagattcagacggatgggacgaatagggcccttacagtccaccctggacgtcggtctcgagtcccctcccctgtctgtcagtgaagagcgccagctggctgtgttgactgagctgccattcgtggtccctttcgaggagagggtgaaaattttccaaaggctcatttacgctgacaagcaggaagtgcagggcgatggaccgttccttgatgggataaacgtgacaattcgtcgaaactatatttacgaagacgcctacgataaactgagcccagagaacgaacccgacctgaagaaaagaatccgagtccacctgctcaacgctcatggactggatgaagcggggattgacggcggcggaatctttcgggagttcctgaacgagttattgaagagtggtttcaaccctaaccaaggtttctttaagacgaccaatgagggactgttgtatcccaatccagccgcacagatgttggtgggagatagttttgcacgtcattattactttcttgggcgcatgttagggaaggccctgtatgaaaacatgctggtcgaattgccgtttgcaggctttttcctgagcaaattgctggggacctctgccgacgttgacatacaccacttagcaagcttggacccagaagtgtataagaacttactcttcctcaaatcctatgaagacgacgttgaagagttgggcctgaatttcaccgtggtcaacaatgacctgggggaggcccaggtcgtggaactgaagttcggtggtaaggatattccggtcactagcgcaaacaggatcgcatacatccacctcgttgcagattaccgtctgaaccgccaaatacgccaacactgtcttgccttcaggcagggcctggctaatgtggtaagtctggaatggctccggatgtttgatcagcaagagattcaggtactgattagcggagcacaagtgcccatctccctggaagatcttaagagttttacaaattatagcggtggctacagcgccgatcaccccgtgataaaagtgttctggcgagtggtcgagggttttactgacgaggagaagcgaaaactcttaaaatttgtcacttcctgctccagaccacctctgctggggttcaaggagctatatcctgcgttttgcatccacaatggaggatctgatctggagagattgcccacagcaagcacatgtatgaatctgctgaaactgccagagttctatgacgaaacactattacgtagcaaactgctgtatgccatagagtgcgccgctggcttcgaactgtcctag

SEQ ID NO: 181437 - DNA, 3252 bp, Artificial Sequence
  derived and/or modified sequence
atgttctcctttgaaggagacttcaagacccggcccaaggtgtccctgggcggggccagcaggaaggaggagaaggccagcctgctgcacaggacccaggaggagaggaggaagcgggaggaggagcggcggcggctgaagaatgccatcatcatccagagcttcatccggggctacagagacaggaagcagcagtacagcatccagaggtctgcctttgacagatgtgccaccctgagccagagcggcggggccttccccatcgccaacggccccaacctgaccctgctggtgcggcagctgctcttcttctacaagcagaatgaagacagcaagaggctcatctggctgtaccagaacctgatcaagcacagcagcctgtttgtgaagcagctggatggcagcgagcggctgacctgcctcttccagatcaagaggctgatgagcctgtgctgccgcctgctgcagaactgcaatgatgacagcctgaatgtggccctgcccatgaggatgctggaggtgttcagcagcgagaacacctacctgcctgtgctgcaggatgccagctatgtggtgtctgtgattgagcagatcctgcactacatgatccacaacggctactaccgcagcctgtacctgctgatcaacagcaagctgcccagcagcattgagtacagcgacctgagccgggtgcccatcgccaagatcctgctggagaatgtgctgaagcccctgcacttcacctacaacagctgcccagagggcgcccggcagcaggtgttcaccgccttcacagaggagttcctggccgcccccttcacagaccagatcttccacttcatcatcccagccctggctgatgcccagaccgtcttcccctatgagcccttcctgaatgccctgctgctgattgagagccgctgcagcaggaagagcggcggggccccctggctgttctactttgtgctgactgtgggggagaactacctgggcgccctgtctgaggagggcctgctggtgtacctgcgggtgctgcagaccttcctgagccagctgcctgtgtccccagccagcgccagctgccacgacagcgccagtgacagcgaggaggagagcgaggaggccgacaagcccagcagcccagaagatggccgcctgtctgtgtcctacatcacagaggagtgcctgaagaagctggacaccaagcagcagaccaacaccctgctgaacctggtgtggagggacagcgccagcgaggaggtgttcaccaccatggcctctgtgtgccacaccctgatggtgcagcacaggatgatggtgcccaaggtgcggctgctgtacagcctggccttcaatgcccgcttcctgcggcacctgtggttcctgatcagctccatgagcaccaggatgatcaccggctccatggtgcccctgctgcaggtgatcagccggggcagccccatgagctttgaggacagcagccgcatcatccccctcttctacctgttcagcagcctcttcagccacagcctcatcagcatccatgacaatgagttcttcggggaccccatcgaggtggtgggccagaggcagagctccatgatgcccttcaccctggaggagctgatcatgctgagccgctgcctgagagatgcctgcctgggcatcatcaagctggcctacccagagaccaagccagaggtgcgggaggagtacatcacagccttccagagcattggagtgaccaccagcagcgagatgcagcagtgcatccagatggagcagaagcgctggatccagctgttcaaggtgatcaccaacctggtgaagatgctgaagagccgggacaccaggaggaacttctgcccccccaaccactggctgtctgagcaggaggacatcaaggctgacaaggtgacccagctgtatgtgcctgccagcagacatgtgtggaggttccggaggatgggcagaattggccccctgcagagcaccctggatgtgggcctggagagcccccccctgtctgtgtctgaggagcggcagctggccgtgctgacagagctgccctttgtggtgccctttgaggagcgggtgaagatcttccagaggctcatctatgctgacaagcaggaggtgcagggagatggccccttcctggatggcatcaacgtgaccatcagaagaaactacatctatgaagatgcctatgacaagctgagcccagaaaatgaaccagacctgaagaagaggatccgggtgcacctgctgaatgcccacggcctggatgaagctggcattgatggcggcggcatcttccgggagttcctgaatgagctgctgaagagcggcttcaaccccaaccagggcttcttcaagaccaccaatgaaggcctgctgtaccccaacccagctgcccagatgctggtgggggacagctttgcccggcactactacttcctgggccgcatgctgggcaaggccctgtatgagaacatgctggtggagctgccctttgctggcttcttcctgagcaagctgctgggcaccagcgcagatgtggacatccaccacctggccagcctggaccctgaggtgtacaagaacctgctcttcctgaagagctatgaagatgatgtggaggagctgggcctgaacttcaccgtggtgaacaatgacctgggggaggcccaggtggtggagctgaagtttggaggcaaggacatccctgtgaccagcgccaacagaattgcctacatccacctggtggccgactaccgcctgaaccggcagatccggcagcactgcctggccttccggcagggcctggccaacgtggtgtccctggagtggctgaggatgtttgaccagcaggagatccaggtgctgatcagcggggcccaggtgcccatcagcctggaggacctgaagagcttcaccaactacagcggcggctacagcgctgaccaccctgtgatcaaggtgttctggagggtggtggagggcttcacagatgaggagaagaggaagctgctgaagtttgtgaccagctgcagcaggcctcccctgctgggcttcaaggagctgtacccagccttctgcatccacaatggaggcagtgacctggagcggctgcccacagccagcacctgcatgaacctgctgaagctgcctgagttctatgatgagaccctgctgcggagcaagctgctgtatgccattgaatgtgccgccggctttgagctgtcctag

SEQ ID NO: 181438 - DNA, 3252 bp, Artificial Sequence
  derived and/or modified sequence
atgttcagcttcgagggcgacttcaagacccggcccaaggtgagcttaggaggcgcaagtagaaaggaagagaaagcatccctcctgcatcggacccaggaagagcgacgaaaacgggaggaggaaagacgccgactgaaaaatgcgattataatacagtcatttattagaggatatagagacaggaaacagcagtattctatccagagatcagcattcgaccgttgtgccaccctctctcaaagcggaggcgcttttcctatcgccaatggccccaatttgactctcctggttagacagctcctgttcttctataagcagaacgaagactcaaaacggctgatttggctgtatcaaaacctaattaagcatagttccctgttcgtaaagcagctggatggcagcgaaaggttgacttgtctttttcagattaagcgtctaatgtcactgtgctgccgtctgctacagaactgcaacgacgacagtcttaacgttgctctccccatgaggatgttggaggtgttctctagcgaaaatacatacctacctgtcttgcaggacgcaagctacgtggtgtctgtcattgaacaaatactgcattatatgattcataacgggtactaccgctcactctatctgctcatcaactcaaaactgccaagtagcatcgaatacagtgacctgtcgagggtgcccattgccaaaatcctgctcgagaacgtgttgaagccattgcatttcacttacaactcttgtcccgaaggcgcgaggcagcaggtgtttactgccttcacagaggagtttctggcggccccgttcacagaccagatcttccatttcatcatcccagctctggccgacgcccagactgtgtttccttacgagccttttcttaatgccttacttctgatcgagtccagatgcagccgaaagagcggcggagctccgtggctgttttattttgtcctgaccgtgggcgagaactatttaggcgctctgtccgaggaaggactactcgtgtatttaagggttcttcagacattcttgtcccaactaccagtgtccccagctagcgcgtcatgccatgatagcgcctcagatagcgaagaggagtcagaggaagccgacaaaccgtcttccccagaagacgggcgcttgtccgtgtcatacatcacagaggagtgcctgaagaaactcgacacgaaacagcagacaaacactctgctgaatctagtatggagagactcagcctcagaagaagtgttcaccaccatggccagtgtctgtcataccctgatggtccaacaccgtatgatggttccaaaggttagactgctatacagcctggcattcaatgcaagattcttgcgacatctgtggtttttaatatcttccatgagcactaggatgatcacgggatccatggtgccactcctacaggtcatttcacggggaagtcccatgagttttgaggacagcagcagaatcataccccttttctatctgtttagttcgctgtttagccacagtcttatctccatccatgataatgagttctttggtgaccccattgaggtggtgggccagcgtcaatcatctatgatgcctttcacgctcgaggagctgattatgctcagtcggtgtctgagggacgcctgcctcggcatcattaaacttgcttacccggagacaaagcctgaggtacgcgaggagtatataaccgccttccagtctatcggagtgactacttctagcgaaatgcaacagtgtatacagatggagcagaagcgctggatccagctctttaaagtgatcacaaacctcgtgaagatgcttaaaagccgcgacacccgtcgaaacttctgcccaccaaaccactggttatcagagcaagaagatattaaagcggacaaggtcacacaactctacgtacctgcttcaaggcacgtgtggcgctttcgtcgtatggggcgcattggcccactgcaatcaaccctggacgttggactggaatctccccccttgtccgtcagtgaagagcgccagctggcagtgctgacagaactgccttttgtggtaccctttgaggagagagtgaaaatctttcagcggttaatttacgcggacaagcaggaagtgcagggtgacggtcccttccttgacggaatcaatgttacgatccgccgaaattacatttacgaagacgcctatgataaactgtctcccgaaaatgagccagatttaaagaaacggatcagggtccatctgctgaatgcccatggactggacgaggccgggatcgacggcgggggaatattccgagagtttctgaacgagctcttgaaatctggatttaatcccaatcagggattcttcaaaactaccaacgaaggactcttatatcccaacccagccgcgcagatgttagttggcgattccttcgctagacattactactttctcggacgcatgttaggtaaggcactctacgaaaacatgctggtggagcttccctttgccggcttcttcctgtccaagttactgggcacctcagccgacgttgacatccaccatctggcctcactggacccggaggtctataagaacctactctttcttaagtcttacgaggatgatgtcgaggagttgggcctgaactttacggtggtgaataacgatcttggcgaagctcaggtcgttgagttgaaattcggagggaaggatatccctgtaaccagcgccaataggattgcctatatccacctcgttgccgactatcgcttaaaccgccaaatcagacagcattgccttgcattccggcaaggcctcgccaacgttgtcagcctagaatggctgcggatgtttgaccagcaggaaatacaggtgctcataagcggggcacaggtacccatcagccttgaagacctaaagtcgtttacaaactacagtggcggatattctgctgatcatccagtgatcaaggtgttttggcgtgtggttgagggattcacagatgaagaaaagaggaagctgttaaaattcgtcacctcttgctctcgcccccccctgctaggctttaaggaattgtacccagcattttgtatacacaatggaggttccgacctggagaggctgcccacagcaagcacttgcatgaatctattgaagctgccggagttttacgatgaaaccctcctgcgttctaaactcttgtatgccatagaatgcgccgctggtttcgaattgtcctag

SEQ ID NO: 181439 - DNA, 3252 bp, Artificial Sequence
  derived and/or modified sequence
atgttcagtttcgagggcgactttaagactagacctaaagtatcgctcgggggagctagccgcaaggaggagaaggcctcactgctgcaccgaacccaggaagaaaggagaaaacgcgaagaggagaggagacgcctgaagaatgcaatcattatccaatctttcattagggggtaccgagacagaaagcagcaatactccatccagaggtctgcctttgacaggtgtgccacactgagccagtccggaggggcttttcctattgccaatggaccaaatctgacactattggttagacagctcctgtttttttataaacagaacgaggacagcaagagactaatttggctctaccagaatctgatcaagcactcaagtctattcgttaagcaactggatggatccgaacgtttgacatgcttgttccagatcaaaaggctgatgtctttgtgttgtagactgctgcagaactgtaacgatgatagcctcaacgtggcactccccatgcgcatgttggaggtattttccagtgagaatacttacttgcccgtactccaggacgcctcatatgttgtgtctgtgattgaacagattctgcactatatgattcacaatggctactatcggagtctttatcttcttatcaactcgaaactcccatcatcaatcgagtactcagacctgagccgagttccgatagccaagattctgctggagaacgtgttgaaacccctccacttcacatataactcgtgccctgaaggtgcaagacagcaagtgtttacggcttttacggaagagtttctggccgctccattcacggaccagattttccatttcattattcctgctctcgcagacgcccagaccgtcttcccatatgaaccatttttgaatgcgctcctgctgatcgagtctcgatgtagccgcaagtcagggggtgccccatggctcttctacttcgtactgacagtcggcgagaactacctcggcgcattgtccgaagaaggactgctcgtgtaccttcgggttctgcagacgttcctgagtcagcttcccgtgtctcccgcatccgcaagctgtcacgactctgcgtccgacagcgaggaagagtcggaggaagcagataagcctagttcccccgaagatggtagattgagtgtttcttacatcactgaggagtgccttaaaaagcttgacaccaagcagcagacaaacacgctcctgaatctggtctggagggattcggctagcgaggaagtctttaccaccatggcatcagtgtgccacacactgatggtccaacacagaatgatggttccgaaagtacgcctgctgtattcgctggccttcaacgctagatttctgagacacctgtggttcctgatctctagtatgtctacgcgtatgatcacgggctccatggttcccctactacaggttatttctagaggctcacctatgtcatttgaagacagcagtcgcataatccccctgttctacctgttctcctcacttttcagccatagcctcatctccattcatgacaacgagtttttcggcgatccaattgaggtggttggacagagacaaagtagtatgatgccttttacacttgaagagctaatcatgctctcacggtgccttagggacgcttgtttgggaatcatcaaactggcttacccagaaaccaaacctgaggttcgggaggaatatatcaccgcgtttcagtccataggtgtgaccacatcttctgaaatgcagcaatgcatccagatggagcaaaaaagatggatacagttgttcaaagtgatcacgaaccttgtaaagatgctcaagagcagggatacaagaagaaacttctgtcccccaaaccattggctgtcagagcaggaggacatcaaagccgacaaggttacacagctgtatgtacctgccagcagacacgtgtggcgctttcggagaatgggtcgtattgggccattgcagagcactctcgatgttggtcttgagagtccccctctgtctgtgtctgaagagcggcagttggccgtcctcactgagttaccttttgtcgtgcctttcgaggagcgcgtcaaaatatttcagcgccttatttatgccgataagcaggaagtccagggtgacgggccatttttggacggtataaacgttacaatcaggcggaattacatctatgaagacgcctatgacaagctgtctccagagaatgagccagatctcaagaaacgcattcgtgtccacctgttaaacgctcatggcttggacgaggccggtatcgacggcggaggtatctttagggagttcctaaacgaattacttaaatccggattcaatcctaaccaggggttttttaaaaccacgaatgaagggctcctctatccaaatccagccgctcaaatgttggttggtgatagtttcgcaaggcactattatttcctggggaggatgctgggtaaggccctctacgagaacatgcttgttgagttgccgtttgcaggcttctttttgtctaagctcctcggaacttcagccgacgttgacatccaccaccttgcctctttagatcccgaagtatacaagaacttactgttcctcaaatcttatgaagatgatgtcgaggagctgggtcttaactttactgtggtgaacaatgatcttggcgaggcacaggtggttgagctgaagttcggcggaaaggacattcccgttacaagcgcgaaccggatcgcttacattcacctagtggcagactacagacttaataggcagataagacaacattgtctggcctttagacagggattggcaaacgtggtcagcttagagtggctccgcatgttcgatcaacaggagatccaggtactgattagcggtgcgcaagtaccaatatcactggaggatctgaagtctttcacgaattatagcggcggttattctgcggatcacccagtgatcaaagttttctggcgcgtcgtggaggggtttactgatgaggagaagcgcaaattgttaaagtttgtgaccagttgcagtcgcccacccctactgggatttaaagagctttatccagccttttgtatccacaacgggggttcagacttggagagattgcccacagccagcacttgcatgaacctcctgaagctgcccgagttttacgacgaaactctgcttagatctaaactgctctatgctatcgagtgcgctgcaggctttgaattgtcttag

SEQ ID NO: 181440 - DNA, 5229 bp, Artificial Sequence
  derived and/or modified sequence
tctgcagggccgcgcacgcactgacggctgaccgccatcttccctcccgaggcggcagttccaggtgcaagcgccgggtttgctgcccgctgggcgcccctgcagcggcccgagctgtggccggcgtggatgaggggcaggcgaggcagggccgcccctccagtattgccgcccctcccgccccagggcagggctgggagggtacagcccgggggcgggctcgggtcgcctcccggccgccgcgtcctcgctgccccgggccgggcgggcgggcgccgagagcctcccagcccgccccgtgccccgcccgcccggctgcttccgcggcggcgctgcccgcacatgggctaggctgccaggatgttcagcttcgaaggcgacttcaagacgcggcccaaggtgtcccttggcggcgcgagcaggaaggaggaaaaggcttctcttttacatcgtactcaggaagaaagaagaaagagagaggaagaaaggcgaaggttgaaaaatgcaataattatccagtcatttattcgaggctatagagacagaaaacagcaatattccatccaaagaagtgcatttgatcgctgtgctaccttgtcacagtccgggggcgcttttcccattgctaatggccccaaccttacccttttggtaaggcagcttctgtttttttacaaacaaaatgaagactcaaaacgtttgatatggctgtatcagaacttaattaaacacagctctctgtttgtcaagcagttggatggatctgagagacttacatgcttatttcagataaaaagattgatgagcctctgttgcaggttgctgcaaaactgtaatgatgacagtttgaatgttgcacttccaatgagaatgcttgaagtattttcgtctgagaatacttacttgcctgttttacaagatgctagctatgtggtgtcagtgattgaacaaattttgcactacatgattcacaatgggtattataggtctctatatttgttgattaacagcaagcttccatcaagtattgaatattctgatttatctcgagttcctatagcaaaaattttgctagagaatgttctaaaaccattgcactttacttacaactcctgtccggaaggtgcgaggcaacaagtttttacagccttcacagaggagtttctggcagcaccttttacagatcagatttttcatttcatcattccggcgcttgcagatgcgcagaccgttttcccttacgagccctttctgaatgcactgttgttaatagagagtagatgttcaagaaagagtggtggagcaccctggcttttctatttcgttttaactgttggcgaaaattatttgggggccctctctgaggaagggctgctggtgtatttgcgggtgctgcagaccttcctctctcagttaccagtctctcctgccagcgcgagctgtcacgactcagccagtgactctgaggaggagagtgaagaagccgacaagccctcaagcccggaggatggcagactgtcagtatcatacataacagaggaatgcctgaagaagctggacacaaagcagcagaccaacaccctgctcaacctggtgtggagggactctgcgagcgaggaggtcttcaccaccatggcctccgtctgccacacgctgatggtgcagcaccgcatgatggtacccaaagtcaggcttctctacagtttagcctttaatgccaggtttctgagacatctttggtttctaatatcttccatgtcaacacggatgatcacagggtctatggtaccgttgcttcaggtgatatccaggggttctcctatgtcttttgaagattctagtcgaatcatcccactcttttatctttttagctccttgtttagtcattcactaatttccatacatgataacgaattcttcggtgatcccatagaagttgtaggtcaaagacaatcatcaatgatgccttttactttagaagagctgataatgttgtctcgatgccttcgagatgcatgcctggggatcatcaagttggcttatccagaaaccaagccagaagttcgagaagaatatattacagcatttcagagtattggagttactactagctctgaaatgcaacaatgcatacagatggaacagaaaagatggattcagttatttaaggttatcaccaatctagtgaaaatgttgaagtccagagacacgaggagaaatttttgtcctccaaaccactggctgtcagaacaagaagatattaaagcagataaggtcactcagctctatgtgccagcatccagacatgtgtggaggttccggcggatggggaggataggcccgctgcagtccaccctggacgtgggtttggagtccccgccgctgtctgtgtctgaggaaagacagcttgctgtcctgacagagttgccttttgtggttccatttgaggaacgagtaaagatctttcagaggttgatttatgcagataagcaagaagttcaaggagatggtccatttctggatggaattaatgtcacaataagaagaaattacatttatgaagatgcttatgacaaactttctccagaaaatgagcctgatttgaaaaagcggatccgtgtgcacttgctcaatgcccatggcctggatgaagctggcattgatggtggtggtattttcagagagtttttaaatgaactactgaagtcaggatttaaccccaaccaggggttctttaagactactaatgaagggcttctgtaccccaacccggctgctcagatgcttgtgggagattcttttgccagacattactacttcctaggcagaatgcttggaaaggctctctatgagaacatgctggtggagctgccctttgcaggcttctttctttccaagttgcttggaaccagtgccgacgtggacattcaccacctcgcctccctagaccctgaggtgtataagaatttgctctttctgaagagctacgaagacgatgtggaggagcttgggctgaacttcactgtggtgaacaatgacctgggagaggcgcaggtagttgaactaaaattcggtgggaaagacatccctgtcaccagcgccaaccggattgcgtacatccacttggtggcagactacaggctgaacaggcagatccgccagcactgcctggctttccgccagggccttgccaatgtcgtcagcctcgagtggctccgaatgtttgatcagcaagaaattcaggtattaatttctggtgcacaagttcccataagcctagaggacctaaaatcctttacaaactattcaggaggctattctgcagaccatcctgttattaaggtcttctggagagttgtggaagggttcactgatgaagaaaagcgcaaactgctgaagtttgtaacaagctgctctcgaccccctctcttggggtttaaggagttgtatcccgcattttgtattcacaacggaggctccgaccttgagcggctccccacagccagcacctgcatgaacctgctgaagctccccgagttctatgacgagacacttttgcgaagtaaacttctctatgcgattgaatgtgccgctggctttgagctgagctgaagctgatgctggggtcagacccctacagagaaccagtgcttccttcgtcagcagcgcctccccagacccacgaggatactcacactgcacgcctgaggctctcctaagctccttctttcattctgccattcctccctcccttccttttttaaatgatttttattacggtgtggtcacttatttagatggacattgcttttcaaataacttaaaataacacgttatgtgccatgtggctactttagtaatattgccaagaagagcacagtttttacactagtggcatctcagtgaaattaaccaaagatgaagctttggctttgctggtgagatcagagccctcctgagcaggcagcgccactccagggttcagacagggctgcacaggcggcagagatacagggtctgagggctgagacgccatggggccgctgctgcttatgtggttggattgtttacaagcctcattattaaaactgaaggcattttttttttctgctgcctttcccaaagtggttaggtttggaaaagagatgatgatggtaatattttatttgtgctttttaagccatttccccaaatgggactagcatgcttgttttcagtataccgtggcctgcctcatgatggtttggagatactgtctgtggatgtgaggtggggacttcattcattgtcctatttctatctccactttgtgcctggagagctttcaggggaggtggaggaggagggtctgccaagctactgcaacatctgtcacccactatacccagttacttgggggaggacagacactgtggtgtcattaaagttgtttgaaccaaagtggcggctgcatctttgtcccgatgctagccgtgccggtctcccatcatccgctcgccctcctttcccctgggctgcgcccacttgtcttcctggatatttgggggtgactcgccatgcttggcaccctctgcttcctggtgctgctctgactcgaagacgggacagtccctggtgcacatccagggaagaggagtgtcggtagttcttgcagtaggcactttatcaggacctgacctgttgctgggtgattttagtctctacaaacagaaagcgtttcaaagcgtcagctgtgggagcagagtgaccctttgctgatgctggggggaggggatctaaatcctcatttatctcttctatgtctcgtattttactgtcactggaggctctgtgggctgtcatagttaattgaccataattagcaatatacttttaaagtgggaaagctgaatgacacttttaagacaatgaacattatcaaaacaaaatgtataatttcttaatttgaataataaattaagcgtttaaatgctatttgtagtcttgatatacagaaataaaataattagggttggtcttttttattttaggttgttttatgttgaatgttctatatcttattagttaatttgtatattttattagtattttggaaatagcatatctgagactgaagagaaattgacaattcacttatttgtggtttttttctcagctattctgagcttatttatttatttgtatgttctaatggctaaacatttacattaaatgttttttttcccaaga

SEQ ID NO: 181441 - protein, 488 aa, Artificial Sequence
  derived and/or modified sequence
MNSQTEDHALAPVRNTIQLPTQPLNSEEWDKLKEDLKENTGKTSFESWIISQMAGCHSSIDVAKSLLAWVAAKNNGIVSYDLLVKYLYLCVFHMQTSEVIDVFEIMKARYKTLEPRGYSLLIRGLIHSDRWREALLLLEDIKKVITPSKKNYNDCIQGALLHQDVNTAWNLYQELLGHDIVPMLETLKAFFDFGKDIKDDNYSNKLLDILSYLRNNQLYPGESFAHSIKTWFESVPGKQWKGQFTTVRKSGQCSGCGKTIESIQLSPEEYECLKGKIMRDVIDGGDQYRKTTPQELKRFENFIKSRPPFDVVIDGLNVAKMFPKVRESQLLLNVVSQLAKRNLRLLVLGRKHMLRRSSQWSRDEMEEVQKQASCFFADDISEDDPFLLYATLHSGNHCRFITRDLMRDHKACLPDAKTQRLFFKWQQGHQLAIVNRFPGSKLTFQRILSYDTVVQTTGDSWHIPYDEDLVERCSCEVPTKWLCLHQKT

SEQ ID NO: 181442 - protein, 583 aa, Artificial Sequence
  derived and/or modified sequence
MTFYLFGIRSFPKLWKSPYLGLGPGHSYVSLFLADRCGIRNQQRLFSLKTMSPQNTKATNLIAKARYLRKDEGSNKQVYSVPHFFLAGAAKERSQMNSQTEDHALAPVRNTIQLPTQPLNSEEWDKLKEDLKENTGKTSFESWIISQMAGCHSSIDVAKSLLAWVAAKNNGIVSYDLLVKYLYLCVFHMQTSEVIDVFEIMKARYKTLEPRGYSLLIRGLIHSDRWREALLLLEDIKKVITPSKKNYNDCIQGALLHQDVNTAWNLYQELLGHDIVPMLETLKAFFDFGKDIKDDNYSNKLLDILSYLRNNQLYPGESFAHSIKTWFESVPGKQWKGQFTTVRKSGQCSGCGKTIESIQLSPEEYECLKGKIMRDVIDGGDQYRKTTPQELKRFENFIKSRPPFDVVIDGLNVAKMFPKVRESQLLLNVVSQLAKRNLRLLVLGRKHMLRRSSQWSRDEMEEVQKQASCFFADDISEDDPFLLYATLHSGNHCRFITRDLMRDHKACLPDAKTQRLFFKWQQGHQLAIVNRFPGSKLTFQRILSYDTVVQTTGDSWHIPYDEDLVERCSCEVPTKWLCLHQKT

SEQ ID NO: 181443 - protein, 211 aa, Artificial Sequence
  derived and/or modified sequence
MRDVIDGGDQYRKTTPQELKRFENFIKSRPPFDVVIDGLNVAKMFPKVRESQLLLNVVSQLAKRNLRLLVLGRKHMLRRSSQWSRDEMEEVQKQASCFFADDISEDDPFLLYATLHSGNHCRFITRDLMRDHKACLPDAKTQRLFFKWQQGHQLAIVNRFPGSKLTFQRILSYDTVVQTTGDSWHIPYDEDLVERCSCEVPTKWLCLHQKT

SEQ ID NO: 181444 - DNA, 1752 bp, Artificial Sequence
  derived and/or modified sequence
atgaccttctacctgttcggcatcagaagcttccccaagctgtggaagagcccctacctgggcctgggccccggccacagctacgtgagcctgttcctggccgacagatgcggcatcagaaaccagcagagactgttcagcctgaagaccatgagcccccagaacaccaaggccaccaacctgatcgccaaggccagatacctgagaaaggacgagggcagcaacaagcaggtgtacagcgtgccccacttcttcctggccggcgccgccaaggagagaagccagatgaacagccagaccgaggaccacgccctggcccccgtgagaaacaccatccagctgcccacccagcccctgaacagcgaggagtgggacaagctgaaggaggacctgaaggagaacaccggcaagaccagcttcgagagctggatcatcagccagatggccggctgccacagcagcatcgacgtggccaagagcctgctggcctgggtggccgccaagaacaacggcatcgtgagctacgacctgctggtgaagtacctgtacctgtgcgtgttccacatgcagaccagcgaggtgatcgacgtgttcgagatcatgaaggccagatacaagaccctggagcccagaggctacagcctgctgatcagaggcctgatccacagcgacagatggagagaggccctgctgctgctggaggacatcaagaaggtgatcacccccagcaagaagaactacaacgactgcatccagggcgccctgctgcaccaggacgtgaacaccgcctggaacctgtaccaggagctgctgggccacgacatcgtgcccatgctggagaccctgaaggccttcttcgacttcggcaaggacatcaaggacgacaactacagcaacaagctgctggacatcctgagctacctgagaaacaaccagctgtaccccggcgagagcttcgcccacagcatcaagacctggttcgagagcgtgcccggcaagcagtggaagggccagttcaccaccgtgagaaagagcggccagtgcagcggctgcggcaagaccatcgagagcatccagctgagccccgaggagtacgagtgcctgaagggcaagatcatgagagacgtgatcgacggcggcgaccagtacagaaagaccaccccccaggagctgaagagattcgagaacttcatcaagagcagaccccccttcgacgtggtgatcgacggcctgaacgtggccaagatgttccccaaggtgagagagagccagctgctgctgaacgtggtgagccagctggccaagagaaacctgagactgctggtgctgggcagaaagcacatgctgagaagaagcagccagtggagcagagacgagatggaggaggtgcagaagcaggccagctgcttcttcgccgacgacatcagcgaggacgaccccttcctgctgtacgccaccctgcacagcggcaaccactgcagattcatcaccagagacctgatgagagaccacaaggcctgcctgcccgacgccaagacccagagactgttcttcaagtggcagcagggccaccagctggccatcgtgaacagattccccggcagcaagctgaccttccagagaatcctgagctacgacaccgtggtgcagaccaccggcgacagctggcacatcccctacgacgaggacctggtggagagatgcagctgcgaggtgcccaccaagtggctgtgcctgcaccagaagacctag

SEQ ID NO: 181445 - DNA, 105 bp, Artificial Sequence
  derived and/or modified sequence
atgaccttctacctgttcggcatcagaagcttccccaagctgtggaagagcccctacctgggcctgggccccggccacagctacgtgagcctgttcctggcctag

SEQ ID NO: 181446 - DNA, 63 bp, Artificial Sequence
  derived and/or modified sequence
atgaccttctacctgttcggcatcagaagcttccccaagctgtggaagagcccctacctgtag

SEQ ID NO: 181447 - DNA, 72 bp, Artificial Sequence
  derived and/or modified sequence
atgaccttctacctgttcggcatcagaagcttccccaagctgtggaagagcccctacctgggcctgggctag

SEQ ID NO: 181448 - DNA, 1752 bp, Artificial Sequence
  derived and/or modified sequence
atgacattctatttgttcggtatcaggagttttcccaagctgtggaagagtccttacttgggccttggtcctggccattcttacgtctcactttttctggccgatcgatgcggcattcgtaaccaacagcggctgttcagcctcaagacaatgtcaccccaaaatactaaggcgaccaacctcattgctaaagcgaggtacctgaggaaggatgagggttccaacaaacaggtgtactctgtgcctcatttctttctggccggggctgccaaggaaaggtcccagatgaactcacagactgaggatcatgctctcgctcccgttcgcaacactatacagctgcctacccagccgctgaattctgaggaatgggacaagttgaaggaagatctgaaggaaaacacaggaaaaactagttttgagagctggattatatcacagatggctggctgccacagctcaatcgatgtggctaaatctcttttggcctgggtggctgcaaaaaataatggtatcgtaagttacgacctactggtcaagtacctctacctctgtgtctttcacatgcagactagcgaggtgatcgacgttttcgagatcatgaaagcaaggtataaaaccctggaaccaagaggctattcattgctcattcgaggactcattcatagcgacagatggagggaggcactgctcctgctggaagacataaaaaaggtcatcactcccagcaagaaaaattataatgattgcatccagggggccctcctacaccaggacgtgaacaccgcttggaacctttatcaagaactacttggccacgatatcgtccccatgctcgagactctgaaggcattctttgatttcggcaaggatatcaaagacgacaactattcgaacaagctgcttgatatcctgagctatctccgcaacaatcaactctacccaggagagtcttttgctcactccatcaagacatggttcgaatctgttcccggcaaacaatggaagggacagtttacgaccgttagaaagtccggacagtgttcgggatgtggcaaaacaattgaatctattcagctttctcctgaagagtacgagtgtttgaagggcaaaatcatgagagacgtgatcgatgggggggaccagtataggaaaactacaccccaggagctgaagaggtttgagaacttcattaaaagtcggccacccttcgacgttgttatcgatggccttaacgttgcaaagatgtttccgaaagtccgtgaaagccaactgcttctaaatgttgtgtcacagttggccaaacggaacctgcgcctgctggtgctagggaggaaacacatgctccgaagatcttcccagtggagcagggatgagatggaagaggttcagaagcaggcatcttgcttttttgctgatgacatttctgaagatgacccctttttactgtacgctaccctccattctggtaatcattgccgcttcattactcgcgatctgatgcgcgaccataaggcgtgtctgcctgatgccaaaactcagcgcctgtttttcaagtggcagcaggggcaccagcttgctatcgtgaacaggttccccggcagcaagctcacgttccagcggattctttcatatgatacggtggttcagacaactggggattcgtggcacattccctatgacgaggatttggtggaaagatgttcatgcgaggtccccaccaaatggctgtgtctccaccagaagacgtag

SEQ ID NO: 181449 - DNA, 105 bp, Artificial Sequence
  derived and/or modified sequence
atgaccttctatctatttggcattagaagtttcccaaaactctggaagtctccatatttgggcctgggccctgggcattcttacgtgagcttgttcctagcatag

SEQ ID NO: 181450 - DNA, 63 bp, Artificial Sequence
  derived and/or modified sequence
atgaccttttatctattcggcataaggtcgttccccaagctgtggaagagtccatacctttag

SEQ ID NO: 181451 - DNA, 72 bp, Artificial Sequence
  derived and/or modified sequence
atgacattttacctcttcggtataagaagctttccaaagctgtggaagtcaccctacctcggcctgggttag

SEQ ID NO: 181452 - DNA, 1752 bp, Artificial Sequence
  derived and/or modified sequence
atgaccttctacctgtttggcatccgctccttccccaagctgtggaagagcccctacctgggcctgggccctggccacagctatgtgtccctcttcctggccgacagatgtggcatccggaaccagcagaggctcttcagcctgaagaccatgagcccccagaacaccaaggccaccaacctgattgccaaggcccgctacctgaggaaggatgagggcagcaacaagcaggtgtacagcgtgccccacttcttcctggccggggccgccaaggagaggagccagatgaacagccagacagaagatcatgccctggcccctgtgaggaacaccatccagctgcccacccagcccctgaacagcgaggagtgggacaagctgaaggaggacctgaaggaaaatacaggcaagaccagctttgagagctggatcatcagccagatggccggctgccacagcagcattgatgtggccaagagcctgctggcctgggtggccgccaagaacaacggcatcgtgtcctatgacctgctggtgaagtacctgtacctgtgtgtgttccacatgcagaccagcgaggtgattgatgtgtttgagatcatgaaggcccgctacaagaccctggagccccggggctacagcctgctgatccggggcctcatccacagcgaccgctggagggaggccctgctgctgctggaggacatcaagaaggtgatcacccccagcaagaagaactacaatgactgcatccagggcgccctgctgcaccaggatgtgaacacagcctggaacctgtaccaggagctgctgggccatgacatcgtgcccatgctggagaccctgaaggccttctttgattttgggaaggacatcaaggatgacaactacagcaacaagctgctggacatcctgagctacctgaggaacaaccagctgtacccaggagagagctttgcccacagcatcaagacctggtttgaatctgtgcctgggaagcagtggaagggccagttcaccaccgtgaggaagagcggccagtgcagcggctgcggcaagaccatcgagagcatccagctgagccctgaggagtatgagtgcctgaagggcaagatcatgagagatgtgattgatggaggagaccagtacaggaagaccaccccccaggagctgaagagatttgagaacttcatcaagagccggcccccatttgatgtggtgattgatggcctgaatgtggccaagatgttccccaaggtgcgggagagccagctgctgctgaatgtggtgtcccagctggccaagaggaacctgcggctgctggtgctgggcaggaagcacatgctgcggcgcagcagccagtggagcagagatgagatggaggaggtgcagaagcaggccagctgcttctttgctgatgacatcagtgaagatgaccccttcctgctgtatgccaccctgcacagcggcaaccactgccgcttcatcacccgggacctgatgagggaccacaaggcctgcctgcctgatgccaagacccagaggctcttcttcaagtggcagcagggccaccagctggccatcgtgaaccgcttccctggcagcaagctgaccttccagaggatcctgtcctatgacacagtggtgcagaccaccggggacagctggcacatcccctatgatgaggacctggtggagcgctgcagctgtgaggtgcccaccaagtggctgtgcctgcaccagaagacctag

SEQ ID NO: 181453 - DNA, 105 bp, Artificial Sequence
  derived and/or modified sequence
atgaccttctacctgtttggcatccgctccttccccaagctgtggaagagcccctacctgggcctgggccctggccacagctatgtgtccctcttcctggcctag

SEQ ID NO: 181454 - DNA, 63 bp, Artificial Sequence
  derived and/or modified sequence
atgaccttctacctgtttggcatccgctccttccccaagctgtggaagagcccctacctgtag

SEQ ID NO: 181455 - DNA, 72 bp, Artificial Sequence
  derived and/or modified sequence
atgaccttctacctgtttggcatccgctccttccccaagctgtggaagagcccctacctgggcctgggctag

SEQ ID NO: 181456 - DNA, 2615 bp, Artificial Sequence
  derived and/or modified sequence
cgtttatggccgcgttaagtctgagtgccgctttgagttgttgaatgaagtgaacttcatttgtcagcgttcggttcatgaactggaatgtaagaggcaccagaggattcctgctctgtcccctggtttgcggcttgcgacgttggacatccccggattgttgtttaatagagaaaactcacctgccttcttgcttttaagtagccccaaaagcagaaccttgatttgtctgtaaggaagaaacacaaaccttttaaaaagttccacttcgactctgcaccgccgacccccaatctctttaattttgccatagaagaggggttttttcaacatctctctcactatctggtgctgatctcactgcataatgactttctatttgtttggtattcgaagctttccgaagctttggaagagcccataccttgggctaggcccagggcactcttatgtctcgctgtttctggcagaccgctgtggcatcaggaaccagcagaggttgttttctcttaaaacaatgtctccacagaataccaaagcaacgaatctgattgccaaggccagatatctcaggaaagatgagggcagtaataagcaagtttattctgttcctcatttttttttagctggagcagctaaggagagatcacagatgaattctcaaactgaagatcatgccttggcacctgtgaggaacactattcaactcccaacacaacctttgaattcagaggagtgggataaacttaaggaagatttaaaagaaaacaccggaaagaccagtttcgaaagttggatcatttcacagatggctggctgtcatagctctatagatgtggctaaatctctgctggcatgggtagcagccaaaaataatggtattgtaagttacgatttactggtcaagtatttgtatctctgtgtctttcatatgcagacatctgaagttattgatgtctttgaaattatgaaagccagatataagactttagaacctagaggttacagtcttctcatccggggattgatccattcagacagatggagagaagcattgttgctgttagaggacatcaaaaaagttataactccttcaaaaaagaactataatgactgtatccagggagctctccttcatcaagatgtaaacacagcttggaatttatatcaggaattgctaggtcatgatattgttcctatgttggaaactttaaaagctttctttgattttggaaaagacataaaggatgataactattcaaataaactactagatattctttcatatctaagaaataatcagctgtatccaggggagtcatttgcacacagtataaaaacatggtttgagagtgttcctggaaaacaatggaaaggacaattcaccacagtccgaaaaagtggccagtgttcgggctgtggaaaaaccatagagtctattcagctgagtccagaagaatatgaatgtcttaagggaaaaatcatgagggatgtgatagatggaggtgaccagtacagaaagacaacacctcaggaacttaagagatttgagaacttcataaaatctcgtcctccttttgatgttgtcattgatggtctcaatgttgccaaaatgtttcctaaagttcgtgaatctcaacttctcttgaatgtcgtctctcaactagccaaacggaatctgcgactgctggtcctaggccggaagcacatgctaagacggagttcccagtggagtcgggatgagatggaagaggtgcaaaagcaagccagctgtttttttgctgatgacatctcggaggatgatccattccttctgtatgccacactgcactccgggaatcactgcaggtttatcacaagagacctgatgcgggaccacaaggcctgtctgcctgatgccaagacccaacgcctgttttttaagtggcagcagggacatcagctggcaattgtaaataggtttccaggatcaaaactaacctttcagcgtattctcagctatgacacagtggtgcaaacaactggagactcgtggcacataccatatgatgaagacttggtagaaagatgttcctgtgaagtaccaaccaaatggctttgcctccaccaaaagacatagagattcttacctctatgctaagtttgtgtttgggtaccctctaggttggcatcagaggctcttgagctggtgtttgtttagggcattgcctctgtcctgaagataaaaggattctattaacagcattgacattgattttttaatgaaatgagatatatcttttcataaccagctgcgtttttttcccctaacatttgtttttggaggcttatcaagagttggagaacttagtgtagagcaaaacctgcatttctcctactgggccagctattccacttagcttgggtgactaatagtgcttttggtatccattttttgctacttctgaccttgccttccaggcctaccaatagcagaatcaatccatctgtccctgagatactcatgttgtttcaaatgcctcctcccatttctggcatagtctcattctctgtatgttatgccctatccacatggaatcatttatcgtcctctgtaataaactggccaagatact

SEQ ID NO: 181457 - DNA, 2611 bp, Artificial Sequence
  derived and/or modified sequence
ggccgcgttaagtctgagtgccgctttgagttgttgaatgaagtgaacttcatttgtcagcgttcggttcatgaactggaatgtaagaggcaccagaggattcctgctctgtcccctggtttgcggcttgcgacgttggacatccccggattgttgtttaatagagaaaactcacctgccttcttgcttttaagtagccccaaaagcagaaccttgatttgtctgtaaggaagaaacacaaaccttttaaaaagttccacttcgactctgcaccgccgacccccaatctctttaattttgccatagaagaggggttttttcaacatctctctcactatctggtgctgatctcactgcataatgactttctatttgtttggtattcgaagctttccgaagctttggaagagcccataccttgggctaggcccagggcactcttatgtctcgctgtttctggcagaccgctgtggcatcaggaaccagcagaggttgttttctcttaaaacaatgtctccacagaataccaaagcaacgaatctgattgccaaggccagatatctcaggaaagatgagggcagtaataagcaagtttattctgttcctcatttttttttagctggagcagctaaggagagatcacagatgaattctcaaactgaagatcatgccttggcacctgtgaggaacactattcaactcccaacacaacctttgaattcagaggagtgggataaacttaaggaagatttaaaagaaaacaccggaaagaccagtttcgaaagttggatcatttcacagatggctggctgtcatagctctatagatgtggctaaatctctgctggcatgggtagcagccaaaaataatggtattgtaagttacgatttactggtcaagtatttgtatctctgtgtctttcatatgcagacatctgaagttattgatgtctttgaaattatgaaagccagatataagactttagaacctagaggttacagtcttctcatccggggattgatccattcagacagatggagagaagcattgttgctgttagaggacatcaaaaaagttataactccttcaaaaaagaactataatgactgtatccagggagctctccttcatcaagatgtaaacacagcttggaatttatatcaggaattgctaggtcatgatattgttcctatgttggaaactttaaaagctttctttgattttggaaaagacataaaggatgataactattcaaataaactactagatattctttcatatctaagaaataatcagctgtatccaggggagtcatttgcacacagtataaaaacatggtttgagagtgttcctggaaaacaatggaaaggacaattcaccacagtccgaaaaagtggccagtgttcgggctgtggaaaaaccatagagtctattcagctgagtccagaagaatatgaatgtcttaagggaaaaatcatgagggatgtgatagatggaggtgaccagtacagaaagacaacacctcaggaacttaagagatttgagaacttcataaaatctcgtcctccttttgatgttgtcattgatggtctcaatgttgccaaaatgtttcctaaagttcgtgaatctcaacttctcttgaatgtcgtctctcaactagccaaacggaatctgcgactgctggtcctaggccggaagcacatgctaagacggagttcccagtggagtcgggatgagatggaagaggtgcaaaagcaagccagctgtttttttgctgatgacatctcggaggatgatccattccttctgtatgccacactgcactccgggaatcactgcaggtttatcacaagagacctgatgcgggaccacaaggcctgtctgcctgatgccaagacccaacgcctgttttttaagtggcagcagggacatcagctggcaattgtaaataggtttccaggatcaaaactaacctttcagcgtattctcagctatgacacagtggtgcaaacaactggagactcgtggcacataccatatgatgaagacttggtagaaagatgttcctgtgaagtaccaaccaaatggctttgcctccaccaaaagacatagagattcttacctctatgctaagtttgtgtttgggtaccctctaggttggcatcagaggctcttgagctggtgtttgtttagggcattgcctctgtcctgaagataaaaggattctattaacagcattgacattgattttttaatgaaatgagatatatcttttcataaccagctgcgtttttttcccctaacatttgtttttggaggcttatcaagagttggagaacttagtgtagagcaaaacctgcatttctcctactgggccagctattccacttagcttgggtgactaatagtgcttttggtatccattttttgctacttctgaccttgccttccaggcctaccaatagcagaatcaatccatctgtccctgagatactcatgttgtttcaaatgcctcctcccatttctggcatagtctcattctctgtatgttatgccctatccacatggaatcatttatcgtcctctgtaataaactggccaagatactaaa

SEQ ID NO: 181458 - DNA, 1706 bp, Artificial Sequence
  derived and/or modified sequence
actgtagtttccgccgcgtttatggccgcgttaagtctgagtgccgctttgagttgttgaatgaagtgaacttcatttgtcagcgttcgctggagcagctaaggagagatcacagatgaattctcaaactgaagatcatgccttggcacctgtgaggaacactattcaactcccaacacaacctttgaattcagaggagtgggataaacttaaggaagatttaaaagaaaacaccggaaagaccagtttcgaaagttggatcatttcacagatggctggctgtcatagctctatagatgtggctaaatctctgctggcatgggtagcagccaaaaataatggtattgtaagttacgatttactggtcaagtatttgtatctctgtgtctttcatatgcagacatctgaagttattgatgtctttgaaattatgaaagccagatataagactttagaacctagaggttacagtcttctcatccggggattgatccattcagacagatggagagaagcattgttgctgttagaggacatcaaaaaagttataactccttcaaaaaagaactataatgactgtatccagggagctctccttcatcaagatgtaaacacagcttggaatttatatcaggaattgctaggtcatgatattgttcctatgttggaaactttaaaagctttctttgattttggaaaagacataaaggatgataactattcaaataaactactagatattctttcatatctaagaaataatcagctgtatccaggggagtcatttgcacacagtataaaaacatggtttgagagtgttcctggaaaacaatggaaaggacaattcaccacagtccgaaaaagtggccagtgttcgggctgtggaaaaaccatagagtctattcagctgagtccagaagaatatgaatgtcttaagggaaaaatcatgagggatgtgatagatggaggtgaccagtacagaaagacaacacctcaggaacttaagagatttgagaacttcataaaatctcgtcctccttttgatgttgtcattgatggtctcaatgttgccaaaatgtttcctaaagttcgtgaatctcaacttctcttgaatgtcgtctctcaactagccaaacggaatctgcgactgctggtcctaggccggaagcacatgctaagacggagttcccagtggagtcgggatgagatggaagaggtgcaaaagcaagccagctgtttttttgctgatgacatctcggaggatgatccattccttctgtatgccacactgcactccgggaatcactgcaggtttatcacaagagacctgatgcgggaccacaaggcctgtctgcctgatgccaagacccaacgcctgttttttaagtggcagcagggacatcagctggcaattgtaaataggtttccaggatcaaaactaacctttcagcgtattctcagctatgacacagtggtgcaaacaactggagactcgtggcacataccatatgatgaagacttggtagaaagatgttcctgtgaagtaccaaccaaatggctttgcctccaccaaaagacatagagattcttacctctatgctaagtttgtgtttgggtaccctctaggttggcatcagaggctcttgagctggtgtttgtttagggcattgcctctgtcctgaagataaaaggattctattaacagc

SEQ ID NO: 181459 - DNA, 1752 bp, Artificial Sequence
  derived and/or modified sequence
atgaccttctacctgttcggcatccggagcttccccaagctgtggaagagcccttatctgggattgggccctgggcactcatatgtcagtttatttcttgccgaccgctgtggcatcagaaaccagcagaggctgttctcacttaaaactatgtctcctcaaaataccaaagctactaacttgattgcaaaagcacgctacctgcgaaaagacgagggaagtaataaacaagtctactccgtgccccacttcttcctcgctggagcagcaaaggagcggtcccagatgaacagccaaacagaagaccatgcactggcccccgtgcggaataccatccagcttccaacgcaacctctgaacagtgaagagtgggacaagctcaaagaagatttgaaagaaaatactggcaagacgagctttgagtcctggataataagccagatggcgggatgtcattccagcatcgacgtggccaaatctttattggcctgggttgcagcaaagaacaatggcatcgtgagctatgatctccttgtgaaatacctttacctctgtgtcttccacatgcagacaagcgaggtgattgacgttttcgagataatgaaggcaaggtataagacactggagccaagggggtatagtctcttgatccgggggctcatccatagcgaccgatggagggaagcactcttactgttggaggatattaaaaaggttattacaccttcaaagaagaactataacgattgcattcaaggcgccctgctgcatcaggacgttaacaccgcgtggaacctttatcaagagctgttaggccatgacattgtgcccatgctggaaactcttaaggctttcttcgacttcggaaaagacatcaaagatgacaattacagcaacaagttgttggacattctgagttatctcagaaacaaccagctgtatccaggggaaagcttcgcacattccataaagacgtggtttgaatccgttcccgggaagcaatggaagggccagttcaccactgtcaggaagtctggccagtgcagcggatgcggaaaaactatcgagtccatacaactgtcccctgaggaatatgaatgcctcaagggcaagattatgcgcgacgtaatcgacggaggtgatcagtatcgaaaaacaacacctcaggagcttaagcggtttgaaaactttattaaatctcgcccaccattcgatgtcgtgatcgatggactgaacgttgcaaagatgtttcctaaggtaagggagtcacagcttctcctgaacgtcgtgagccagttggccaaaaggaacttgcgtctgctggtgttgggtaggaagcacatgctgcgtaggtccagtcagtggagcagagacgagatggaggaggtgcaaaaacaggcctcttgcttcttcgcggatgatatatccgaggatgatcccttcttgctgtacgccactcttcactccggtaaccactgtcggtttatcacgagagatttaatgagagatcataaagcctgcttgccggatgctaaaacgcagaggctgttcttcaagtggcagcaaggccaccagttagccatcgtgaatagattccctgggtcgaaactgacgttccagagaattctttcatacgataccgttgtccaaactacaggtgattcctggcacattccttacgacgaagacctggtcgagcggtgctcttgcgaggtgccaacgaagtggctctgcctccatcagaaaacctag

SEQ ID NO: 181460 - DNA, 105 bp, Artificial Sequence
  derived and/or modified sequence
atgaccttctacctgttcggcatccggagcttccccaagctgtggaagtccccctatctgggcctgggcccgggtcactcctacgtcagtttatttttagcgtag

SEQ ID NO: 181461 - DNA, 63 bp, Artificial Sequence
  derived and/or modified sequence
atgaccttctacctgttcggcatccggagcttccccaagctgtggaagtcgccttacctttag

SEQ ID NO: 181462 - DNA, 72 bp, Artificial Sequence
  derived and/or modified sequence
atgaccttctacctgttcggcatccggagcttccccaagctgtggaaaagtccgtatctcggactggggtag

SEQ ID NO: 181463 - DNA, 1752 bp, Artificial Sequence
  derived and/or modified sequence
atgactttttacctgtttggcattaggtccttccctaagctctggaagtctccttacctgggcttgggtcctggacactcctatgtttctctgtttctagccgacaggtgcggtattcggaatcagcaaagactgttttccctgaagaccatgtctccccagaataccaaagccaccaacctgattgccaaagctagatatctgaggaaggatgagggctctaacaagcaggtatactcggtacctcactttttcctggccggagcagcgaaggagcgcagccagatgaatagtcaaaccgaagaccacgctctggcgccagtaagaaacactattcagttaccaactcagcccctcaacagtgaggaatgggataaactgaaagaggaccttaaggagaatactggtaaaacctcgttcgagtcatggatcatctcacagatggcaggttgccattcttctatcgacgtcgctaagtccctcctggcctgggttgccgctaagaataatgggatcgtgtcttacgacctgctggtcaaatatctctatctgtgcgtttttcatatgcagaccagcgaggtcatcgacgtgttcgagattatgaaagcacgttacaagactctggagccacgcggatactccttgctgatccgtggcttgatacattccgaccggtggcgggaagccctgttactgctagaagatataaagaaggtgatcactccatctaagaaaaattacaatgactgcatccaaggtgctctactccaccaagacgtcaataccgcttggaatctctatcaagagctccttggacacgacattgttccaatgctggagacactcaaagccttctttgatttcgggaaggacatcaaggacgacaattacagtaataaacttctggacatcctgagctacctcagaaataatcagctgtacccaggagagtcctttgctcactcgattaagacttggttcgaatccgttcctgggaagcagtggaaggggcagtttaccacagtccggaaatctgggcagtgttccggctgcggcaaaacaatcgagagtatacaactgagccccgaggagtatgaatgtctgaagggcaagatcatgcgtgacgtaatagacggcggagaccagtacagaaaaaccaccccacaggagctgaaacgttttgaaaacttcattaaatccaggcctccctttgatgtggtgattgatggcctgaacgtcgcgaagatgttccccaaagtgcgcgagtctcagttgcttttaaacgtggtaagccagctggctaaacgaaacctgcgcctgctggtgctaggtcgaaagcacatgctgaggaggtcctctcagtggtctcgcgacgagatggaggaagtgcagaaacaggccagctgcttcttcgctgatgatatctctgaggacgaccctttcctcttgtatgccacgctccactctgggaaccattgccggttcatcaccagggacctgatgcgagatcacaaggcgtgcctgcctgacgcaaagacgcagaggctattttttaagtggcagcaaggccatcagctcgcaattgtaaatagatttcctggatctaaactaaccttccagcggatcctaagttatgacaccgtagtgcagaccactggcgattcatggcatatcccttatgacgaggatctagttgagagatgttcttgtgaggtccctacaaagtggctgtgtttacatcagaagacatag

SEQ ID NO: 181464 - DNA, 105 bp, Artificial Sequence
  derived and/or modified sequence
atgactttttacttatttgggattcggtctttccccaagctgtggaagtctccttacttaggattggggcctggccattcctatgtgagcctgttcttagcctag

SEQ ID NO: 181465 - DNA, 63 bp, Artificial Sequence
  derived and/or modified sequence
atgactttttatctgttcgggattagatcattccccaagctgtggaagtcaccctacctgtag

SEQ ID NO: 181466 - DNA, 72 bp, Artificial Sequence
  derived and/or modified sequence
atgaccttttatttattcggcataagaagttttcctaagctgtggaagtccccttatttgggcctcggatag

SEQ ID NO: 181467 - DNA, 1752 bp, Artificial Sequence
  derived and/or modified sequence
atgaccttttacctgttcgggatccggtccttcccaaaactttggaagagcccatacctcggcctcggacccgggcatagctacgtatccctgttccttgccgaccggtgtggtatccgtaatcaacaacggctgttttcactgaaaacaatgagcccacagaatactaaagccacaaacctcatagccaaagctcgatatctgagaaaggacgagggaagcaataagcaggtctattcagtgccccatttttttcttgccggggcagccaaagagaggagtcaaatgaattctcaaaccgaggatcatgcgctggcaccagtgaggaacacaattcagcttcctactcagcccctcaacagcgaggagtgggacaagctcaaggaggacctgaaagagaacactggtaagaccagcttcgagtcttggattatttcccaaatggctgggtgtcatagctcaattgacgttgccaaatctttgttagcttgggtcgccgccaagaataacggaatcgtatcttacgatctattggtcaagtatctctatctgtgcgtattccatatgcagaccagcgaggtgattgacgtgtttgagattatgaaggctagatacaaaaccttggaaccaagggggtactctctgctgattagaggcctaattcactctgatagatggcgagaggccttgcttctcttagaagacatcaagaaggtgatcactcctagcaaaaagaactacaatgactgcattcagggcgcactcctgcaccaggacgtgaatacggcatggaacctgtatcaggagctgctgggccacgatatcgtcccaatgttagagaccttgaaagctttcttcgatttcgggaaagatattaaggacgataattatagcaacaagttgctcgatattctgagctacctgagaaataaccaactctacccaggggagtcattcgctcacagcatcaagacctggtttgagagtgtgccaggtaaacagtggaaggggcagttcactaccgtgaggaaatccggacagtgttcggggtgcggaaagacgattgaatctatccaactgagcccagaagagtatgaatgtctgaaaggtaagattatgcgagacgttattgacgggggagaccagtaccggaaaactacccctcaggagctgaagcgtttcgagaattttatcaaatcacgcccccctttcgatgtggttatcgacggtctcaatgtggctaaaatgttccccaaggtgcgggaatcgcagttgctcctgaacgtggtgtcacagctggctaaaagaaatctacgcctcctcgtgctggggcggaaacacatgttgaggcggtcctcacaatggtcacgggacgagatggaagaggttcagaagcaggcaagctgtttttttgcggatgacatttctgaggacgacccgttcctgctgtacgctactctgcatagcgggaaccactgccgattcataactagagacttaatgagggatcataaggcctgtctgcccgacgccaagacgcagcggctattttttaagtggcagcagggccatcagctggccatcgtcaaccggtttcctggctccaagcttacgttccagcgcattttgtcttacgataccgtcgtgcagactaccggtgattcttggcatatcccatatgacgaagaccttgtagagcgatgcagctgcgaggtgcccacaaagtggttgtgcctgcatcaaaagacatag

SEQ ID NO: 181468 - DNA, 1752 bp, Artificial Sequence
  derived and/or modified sequence
atgaccttctacctgttcggcatccggagcttccccaagctgtggaagagcccttatttggggctcggacctggccactcgtatgttagcctctttttggccgatcgttgcggcataaggaaccagcaaagacttttctcgctgaagaccatgtcgccccagaataccaaggctaccaacttaattgcaaaggctcgctacttgaggaaggacgaaggcagcaacaaacaggtctactcagttcctcattttttcctggccggcgcagccaaggagaggagtcagatgaattctcaaactgaggaccacgcgctggccccggtgaggaatactatccagctgcccactcaacccctgaattcagaagagtgggacaaacttaaagaggaccttaaggagaacacagggaagacttccttcgagagctggataatcagccagatggccggctgccacagttccatcgacgtcgcaaagagccttctggcatgggtggcagccaagaacaatggaatagtgtcttatgacctactggtaaagtatctgtatctttgtgtctttcatatgcagacatccgaggttatcgatgtttttgaaattatgaaggcacgctataaaaccctcgagccccgagggtactccctcctgatccgtgggcttatccattcagataggtggcgcgaggcgttgctcttgctggaggacatcaagaaggtgatcactcccagtaagaaaaattataacgattgcattcagggagctttgctccaccaggatgtcaacactgcttggaatctctatcaggagcttctgggccacgacatcgtgccaatgctggagactctgaaggcattttttgatttcggcaaggatatcaaggacgataactatagtaacaagttgcttgacattctgagctacctgagaaataaccagctctatccaggagagtccttcgcccactccattaagacatggtttgaaagcgtccccgggaagcaatggaagggtcagttcactacggtgcggaaatctggccagtgctccggctgcgggaagaccatcgaatccattcagttgtccccggaagaatatgagtgcctcaaaggtaagattatgagggacgtgatcgatgggggagaccaatatcgcaaaactacaccccaggagctgaagcggtttgaaaattttattaagtcccgccccccctttgatgtggtgatcgacggattgaatgtggccaaaatgttccctaaagtgcgtgagtcgcagctactattaaatgtggtgtcacagctggccaagaggaacctgaggctgctcgttttggggagaaagcacatgctgaggaggagctcacagtggtcaagggacgaaatggaggaagtccaaaaacaggcaagttgcttcttcgcagatgatattagcgaggacgaccccttcctgttgtatgcaacgctacacagtggtaaccattgtagatttataactcgagatctgatgcgagaccataaggcctgtttaccagatgccaagacgcagagattgtttttcaagtggcagcagggtcatcaactggcgattgtcaatcggttccctgggtctaaactgacctttcaaagaatcctttcttacgacacagtcgtgcagactactggtgattcgtggcacattccttatgacgaggacttggtggaaagatgctcctgtgaggttcctacgaagtggctttgcctgcatcagaaaacttag

SEQ ID NO: 181469 - DNA, 1752 bp, Artificial Sequence
  derived and/or modified sequence
atgacgttctatctcttcggtattcgcagttttcccaaactgtggaagtccccatacctgggactggggcctggacactcatacgtgagcctgtttctggccgatcgatgcgggattaggaaccaacagaggctgttctccctcaaaactatgtcaccccagaacacaaaggcaaccaacctcatagccaaagccagatatttgcggaaggatgaaggctctaacaaacaggtttatagcgttccccacttcttcctcgccggagccgcaaaggagaggtcacaaatgaactcccagacagaggaccatgcactggctcccgtgaggaacaccatccagctccctacacagcccctaaactctgaagaatgggacaaacttaaggaggacctaaaagagaacacggggaagacatcttttgagtcctggataatatcccagatggcgggatgccattctagcattgatgtagcaaagagtctgctcgcttgggtcgcggctaagaacaacggcatcgtctcttatgatttgctcgtcaaatacctctacctctgcgtgtttcacatgcagacatccgaagtgatagacgtcttcgaaattatgaaggccagatataaaactctagaaccgagaggctattcactgctgatcaggggcctgatccacagcgatagatggagagaggctctgctcctgctggaggacatcaagaaagtcattaccccatccaagaagaactacaatgattgcattcagggggcacttctgcatcaggatgttaatactgcctggaacctgtatcaggagctgcttggtcatgatatcgtacctatgcttgaaacactgaaggccttttttgatttcggcaaggatatcaaagatgacaattattcaaacaagctccttgatattttaagctacctacgcaacaatcaactgtacccgggagaatccttcgcccattccatcaaaacatggttcgagagtgtcccaggaaaacaatggaagggccaatttacgaccgtgcgcaagagtggccagtgctctggatgcggtaagacaatagaaagcattcagctgtctcctgaggaatatgaatgtctcaaaggaaaaatcatgagggatgtcatagacggcggagaccagtaccgaaagacgaccccccaggagctgaagcggttcgaaaacttcataaagtccagacctccatttgacgtcgtcatcgatggcctaaacgttgccaagatgttccccaaagtaagggagtctcagctcttgctgaacgttgtctcacagctggcgaagcggaacctaaggttactagtcttgggccgaaagcacatgctgagacgcagctctcagtggtctcgggatgaaatggaggaggtgcagaagcaggctagttgcttctttgccgacgacattagcgaagacgacccatttcttctctatgcaactctccattctgggaatcactgtagatttattactagggatctcatgcgtgatcacaaggcctgcctgccggatgctaaaacccagagattgtttttcaagtggcagcagggacaccaactggcgattgtgaaccgatttcctggttccaaacttaccttccagagaattctcagctacgatacagtcgttcaaacaactggggatagttggcatattccttacgacgaggatctcgttgagcgttgcagttgcgaggtgccgaccaaatggctctgtttacaccagaaaacttag

SEQ ID NO: 181470 - DNA, 3857 bp, Artificial Sequence
  derived and/or modified sequence
tgtagtttccgccgcgtttatggccgcgttaagtctgagtgccgctttgagttgttgaatgaagtgaacttcatttgtcagcgttcggttcatgaactggaatgtaagaggcaccagaggattcctgctctgtcccctggtttgcggcttgcgacgttggacatccccggattgttgtttaatagagaaaactcacctgccttcttgcttttaagtagccccaaaagcagaaccttgatttgtctgtaaggaagaaacacaaaccttttaaaaagttccacttcgactctgcaccgccgacccccaatctctttaattttgccatagaagaggggttttttcaacatctctctcactatctggtgctgatctcactgcataatgactttctatttgtttggtattcgaagctttccgaagctttggaagagcccataccttgggctaggcccagggcactcttatgtctcgctgtttctggcagaccgctgtggcatcaggaaccagcagaggttgttttctcttaaaacaatgtctccacagaataccaaagcaacgaatctgattgccaaggccagatatctcaggaaagatgagggcagtaataagcaagtttattctgttcctcatttttttttagctggagcagctaaggagagatcacagatgaattctcaaactgaagatcatgccttggcacctgtgaggaacactattcaactcccaacacaacctttgaattcagaggagtgggataaacttaaggaagatttaaaagaaaacaccggaaagaccagtttcgaaagttggatcatttcacagatggctggctgtcatagctctatagatgtggctaaatctctgctggcatgggtagcagccaaaaataatggtattgtaagttacgatttactggtcaagtatttgtatctctgtgtctttcatatgcagacatctgaagttattgatgtctttgaaattatgaaagccagatataagactttagaacctagaggttacagtcttctcatccggggattgatccattcagacagatggagagaagcattgttgctgttagaggacatcaaaaaagttataactccttcaaaaaagaactataatgactgtatccagggagctctccttcatcaagatgtaaacacagcttggaatttatatcaggaattgctaggtcatgatattgttcctatgttggaaactttaaaagctttctttgattttggaaaagacataaaggatgataactattcaaataaactactagatattctttcatatctaagaaataatcagctgtatccaggggagtcatttgcacacagtataaaaacatggtttgagagtgttcctggaaaacaatggaaaggacaattcaccacagtccgaaaaagtggccagtgttcgggctgtggaaaaaccatagagtctattcagctgagtccagaagaatatgaatgtcttaagggaaaaatcatgagggatgtgatagatggaggtgaccagtacagaaagacaacacctcaggaacttaagagatttgagaacttcataaaatctcgtcctccttttgatgttgtcattgatggtctcaatgttgccaaaatgtttcctaaagttcgtgaatctcaacttctcttgaatgtcgtctctcaactagccaaacggaatctgcgactgctggtcctaggccggaagcacatgctaagacggagttcccagtggagtcgggatgagatggaagaggtgcaaaagcaagccagctgtttttttgctgatgacatctcggaggatgatccattccttctgtatgccacactgcactccgggaatcactgcaggtttatcacaagagacctgatgcgggaccacaaggcctgtctgcctgatgccaagacccaacgcctgttttttaagtggcagcagggacatcagctggcaattgtaaataggtttccaggatcaaaactaacctttcagcgtattctcagctatgacacagtggtgcaaacaactggagactcgtggcacataccatatgatgaagacttggtagaaagatgttcctgtgaagtaccaaccaaatggctttgcctccaccaaaagacatagagattcttacctctatgctaagtttgtgtttgggtaccctctaggttggcatcagaggctcttgagctggtgtttgtttagggcattgcctctgtcctgaagataaaaggattctattaacagcattgacattgattttttaatgaaatgagatatatcttttcataaccagctgcgtttttttcccctaacatttgtttttggaggcttatcaagagttggagaacttagtgtagagcaaaacctgcatttctcctactgggccagctattccacttagcttgggtgactaatagtgcttttggtatccattttttgctacttctgaccttgccttccaggcctaccaatagcagaatcaatccatctgtccctgagatactcatgttgtttcaaatgcctcctcccatttctggcatagtctcattctctgtatgttatgccctatccacatggaatcatttatcgtcctctgtaataaactggccaagatactaaaggcttactattcatagcagtttttaattacttatcatccaattatttggattggagaagagggggcattcactcctctttttcttattttttttggaaatagagtctcaacttactctgtcgccagggctggagtgcagtgacgtgatcacagttcactgcagcctcaaactcccaggctcaagcaatcttcctacctcagccctcctgagtaattgggactacagaacagagaatgtcagtatccaataggatgccagtggaattccctgacgattccatccatgcggctctgctggagcagggtagtgtcctaggctgggagaatgggatggagcctccacctcatgaagtagcttcctttggaggtggctatggcaggtcttcggagagaatatgcttttaaggctattaaccagggtggccttacatcagtagctgtcagagggaaagactgtgcagtaattgtcacacagaagaaagtacctgacaaattattggattccagcacagtgactcacttattcaagataactgaaaacattggttgtgtgatgaccggaatgacagctgacagcagatcccaggtacagagggcacgctatgaggcagctaactggaaatacaagtatggctatgagattcctgtggacatgctgtgtaaaagaattgccgatatttctcaggtctacacacagaatgctgaaatgaggcctcttggttgttgtatgattttaattggtatagatgaagagcaaggccctcaggtatataagtgtgatcctgcaggttactactgtgggtttaaagccactgcagcgggagttaaacaaactgagtcaaccagcttccttgaaaaaaaagtgaagaagaaatttgattggacatttgaacagacagtggaaactgcaattacatgcctgtctactgttctatcaattgatttcaaaccttcagaaatagaagttggagtagtgacagttgaaaatcctaaattcaggattcttacagaagcagagattgatgctcaccttgttgctctagcagagagagactaaacattgtcgttagtttaccagatccgtgatgccacttacctgtgtgtttggtaacaacaaaccaacatcatggaggtccctggattgaaaaaggagcctctcccactcctcctaccaccgaagtggttaggactctatataaataaaaacaaggcttttggaaaataa

SEQ ID NO: 181471 - protein, 297 aa, Artificial Sequence
  derived and/or modified sequence
MAKVSELYDVTWEEMRDKMRKWREENSRNSEQIVEVGEELINEYASKLGDDIWIIYEQVMIAALDYGRDDLALFCLQELRRQFPGSHRVKRLTGMRFEAMERYDDAIQLYDRILQEDPTNTAARKRKIAIRKAQGKNVEAIRELNEYLEQFVGDQEAWHELAELYINEHDYAKAAFCLEELMMTNPHNHLYCQQYAEVKYTQGGLENLELSRKYFAQALKLNNRNMRALFGLYMSASHIASNPKASAKTKKDNMKYASWAASQINRAYQFAGRSKKETKYSLKAVEDMLETLQITQS

SEQ ID NO: 181472 - DNA, 1243 bp, Artificial Sequence
  derived and/or modified sequence
gccctctcaccccgctgcctctaggttctgggaagatggcgaaggtctcagagctttacgatgtcacttgggaagaaatgagagataaaatgagaaaatggagagaagaaaactcaagaaatagtgagcaaattgtggaagttggagaagaattaattaatgaatatgcttctaagctgggagatgatatttggatcatatatgaacaggtgatgattgcagcactagactatggtcgggatgacttggcattgttttgtcttcaagagctgagaagacagttccctggcagtcacagagtcaagcgattaacaggcatgagatttgaagccatggaaagatatgatgatgctatacagctatatgataggattttacaagaagatccaactaacactgctgcaagaaagcgtaagattgccattcgaaaagcccaggggaaaaatgtggaggccattcgggagctgaatgagtatctggaacaatttgttggagaccaagaagcctggcatgaacttgcagaactttacatcaatgaacatgactatgcaaaagcagccttttgtttagaggaactaatgatgactaatccacacaaccacttatactgtcagcagtatgctgaagttaagtatacccaaggtggacttgaaaacctcgaactttcaagaaagtattttgcacaggcattgaaactgaacaacagaaatatgagagctttgtttggactttatatgtcggcaagtcatattgcttctaatccaaaagcaagtgcaaaaacgaaaaaggacaacatgaaatatgctagttgggcagctagtcaaataaacagagcttatcagtttgcaggtcgaagtaagaaggaaaccaaatattctcttaaggctgtcgaagacatgttggaaacattgcagatcacccagtcttaaggtttcaaaaactctttgacattagatttcacaactgcacaattgaacttattggcctgtaacttatttactaaatgctcagtgctatttatatactacagtaattttctgttaagaaggcagttgtaaagaatgtgtttatataaacctaaaaatgccttttactgctaagtggggagatgggggaaatccatggaagagagatttaagacttattgattgtacatcagtctcttcatatcacatatacatgtatatatataaaactctaatgtagtataaccttgttaaataaaccatgatgatttattaaa

SEQ ID NO: 181473 - DNA, 894 bp, Artificial Sequence
  derived and/or modified sequence
atggccaaggtgagcgagctgtacgacgtgacctgggaggagatgagagacaagatgagaaagtggagagaggagaacagcagaaacagcgagcagatcgtggaggtgggcgaggagctgatcaacgagtacgccagcaagctgggcgacgacatctggatcatctacgagcaggtgatgatcgccgccctggactacggcagagacgacctggccctgttctgcctgcaggagctgagaagacagttccccggcagccacagagtgaagagactgaccggcatgagattcgaggccatggagagatacgacgacgccatccagctgtacgacagaatcctgcaggaggaccccaccaacaccgccgccagaaagagaaagatcgccatcagaaaggcccagggcaagaacgtggaggccatcagagagctgaacgagtacctggagcagttcgtgggcgaccaggaggcctggcacgagctggccgagctgtacatcaacgagcacgactacgccaaggccgccttctgcctggaggagctgatgatgaccaacccccacaaccacctgtactgccagcagtacgccgaggtgaagtacacccagggcggcctggagaacctggagctgagcagaaagtacttcgcccaggccctgaagctgaacaacagaaacatgagagccctgttcggcctgtacatgagcgccagccacatcgccagcaaccccaaggccagcgccaagaccaagaaggacaacatgaagtacgccagctgggccgccagccagatcaacagagcctaccagttcgccggcagaagcaagaaggagaccaagtacagcctgaaggccgtggaggacatgctggagaccctgcagatcacccagagctag

SEQ ID NO: 181474 - DNA, 894 bp, Artificial Sequence
  derived and/or modified sequence
atggccaaggtcagcgaactgtatgatgttacctgggaggaaatgagggacaaaatgcgcaaatggcgggaagagaacagcagaaacagcgagcagatcgttgaggtgggtgaagaacttattaatgagtacgcgtcaaagcttggagacgatatttggattatctacgagcaagtgatgatcgcggcgctagactatggcagagatgaccttgcactcttttgtctgcaggagctgagacgacagtttccgggctcacatagagtgaagcgcctgacaggtatgcgcttcgaagctatggaaagatacgatgacgccatccagctgtacgatcgcatactccaagaggacccaactaacacagcagcacggaaacgtaagatcgcaatacgcaaagctcaagggaagaacgttgaggcgataagagaactgaatgagtatttggaacaattcgtgggggaccaggaggcttggcacgagcttgcggagctgtatatcaacgagcatgattacgccaaggctgctttttgcctagaggaactcatgatgaccaacccgcataatcatctttactgccagcaatacgccgaagtcaagtacactcagggaggccttgaaaatttggagctgtcccgcaaatactttgcacaggcactaaaattaaataatcgaaacatgcgagccctgttcgggctatacatgagtgcatctcacattgccagcaatcccaaggcttcagcaaaaacaaagaaggataacatgaagtacgcctcctgggccgcaagtcagattaaccgggcctaccagtttgccggaagatccaagaaggagaccaagtattctctgaaggcagtggaggacatgctggagacactgcagatcactcagtcctag

SEQ ID NO: 181475 - DNA, 894 bp, Artificial Sequence
  derived and/or modified sequence
atggccaaggtgtctgagctgtatgatgtgacctgggaggagatgagggacaagatgaggaagtggagggaggagaacagcaggaacagcgagcagatcgtggaggtgggggaggagctgatcaatgaatatgccagcaagctgggagatgacatctggatcatctatgagcaggtgatgattgctgccctggactatggaagagatgacctggccctcttctgcctgcaggagctgcggcggcagtttcctggcagccaccgggtgaagaggctgaccggcatgagatttgaggccatggagagatatgatgatgccatccagctgtatgaccgcatcctgcaggaggaccccaccaacacagctgccaggaagaggaagatcgccatcaggaaggcccagggcaagaatgtggaggccatccgggagctgaatgagtacctggagcagtttgtgggggaccaggaggcctggcatgagctggccgagctgtacatcaatgaacatgactatgccaaggccgccttctgcctggaggagctgatgatgaccaacccccacaaccacctgtactgccagcagtatgcagaggtgaagtacacccagggcggcctggagaacctggagctgagcaggaagtactttgcccaggccctgaagctgaacaacagaaacatgagggccctgtttggcctgtacatgtctgccagccacatcgccagcaaccccaaggccagcgccaagaccaagaaggacaacatgaagtatgcctcctgggccgccagccagatcaacagagcctaccagtttgctggccgcagcaagaaggagaccaagtacagcctgaaggctgtggaggacatgctggagaccctgcagatcacccagagctag

SEQ ID NO: 181476 - DNA, 894 bp, Artificial Sequence
  derived and/or modified sequence
atggccaaggtgagcgagctgtacgacgtgacctgggaggagatgcgtgataagatgcggaagtggagagaggaaaattctagaaattccgagcagatcgtggaggttggagaagagttgattaacgaatacgcaagcaagcttggtgacgatatctggataatttatgagcaggtaatgattgccgccctggactatgggagggatgatcttgcattgttttgcctgcaggaactccgaaggcagttcccagggagccacagagtgaaaagattgaccggtatgaggtttgaggctatggaacgctatgatgatgccatacagctgtacgaccggattcttcaggaggatccgaccaacactgccgcgaggaaacgcaaaatcgccatcagaaaggcccaaggaaagaatgtggaggcaatacgggagcttaacgagtacttggagcagtttgtcggtgatcaggaggcttggcatgaactggctgaactgtatatcaacgagcatgattatgccaaggccgcgttttgtctcgaagagctgatgatgaccaatccacacaaccacctctactgtcaacagtatgccgaggtcaaatatacccaaggtgggctcgagaacctggaattgtccagaaagtatttcgcccaggccttgaaactgaacaaccgcaatatgcgcgctttatttggactctacatgagtgcttcgcacattgccagcaatccaaaggcatctgctaaaaccaaaaaagataacatgaagtatgcctcttgggccgcgtcccagataaacagggcgtatcagttcgccggcagaagtaaaaaggagactaagtacagcctcaaggcagtcgaggatatgttagagaccctccaaatcactcagtcctag

SEQ ID NO: 181477 - DNA, 894 bp, Artificial Sequence
  derived and/or modified sequence
atggctaaggtgtcagagctttatgatgtaacatgggaggaaatgagagacaagatgaggaagtggcgggaggagaattcgagaaactcagaacagattgtcgaggtgggggaggagttgattaatgagtacgcctccaagttgggagacgatatttggatcatctacgagcaggttatgatcgctgcactcgattacgggcgtgacgaccttgcactgttttgtctccaggagctgcgcaggcagttccccggttcccacagagtcaagcggctgaccggcatgcgctttgaagcgatggaacggtacgatgatgcgattcagctttatgatcggatcttgcaggaggaccctacaaatactgctgcacgcaaaagaaagatcgcaataagaaaggcacagggtaagaacgttgaggccatcagggagcttaatgaatacctggaacagtttgttggggatcaagaagcttggcacgagctggccgagctctatattaatgaacacgactacgcaaaagctgcattctgtctggaagagcttatgatgaccaatccgcataaccacctgtattgtcagcagtatgcagaggtcaagtatacccagggcggtctggaaaacctcgagctcagcaggaaatactttgctcaggcacttaaactgaacaatagaaatatgagggcactgtttggactgtatatgtctgcttctcatattgcatccaacccaaaagcgagtgcaaagactaagaaagacaacatgaaatatgctagctgggcggcatcacaaatcaatagggcctatcagttcgccggtagaagcaaaaaggagacaaagtactccctcaaagctgtggaggacatgctagaaacattgcagattactcagagctag

SEQ ID NO: 181478 - protein, 657 aa, Artificial Sequence
  derived and/or modified sequence
MQWRALVLGLVLLRLGLHGVLWLVFGLGPSMGFYQRFPLSFGFQRLRSPDGPASPTSGPVGRPGGVSGPSWLQPPGTGAAQSPRKAPRRPGPGMCGPANWGYVLGGRGRGPDEYEKRYSGAFPPQLRAQMRDLARGMFVFGYDNYMAHAFPQDELNPIHCRGRGPDRGDPSNLNINDVLGNYSLTLVDALDTLAIMGNSSEFQKAVKLVINTVSFDKDSTVQVFEATIRVLGSLLSAHRIITDSKQPFGDMTIKDYDNELLYMAHDLAVRLLPAFENTKTGIPYPRVNLKTGVPPDTNNETCTAGAGSLLVEFGILSRLLGDSTFEWVARRAVKALWNLRSNDTGLLGNVVNIQTGHWVGKQSGLGAGLDSFYEYLLKSYILFGEKEDLEMFNAAYQSIQNYLRRGREACNEGEGDPPLYVNVNMFSGQLMNTWIDSLQAFFPGLQVLIGDVEDAICLHAFYYAIWKRYGALPERYNWQLQAPDVLFYPLRPELVESTYLLYQATKNPFYLHVGMDILQSLEKYTKVKCGYATLHHVIDKSTEDRMESFFLSETCKYLYLLFDEDNPVHKSGTRYMFTTEGHIVSVDEHLRELPWKEFFSEEGGQDQGGKSVHRPKPHELKVINSSSNCNRVPDERRYSLPLKSIYMRQIDQMVGLI

SEQ ID NO: 181479 - DNA, 1974 bp, Artificial Sequence
  derived and/or modified sequence
atgcagtggagagccctggtgctgggcctggtgctgctgagactgggcctgcacggcgtgctgtggctggtgttcggcctgggccccagcatgggcttctaccagagattccccctgagcttcggcttccagagactgagaagccccgacggccccgccagccccaccagcggccccgtgggcagacccggcggcgtgagcggccccagctggctgcagccccccggcaccggcgccgcccagagccccagaaaggcccccagaagacccggccccggcatgtgcggccccgccaactggggctacgtgctgggcggcagaggcagaggccccgacgagtacgagaagagatacagcggcgccttccccccccagctgagagcccagatgagagacctggccagaggcatgttcgtgttcggctacgacaactacatggcccacgccttcccccaggacgagctgaaccccatccactgcagaggcagaggccccgacagaggcgaccccagcaacctgaacatcaacgacgtgctgggcaactacagcctgaccctggtggacgccctggacaccctggccatcatgggcaacagcagcgagttccagaaggccgtgaagctggtgatcaacaccgtgagcttcgacaaggacagcaccgtgcaggtgttcgaggccaccatcagagtgctgggcagcctgctgagcgcccacagaatcatcaccgacagcaagcagcccttcggcgacatgaccatcaaggactacgacaacgagctgctgtacatggcccacgacctggccgtgagactgctgcccgccttcgagaacaccaagaccggcatcccctaccccagagtgaacctgaagaccggcgtgccccccgacaccaacaacgagacctgcaccgccggcgccggcagcctgctggtggagttcggcatcctgagcagactgctgggcgacagcaccttcgagtgggtggccagaagagccgtgaaggccctgtggaacctgagaagcaacgacaccggcctgctgggcaacgtggtgaacatccagaccggccactgggtgggcaagcagagcggcctgggcgccggcctggacagcttctacgagtacctgctgaagagctacatcctgttcggcgagaaggaggacctggagatgttcaacgccgcctaccagagcatccagaactacctgagaagaggcagagaggcctgcaacgagggcgagggcgacccccccctgtacgtgaacgtgaacatgttcagcggccagctgatgaacacctggatcgacagcctgcaggccttcttccccggcctgcaggtgctgatcggcgacgtggaggacgccatctgcctgcacgccttctactacgccatctggaagagatacggcgccctgcccgagagatacaactggcagctgcaggcccccgacgtgctgttctaccccctgagacccgagctggtggagagcacctacctgctgtaccaggccaccaagaaccccttctacctgcacgtgggcatggacatcctgcagagcctggagaagtacaccaaggtgaagtgcggctacgccaccctgcaccacgtgatcgacaagagcaccgaggacagaatggagagcttcttcctgagcgagacctgcaagtacctgtacctgctgttcgacgaggacaaccccgtgcacaagagcggcaccagatacatgttcaccaccgagggccacatcgtgagcgtggacgagcacctgagagagctgccctggaaggagttcttcagcgaggagggcggccaggaccagggcggcaagagcgtgcacagacccaagccccacgagctgaaggtgatcaacagcagcagcaactgcaacagagtgcccgacgagagaagatacagcctgcccctgaagagcatctacatgagacagatcgaccagatggtgggcctgatctag

SEQ ID NO: 181480 - DNA, 6146 bp, Artificial Sequence
  derived and/or modified sequence
ggctagttcctggtgcgtcacgggggagttccttaaaggggaagcgagccgggctacggggcgagcgcggggtgcggtggtcggcggggaggcccccgcgctttaaaataatgcccgcggcgcccgcgcgaccatgcaatggcgagcgctcgtcctggggctggtgctcctccggcttggcctccatggagtattgtggctcgtcttcgggctggggcccagcatgggcttctaccagcgctttccgctcagcttcggcttccagcgtctgaggagccccgacggccccgcgtcgcccacctcggggcccgtgggccggcctgggggggtatccgggccgtcgtggctgcagccgccggggaccggggcagcgcagagcccgcgcaaggctccgcggcgtcctgggccggggatgtgcggcccagccaactggggctacgtgctgggcggccggggccgcggcccggacgagtacgagaagcgctacagcggcgccttccctccgcagctgcgtgcccagatgcgcgacctggcacggggcatgttcgtctttggctacgacaactacatggctcacgccttcccccaggacgagctcaaccccatccactgccgcggccgtgggcccgaccgcggggacccttcaaatctgaacatcaatgatgtactagggaactactcattgactcttgttgatgcattggatacacttgcaataatgggaaattcatccgagttccagaaagccgtcaagttagtgatcaacacagtttcatttgacaaagattccaccgtccaagtctttgaggccacgataagggtcctgggaagcctcctttctgctcacagaataataactgactccaagcagccctttggtgacatgacaattaaggactatgataatgagttgttatacatggcccatgacctggcggtgcggctcctccctgcttttgaaaacaccaagacagggattccatatcctcgggtgaatctaaagacaggagttcctcctgacaccaataatgagacatgcacagcgggagccggttccctcctggtggaatttgggattctgagtcgactcctgggggactccacatttgagtgggtggccagacgagcagtgaaagccctttggaacctccggagcaatgatacaggattactaggcaatgtcgtgaacattcagacgggccactgggttggaaagcagagtggcctgggtgccgggctggactccttctatgaatacctcttgaaatcttacattctctttggagaaaaagaagacctagaaatgtttaatgctgcatatcagagtattcagaactacttaagaagagggcgggaagcctgcaatgaaggagaaggagaccctccactctatgtcaacgtgaacatgttcagtgggcagctgatgaacacctggattgactctctgcaggcctttttccctggactgcaggtgctgataggagatgtggaagatgccatctgccttcatgccttctactatgccatatggaaacgatatggtgccctccctgagagatataactggcagctgcaggcccctgacgttctcttctacccactgagaccagagttagtggaatccacatatctcctctaccaggcaaccaagaatcccttctacctccatgtaggaatggatattctgcagagtctggaaaagtacacaaaagtcaagtgtgggtacgccacgctgcatcacgtcattgacaagtccacagaagaccggatggagagcttctttctcagtgagacctgtaaatatttgtatctgctgtttgatgaagacaatccagtacacaagtctggaaccagatacatgttcacaacagagggacacattgtatctgtggatgagcatcttcgggaattgccatggaaggaattcttctctgaagagggagggcaggaccaagggggaaagtctgtgcacaggccgaaacctcatgagttaaaagtcatcaactccagctccaactgcaatcgtgtacctgatgagaggaggtactccctgcccttaaagagcatctacatgcgacagattgaccagatggttggtttgatttgatctgctctctgtgaggcctcatcttgaaccagaccttaacgaccaaacccagaccatgccaaagtccagtctgaaatgaaaggggacagaagtcttgctgtccatggtggtgtaggaatttctgtgcaacacctcaccacgtctggttaatccttgcacacttcagtgtttctctcctgttcaataaaatgccctgttaaggatataatttgaagtgagaagatacatggaaattgccctcttatgacatgttgatgttataagcacaatagatggggcatctttggattgatgttcacagctttatacttcagaacctaagtctcttcactttgctggcacctgctatactggagtattgctatgtctttaaaaaattttttttattatattttatttttttgagacagggtcttgatatttttttgggacagggttacctgggctcaagtgatccttctgcctcagcctcccgagtagctgggattacaggtgagcaccactgtacctggctagctacttctttgttagaggattgagaatgaaatttctgcaaaagggcccatggttcatttggtatccctatttaattgcattgaaaatgtcatcctttctgttgttagataattggggtcttcccctgatatccaaccgtgattttggatcacatgggagaaaaagtcatccagtttttcatgtttgcctcaagtaatctttacagtgttacaaattatttgcttaagaagaatggtcttaaccagaattcttaacagatagtctcttaggttattatgttatggtctaagaggttaactgacatcttttgggtggtattttgcattttgaatatgaacttacctgaggaactcccatagttccagaatcaggtgccttttagggagagaacaatacctaagattgtctgagcttccatctttctcatatttcctaagcaaggattctcacttctgaccatatttgggttagagttctgttttgtttctgttttctgtgtctagtgccaattagctaaatcagggagaaagaaatgatcacatgacttttagcatccttgagccatttctctgtgtaatacaggctttagattagtgccttatattggttttggtttggggcactggatgtcgcagctactgctatggtttcaggaggcctgtttagccacatggtgagaccgtggtgaaagggggatggaaattgcttggccagtctttgcctttcatcctgtaaaagtaagcatgtagaaggaggaagttgtgctaaaatgcctttgtttttttgttattattttcttagccagaacatctctctttgaactcacactgatacacacctgctactcttacacagtgcagcagggttgactcttagtctggcttccatgaagcgtcatgggtggaaacgcattctagtaaaaaaggtaggaaatccctaaaacttccagcctcacatagcacggttctcacctgtcactgttttcccacctctaaggatttcatgtacatcttttcaaagctagaaataagcactgtctaagtttatgttgcatttttagtcaaaagggagaaatcttattccttcttgaaaattttaagtgttatggttttatatagttcagttctttgagatttttgaaaagagtattttcagtaataaacgtgccatctctatctcttaaacatttattacaacaattgttttaaaatagaaaaaataaaatgcttctattttaccttttttcatttcagaagcattattctgtttattaacagtgtcccatctactgaatagaaaactttgagaataatatatatatatattttaaatgttttcactgactcattgaaaatgttaattacacacacatgcatgcatgcacacacgagcatacttgtacctttgtctctgggcaaacaggtgggactgttagtgacccatttgggaaaatagagcatctcagagaaggaggtgagttcttcctgcctgtgatttctcttggcgctcccctcctctcccgctctggcttctgtggcggcagtggtgggtaagcactccagtgttctcttaatgaggcactttgcctgtcactcgagcaagcctgggtgttccttcctcctcatgctcctggaatagggaatagggatctcatgcttgcaaactacacaatgctgcaggtgcttcccaggggccacaggctgtcaggaaacgtgttttatgttaagtcacaaacccacttgacttctgggtactggaattaataccagtgggtgagactgagggtgagtgagttagtacatattaatcctggttgttgagcttccagactaccccgtccaaagtttgatgctatgtagtcagtggtttgtggggctggatgccagaaggttctttgagccagtttcaaaggttacttgttttttttttttttttttaaagtcagaatgttaacagctgtgatatatcctgcagggcttttgcagtttcttctgttctgtgttctgaaatactgggtagagaatggctgaggaggagattaccagagaagttgctttgctcagtgctttgccccaggattgcctcaaatctgagtggacttcatcctttgcggcggctctgagcctggcccatcttcctattcccacgtgtagctagtgtctagtgtcagctttgctcagtgtggtggaaacattttgcagaactgttgtagaaagctgccttatagttggcttgacaaagcataattctctcataacaaactttcaaatcattacagtagcttagctactttagttgatgtgaccgaggaatcccttctagaatcataggtggcaagggagggtttgctagctctccatttgcactggccattgtgaaaaaccagcttctgtattcaaatctttccttcatttttttaaattttttttttggcagcgcttgtgctggaacttactcattgtaactgaatcctcagggcttttcttgttttagatcatggactgtgcacgtgacacttaaataattttctatgtatttaaagaaaaatgcaccaggatggtgtctgtgcacgtgactattagaggagcgtctgtagaagtacctggtttggtcagtgcagttgtgcaatctgagggccttgtttcctcctcccctttccccttctccccaccaaaggaaaatatccctcttaatgatttcgtagttcagtttactgaatgattaccacctgtaattcctctttggattgtgtagactcaacatgagacattcctttctgctttctggagggcaccaggggcctttctctttgataaattttttttgtctgttgacaaaaacaaaaatcttttttcaaatgtagtgctggtgaaaaggtagggctgagtgattaccttagccacagggtggctgagcaggaactttagaagaaaatcctgagctttcctgtccattcccagcatccagctcctattctagtgcctcttccctgcagggcagggaccccttgggaaatcgaggaggtgggacgggctgggccctgtgtcccaggtttcacagggctcagggttatgctcccgcttgaatctggacgtgaatctggtaaaaatatcaagtacctgtggaactccctgattctataccctcttccttctttctgcaaggcagaggaataatatttttaaaggttattttgttttagttttaaatagcaaaacacaagctgcatttttatttattttgcataagaaaggtaaatctttttacaaaaaaaagtatagagttggaaactctgggaaaacttacggaaatacacaaatgcttctctgtaatgtgcaatatgctttgcaactgtagatgatattttatgtttaatctgtaaataagaaatgtatttaaattaaaagggatctttttgtaaaaggaccaaatgttcttttataaatgtaataaggaatatcttgctctttaaaatttattaggatttttatgagtaatttttattaaaagatttctttttttg

SEQ ID NO: 181481 - DNA, 976 bp, Artificial Sequence
  derived and/or modified sequence
cggagagcctgggggttggggacgatgggctagttcctgctgcgtgcccagatgcgcgacctggcacggggcatgttcgtctttggctacgacaactacatggctcacgccttcccccaggacgagctcaaccccatccactgccgcggccgtgggcccgaccgcggggacccttcaaatctgaacatcaatgatgtactagggaactactcattgactcttgttgatgcattggatacacttgcaggtcctgggaagcctcctttctgctcacagaataataactgactccaagcagccctttggtgacatgacaattaaggactatgataatgagttgttatacatggcccatgacctggcggtgcggctcctccctgcttttgaaaacaccaagacagggattccatatcctcgggtgaatctaaagacaggagttcctcctgacaccaataatgagacatgcacagcgggagccggttccctcctggtggaatttgggattctgagtcgactcctgggggactccacatttgagtgggtggccagacgagcagtgaaagccctttggaacctccggagcaatgatacaggattactaggcaatgtcgtgaacattcagacgggccactgggttggaaagcagagtggcctgggtgccgggctggactccttctatgaatacctcttgaaatcttacattctctttggagaaaaagaagacctagaaatgtttaatgctgcatatcagagtattcagaactacttaagaagagggcgggaagcctgcaatgaaggagaaggagaccctccactctgtcaacgtgaacatgttcagtgggcagctgatgaacacctggattgactctctgcaggcctttttccctggactgcaggtgctgataggagatgtggaagatgccatctgccttcatgccttctactatgccatatggaaacgatatggtgccctccc

SEQ ID NO: 181482 - DNA, 1974 bp, Artificial Sequence
  derived and/or modified sequence
atgcagtggcgggccttggtgctaggactggtcctgctgcgcctgggccttcacggtgttctttggcttgtgtttggcctggggccaagcatgggcttctaccagcgattccccctgagttttggatttcagcgcctgaggagtccagatggcccggctagccccaccagcggccccgttggacgccctgggggcgttagtggaccctcatggcttcagccacctggcacaggggcggctcagtctcccagaaaggccccccgaagaccgggcccaggtatgtgtggtccggctaattggggttatgtacttggcgggagaggccgaggccccgacgaatacgagaagagatactccggagccttccccccacagctccgcgcccagatgcgcgacctggccaggggcatgttcgtcttcgggtatgacaactatatggcacacgcctttcctcaagatgagctgaatcctattcactgtcgtggacggggaccggacagaggtgacccatccaatctgaacatcaacgatgtgcttggaaactattccctcaccctggtagatgcactcgacaccctcgcaattatggggaactccagcgagtttcaaaaggctgtgaagttggtcatcaatacggtctcgttcgataaagactccaccgtccaggtgttcgaggctacaatacgggtactagggagccttttatccgcccaccgaattatcacagattccaagcagccctttggagacatgacaattaaggactacgataatgagttgctgtacatggcccatgacttggccgtgcgcctcctgccagcttttgaaaatacgaaaaccggcatcccttatcctcgagtcaacctaaagaccggggttccacccgacacaaataatgaaacctgcactgccggagccgggtctcttctagtggagttcggaatcctgagtcggctgcttggcgactctaccttcgaatgggtggcacgcagagcagtgaaggccctctggaacctgcgctcaaacgataccggcctactcgggaacgtggttaatatccagacgggtcattgggttggcaagcagagtggcctgggcgccggactcgacagcttttatgaatatctgctcaaatcttacatactgttcggagaaaaggaggatttggaaatgttcaacgctgcctatcaatcaatccaaaattatctgcgtcgggggcgcgaggcctgcaacgagggagaaggggaccccccactgtatgtgaatgtgaatatgttctctggacagttaatgaatacttggatcgatagcctgcaggccttcttccctggtctgcaagtcctaatcggcgacgtggaagacgctatctgtttacacgccttctactatgccatctggaagaggtacggggcactgcccgagaggtacaattggcagctccaggcccccgatgtactattctacccccttcggccagagctggtggagtcaacttatctcctttatcaggctacgaagaaccccttttacctgcacgttgggatggacatcctccagtcactggagaagtatacaaaagtcaagtgcggatatgccaccctccaccatgtgattgataagagcacggaggaccggatggagtcattctttctctccgagacttgtaagtatctgtatctcctgtttgacgaggataatccagtgcataaaagtggaacacggtatatgttcacaaccgaaggccatatcgtcagcgtggacgagcacttaagggagctcccttggaaggagtttttttcagaagagggagggcaggaccagggcggcaaatctgtgcaccgccccaagccacatgaactaaaggtaattaattcttctagcaactgcaacagagtgccagatgaaaggcggtattctcttcccttgaaatcaatctatatgcgtcagattgatcagatggtagggctgatctag

SEQ ID NO: 181483 - DNA, 1974 bp, Artificial Sequence
  derived and/or modified sequence
atgcagtggagggccctggtgctgggcctggtgctgctgcggctgggcctgcacggcgtgctgtggctggtgtttggcctgggccccagcatgggcttctaccagcgcttccccctgagctttggcttccagaggctgcggagcccagatggccctgccagccccaccagcggccctgtgggccggcctggaggagtgtctggccccagctggctgcagcccccaggcactggagctgcccagagccccaggaaggccccccggcggcccggccctggcatgtgtggccctgccaactggggctacgtgctgggcggccggggccggggcccagatgaatatgagaagcgctacagcggggccttccccccccagctgcgggcccagatgagggacctggcccggggcatgtttgtgtttggctatgacaactacatggcccacgccttcccccaggatgagctgaaccccatccactgccggggccggggccctgacagaggagaccccagcaacctgaacatcaatgatgtgctgggcaactacagcctgaccctggtggatgccctggacaccctggccatcatgggcaacagcagcgagttccagaaggctgtgaagctggtgatcaacacagtgtcctttgacaaggacagcacagtgcaggtgtttgaggccaccatccgggtgctgggcagcctgctgagcgcccaccgcatcatcacagacagcaagcagccctttggagacatgaccatcaaggactatgacaatgagctgctgtacatggcccatgacctggccgtgcggctgctgcctgcctttgagaacaccaagacaggcatcccctacccccgggtgaacctgaagacaggagtgcccccagacaccaacaatgagacctgcacagctggggccggcagcctgctggtggagtttggcatcctgagccggctgctgggggacagcacctttgagtgggtggcccggcgggctgtgaaggccctgtggaacctgcggagcaatgacaccggcctgctgggcaatgtggtgaacatccagacaggccactgggtgggcaagcagagcggcctgggcgccggcctggacagcttctatgagtacctgctgaagagctacatcctgtttggagagaaggaggacctggagatgtttaatgctgcctaccagagcatccagaactacctgcggcggggccgggaggcctgcaatgaaggagagggggacccccccctgtatgtgaatgtgaacatgttttctggccagctgatgaacacctggattgacagcctgcaggccttcttccctggcctgcaggtgctgattggagatgtggaggatgccatctgcctgcacgccttctactatgccatctggaagagatatggagccctgcctgagcgctacaactggcagctgcaggccccagatgtgctcttctaccccctgcggcctgagctggtggagagcacctacctgctgtaccaggccaccaagaaccccttctacctgcacgtgggcatggacatcctgcagagcctggagaagtacaccaaggtgaagtgtggctacgccaccctgcaccacgtgattgacaagagcacagaggacaggatggagagcttcttcctgtctgagacctgcaagtacctgtacctgctgtttgatgaggacaaccctgtgcacaagagcggcacccgctacatgttcaccacagagggccacatcgtgtctgtggatgagcacctgcgggagctgccctggaaggagttcttcagcgaggagggcggccaggaccagggcggcaagtctgtgcaccggcccaagccccatgagctgaaggtgatcaacagcagcagcaactgcaacagagtgcctgatgagcggcgctacagcctgcccctgaagagcatctacatgaggcagattgaccagatggtgggcctcatctag

SEQ ID NO: 181484 - DNA, 1974 bp, Artificial Sequence
  derived and/or modified sequence
atgcagtggcgggccctggtgctgggcctggtgctgctgcggctgggcttgcacggcgtcctctggctagtgttcggacttggccctagtatgggattttatcagaggtttcctctgtcctttgggtttcaacggttgagaagccccgacgggcccgcgtctcctacttccggccctgtgggacggccagggggcgtttcaggaccttcctggctacaacctccgggaaccggtgctgcccagtcaccacgcaaggctcccagacggcccggccccgggatgtgtggccctgctaattggggctatgtcctgggaggtcgtggacgtggacctgacgagtatgagaaacggtactccggcgcattcccaccacaactgagagcccagatgagagacctcgcacgggggatgtttgtattcggatacgacaactacatggcacacgcctttcctcaagacgagctaaatcccatacactgccgcggacgggggcccgataggggtgatccttctaatttgaacattaatgacgtccttggaaattacagcctgacccttgtggatgctcttgacacactggcaatcatgggaaatagcagcgaatttcagaaggccgtcaaactcgttataaatacagtgtcatttgataaggactctactgtccaggttttcgaggcaacaatccgggtcctgggaagtcttctgtctgcgcaccgaattatcaccgatagtaagcagccattcggagatatgaccatcaaagattatgacaacgaactcctatacatggcacatgatctggcggtgcggttgctcccagcatttgagaatacaaagaccggtatcccttaccctcgggtgaacctcaagacaggagtgcctcccgataccaataacgagacctgcacagccggagcagggtctctcttagtggagtttggaatcctcagcagacttttgggtgattctacatttgaatgggtggcgcgccgcgccgtaaaagcactgtggaacctgagatccaacgatactgggctgttgggcaatgtggtgaacatacagacaggacactgggtgggtaagcagagcgggttgggcgctggcctggactctttttatgaatacctactcaaaagctacatattattcggggagaaggaagacctggagatgttcaatgccgcttaccagtccatccagaattatctgagaagaggtcgcgaagcatgcaacgagggtgaaggcgatccaccactttatgtaaacgtgaacatgttttcgggacagctgatgaatacttggatcgactcacttcaggctttttttccaggcttgcaggtgctgattggagatgttgaggacgcgatttgtctccacgccttttactacgctatctggaagagatacggcgctttgcctgagagatacaattggcagctgcaggcccctgacgtgctgttctaccccctgcgtcccgaactcgtggagtccacctacttactttaccaggccactaagaatcccttttaccttcacgttggcatggacattctgcaatccttggaaaagtatacaaaggtgaaatgtggttatgcaaccttacaccacgtcatcgataagtcaacggaagaccggatggagagtttcttcttgtcagagacatgcaaatatctgtatttactgtttgacgaggataatcctgtgcataagtcggggacacggtacatgtttacaactgagggccatatagtttcggtggatgaacacttgcgagaactgccctggaaagaatttttctcagaggaaggcggtcaggaccaaggcggaaaatctgtgcatcgacctaagccccacgaattgaaagtgattaacagctcttccaattgtaaccgggtaccggatgaaagacgctactctttacccctgaagtcaatatacatgaggcagatagatcaaatggtaggtctcatttag

SEQ ID NO: 181485 - DNA, 1974 bp, Artificial Sequence
  derived and/or modified sequence
atgcagtggcgcgctttggtccttgggctggtcctcctgcgcttgggccttcatggggtgttatggcttgtgttcggtttggggccatcaatgggcttctaccagagatttcctctttctttcgggttccagaggctgcggagtcctgacggcccagcctccccaacaagtggccctgtcggaagaccaggaggggtgagcgggcctagttggcttcagccaccgggaaccggagcggctcagtcaccacggaaagccccacggaggccagggccaggaatgtgcgggcctgcaaattggggttacgtcctgggaggacgaggcagagggcctgacgaatacgagaagagatactcgggggcatttcccccacagctgcgggctcagatgcgcgacctggctagggggatgttcgtatttgggtacgacaattacatggcccacgcttttccacaggacgagctgaaccccattcattgtagaggaagaggtcccgatagaggcgacccatctaacctaaatatcaatgatgtgctgggcaattatagtcttacgttggtggacgctttagacacactggccataatgggaaatagttccgaattccagaaagctgtcaaactagtcataaataccgtttcttttgataaggactcgaccgtccaagtcttcgaagccaccatcagagtcctcgggtcccttctgagcgcccataggatcatcaccgattcgaagcagccattcggggatatgactattaaagattacgataacgagttgctgtatatggcccatgacctggccgttcgtttgttgccagccttcgagaataccaagaccgggattccatatccccgagtaaaccttaaaacaggtgtgcccccagacactaataacgagacctgtacagcaggagctggcagcttactggtagaattcggaatcctgtccaggctactgggtgatagcacatttgaatgggtcgccagacgggctgtcaaagcgctgtggaacctgcggtccaatgacaccggtttgttgggaaatgtggtcaacatacagacagggcactgggtcggaaagcagagcgggcttggtgcaggtctggatagtttttatgagtacctcctcaaaagttacatcttatttggcgagaaagaggacctcgagatgtttaacgctgcttaccagtctattcagaactatctgcgccgtgggagggaggcgtgcaatgagggcgagggcgacccaccactgtatgtgaatgtgaatatgttttcagggcagcttatgaatacatggatcgacagcctccaggcctttttccctgggttgcaggtcctgataggtgatgtggaggatgccatctgccttcatgctttttattacgccatatggaagcggtatggggcactccctgagcggtacaactggcagctccaagccccagacgtgctcttttacccgctacgacctgaactggttgaaagtacctatctgctatatcaggccacaaaaaatcctttctatctgcatgtcggcatggatatcctccagagtctggagaaatataccaaggttaagtgtggatatgcgacgctgcaccatgtgatcgacaagtccaccgaggacaggatggaaagtttttttctctccgagacgtgcaagtacctgtacctcctgttcgatgaggacaatccagtgcacaagtctggcactcgttacatgtttacgaccgagggccacatcgtgagtgttgacgagcacctgagggagctcccctggaaggaatttttctccgaggaaggtggccaggaccagggcggaaaaagtgtgcaccgccctaagcctcacgagctgaaggtgatcaattcaagcagtaattgcaatcgcgtgcccgacgagcggagatattccctccctttaaagtccatctatatgagacagatcgatcagatggtgggcttgatttag

SEQ ID NO: 181486 - protein, 1163 aa, Artificial Sequence
  derived and/or modified sequence
MQFETLRQVCNSVLSHFHGVFSSPPNILQNELFGQTLNNARKRSPSVSRDQNRRYDQREEREEYSQYATSDTAMPRSPSDYADRRSQHEPQFYEDSDHLSYRDSNRRSHRHSKEYIVDDEDVESRDEYERQRREEEYQSRYRSDPNLARYPVKPQPYEEQMRIHAEVSRARHERRHSDVSLANADLEDSRISMLRMDRPSRQRSISERRAAMENQRSYSMERTREAQGPSSYAQRTTNHSPPTPRRSPLPIDRPDLRRTDSLRKQHHLDPSSAVRKTKREKMETMLRNDSLSSDQSESVRPPPPKPHKSKKGGKMRQISLSSSEEELASTPEYTSCDDVEIESESVSEKGDMDYNWLDHTSWHSSEASPMSLHPVTWQPSKDGDRLIGRILLNKRLKDGSVPRDSGAMLGLKVVGGKMTESGRLCAFITKVKKGSLADTVGHLRPGDEVLEWNGRLLQGATFEEVYNIILESKPEPQVELVVSRPIGDIPRIPDSTHAQLESSSSSFESQKMDRPSISVTSPMSPGMLRDVPQFLSGQLSIKLWFDKVGHQLIVTILGAKDLPSREDGRPRNPYVKIYFLPDRSDKNKRRTKTVKKTLEPKWNQTFIYSPVHRREFRERMLEITLWDQARVREEESEFLGEILIELETALLDDEPHWYKLQTHDVSSLPLPHPSPYMPRRQLHGESPTRRLQRSKRISDSEVSDYDCDDGIGVVSDYRHDGRDLQSSTLSVPEQVMSSNHCSPSGSPHRVDVIGRTRSWSPSVPPPQSRNVEQGLRGTRTMTGHYNTISRMDRHRVMDDHYSPDRDSHFLTLPRSRYSQTIDHHHRDGRDCEAADRQPYHRSRSTEQRPLLERTTTRSRSTERPDTNLMRSMPSLMTGRSAPPSPALSRSHPRTGSVQTSPSSTPVAGRRGRQLPQLPPKGTLDRKAGGKKLRSTVQRSTETGLAVEMRNWMTRQASRESTDGSMNSYSSEGNLIFPGVRLASDSQFSDFLDGLGPAQLVGRQTLATPAMGDIQVGMMDKKGQLEVEIIRARGLVVKPGSKTLPAPYVKVYLLDNGVCIAKKKTKVARKTLEPLYQQLLSFEESPQGKVLQIIVWGDYGRMDHKSFMGVAQILLDELELSNMVIGWFKLFPPSSLVDPTLAPLTRRASQSSLESSTGPSYSRS

SEQ ID NO: 181487 - DNA, 384 bp, Artificial Sequence
  derived and/or modified sequence
atgactgagtccggacggctgtgcgcctttattaccaaggtgaagaaaggaagtctggctgacaccgtgggccatctccgacccggggatgaagttctagaatggaatggcagactcctgcagggtgccaccttcgaagaggtgtataacattatactggagtcaaaacctgagcctcaggttgaactggttgtttctcggcctattggggacattcctcggattcccgactctacccacgctcaattggagtccagtctgcccggactcgcctggtggttgacccgggtcattccagcactatgggaggccgaggccggaggtagccgcgggcaggagatcgagactatcctggccaatacagtcaaaccccgcttatactag

SEQ ID NO: 181488 - DNA, 3492 bp, Artificial Sequence
  derived and/or modified sequence
atgcagttcgaaaccctcagacaggtgtgcaactcagttcttagccatttccatggtgtgttttcatctcctcccaatattctacagaacgaactgtttggccagaccttgaataacgccaggaaaagaagcccatctgttagccgtgaccagaacagacggtatgatcagcgggaggaacgcgaggaatactcacagtacgccactagtgatacagctatgccacgttctccctccgattatgcagacagacggtcccagcacgaaccacaattctatgaggattccgatcatttgagctaccgagactcaaaccggcggagccacagacactcaaaagaatatatagtggacgacgaagacgtggaaagccgggatgaatacgagcggcagcgcagagaggaagaatatcagagtagatatcgaagtgacccaaatctggccagatatcctgttaagccacaaccatacgaggagcagatgagaatccacgccgaagtatcaagagcccgacacgagagaaggcactctgacgtaagcctggccaacgcggatctagaagactctaggattagtatgctgcgtatggacaggccttcccgccagcgctctatttccgaaaggagagcagccatggagaaccagaggagttatagcatggagcggacacgcgaggcccagggcccaagcagctacgcccagcggacaacaaatcactctccccctacaccacggaggagcccattacccatagataggcccgaccttcggaggaccgatagtctcagaaaacagcatcacttggaccccagttcggcagtgcgaaagaccaagcgggagaagatggaaactatgctcaggaacgacagtctgtcttctgaccaaagtgagtctgtgaggccgcctcccccaaagcctcataaaagcaagaaagggggaaagatgcgtcagattagtctatccagctccgaggaggagctggcgagcacgcccgaatacacctcatgtgatgatgtggagatcgaatctgagtcagttagtgagaagggcgacatggactataactggctggatcacacctcctggcactctagcgaggcttccccaatgagcttgcaccctgttacttggcagcctagcaaagatggcgaccggctcatcggccgtatattactgaataagcggctaaaagacggttcggtaccacgggacagcggagcaatgcttggtctcaaggttgttgggggaaagatgactgagtccggacgcctgtgcgcgtttatcacgaaggtcaagaaggggagccttgctgatacagtgggtcatctgaggcccggtgatgaggtgctagagtggaacgggcgcctactccagggggccacttttgaggaggtgtacaatatcatcctagagtccaagccggagccgcaggtcgaactggtagtttcgaggcccattggtgatatccctagaattccagactccacgcatgcacagcttgaatcaagctcttccagctttgaatcacagaaaatggaccggccatccatctccgtcacatcccccatgtcccctggcatgctccgagatgtgccacagtttttaagcggtcagctttccatcaaattatggttcgacaaagtgggacatcagctgatcgtcaccatcctgggcgccaaagacctccccagtagggaagacgggcggccccggaacccttatgtgaaaatatacttcttacccgacagatcagataaaaacaagaggcgtaccaagactgtgaagaaaaccctggaacccaagtggaaccagactttcatttactcccccgtccataggagggagttcagagaaagaatgctagagattacgctctgggaccaggcaagggtgcgcgaagaggagagtgagtttctcggtgagatcttgatcgaactggaaactgctttgctggatgacgaaccacattggtacaagttgcagactcatgacgtgtcaagcctgccgttaccccacccctcaccatacatgccgagacgtcaactccacggtgagtcgccaacaagaagactccaacgtagcaaacgcataagcgattctgaggtgagtgactatgattgtgatgatggcattggcgtggtgagcgactataggcacgacgggagggacctgcaatcttctaccctgtccgtgcccgaacaggtcatgtcctcaaaccactgctcccccagtgggtccccccaccgggtcgacgtgatcgggaggactcgttcctggtcaccgtctgtgccacccccacagagcagaaatgtggagcagggtttgcgtggtacacgcacaatgaccgggcactacaacaccatctctaggatggatcgacaccgcgtcatggatgatcactattcccctgaccgggattctcactttcttacacttcccaggtctaggtatagccagaccatagaccatcaccacagagacgggcgagattgtgaagcagctgacagacaaccttaccatcgatctaggtctactgaacagcgccctcttcttgagcggactactacccgcagcaggtctactgaacgccctgacaccaatctcatgaggagtatgccttcgctcatgaccggacgtagtgccccacctagcccagccttgtcaagatcccatcctcgcacgggcagcgttcagaccagtccatcctcgacacctgtggccggccgcagaggccgacaactcccgcagcttcctcctaagggaactctggatcggaaagcaggtggaaaaaaactgcgtagcactgtccagaggtctacagagaccgggctcgccgtggaaatgcgtaattggatgacccgtcaagcctctagagagagtactgatggctccatgaacagctattcttctgaggggaacctaatcttcccgggcgtccgcctggcgtccgactcacagttctccgactttctcgatggccttggccccgcacaactggtggggcgccagacccttgccacacccgcaatgggagatattcaggtgggtatgatggacaaaaagggccaattggaagttgaaattataagagcacgagggctcgtggtcaagccgggctctaaaacactgcctgccccttacgttaaagtttacttgttggataacggggtatgcattgctaaaaagaagaccaaggtggcacgcaaaacgctagaacctctataccaacagctgctgtcctttgaggaatcacctcagggcaaggttctacagattatcgtttggggcgactacggaaggatggatcacaagtcttttatgggagtggcccagatacttctcgatgaactagaattatctaatatggtgatcggttggttcaaactctttcccccatcgagtctcgtcgaccccacactggccccccttacacggcgcgcctctcaaagtagcctcgaatcttccacagggccttcctattccaggtcttag

SEQ ID NO: 181489 - DNA, 384 bp, Artificial Sequence
  derived and/or modified sequence
atgacagagagcggccgcctgtgtgccttcatcaccaaggtgaagaagggcagcctggccgacacagtgggccacctgcggcctggagatgaggtgctggagtggaatggccgcctgctgcagggcgccacctttgaggaggtgtacaacatcatcctggagagcaagccagagccccaggtggagctggtggtgtcccggcccatcggggacatcccccgcatcccagacagcacccacgcccagctggagagcagcctgcccggcctggcctggtggctgaccagggtcatcccagccctgtgggaggccgaggccggcggcagccggggccaggagattgagaccatcctggccaacacagtgaagccccggctgtactag

SEQ ID NO: 181490 - DNA, 3492 bp, Artificial Sequence
  derived and/or modified sequence
atgcagtttgagaccctgcggcaggtgtgcaacagcgtgctgagccacttccacggcgtcttcagcagcccccccaacatcctgcagaatgagctgtttggccagaccctgaacaatgccaggaagaggagccccagcgtgtcccgggaccagaacagaagatatgaccagcgggaggagcgggaggagtacagccagtatgccaccagtgacacagccatgcccaggagccccagcgactatgctgaccggcgcagccagcacgagccccagttctatgaggacagcgaccacctgagctacagagacagcaacagaagaagccaccgccacagcaaggagtacatcgtggatgatgaagatgtggagagcagagatgaatatgaaaggcagaggcgggaggaggagtaccagagccgctacagaagtgaccccaacctggcccgctaccctgtgaagccccagccctatgaggagcagatgagaattcatgctgaggtgtcccgggcccggcatgagcggcggcacagtgatgtgtccctggccaatgctgacctggaggacagccgcatctccatgctgaggatggaccggcccagccggcagaggagcatcagcgagcggcgggccgccatggagaaccagaggagctacagcatggagaggacccgggaggcccagggccccagcagctatgcccagaggaccaccaaccacagcccccccaccccaagaagaagccccctgcccatcgacagaccagacctgcggaggacagacagcctgaggaagcagcaccacctggaccccagcagcgctgtgaggaagaccaagcgggagaagatggagaccatgctgagaaatgacagcctgagcagtgaccagagcgagagcgtgcggcccccaccacccaagccccacaagagcaagaagggcggcaagatgaggcagatcagcctgagcagcagcgaggaggagctggccagcaccccagagtacaccagctgtgatgatgtggagattgaaagtgaatctgtgtctgagaagggggacatggactacaactggctggaccacacctcctggcacagcagcgaggccagccccatgagcctgcaccctgtgacctggcagcccagcaaggatggagaccggctgattggccgcatcctgctgaacaagaggctgaaggatggctctgtgccccgggacagcggggccatgctgggcctgaaggtggtgggcggcaagatgacagaaagtggccgcctgtgtgccttcatcaccaaggtgaagaagggcagcctggccgacacagtgggccacctgcggcctggagatgaggtgctggagtggaatggccgcctgctgcagggcgccacctttgaggaggtgtacaacatcatcctggagagcaagccagagccccaggtggagctggtggtgtcccggcccatcggggacatcccccgcatcccagacagcacccacgcccagctggagagcagcagcagcagctttgagagccagaagatggaccggcccagcatctctgtgaccagccccatgagccctggcatgctgagagatgtgccccagttcctgagcggccagctgagcatcaagctgtggtttgacaaggtgggccaccagctgattgtgaccatcctgggcgccaaggacctgcccagccgggaggatggccggcccaggaacccctacgtgaagatctacttcctgcctgacagaagtgacaagaacaagaggaggaccaagacagtgaagaagaccctggagcccaagtggaaccagaccttcatctacagccctgtgcacagaagagagttccgggagaggatgctggagatcaccctgtgggaccaggcccgggtgcgggaggaggagagcgagttcctgggggagatcctgattgagctggagacagccctgctggatgatgagccccactggtacaagctgcagacccatgatgtgagcagcctgcccctgccccaccccagcccctacatgccccggcggcagctgcatggagagagccccacccggcggctgcagaggagcaagaggatcagtgacagcgaggtgtctgactatgactgtgatgatggcattggagtggtgtctgactacagacatgatggccgggacctgcagagcagcaccctgtctgtgcctgagcaggtgatgagcagcaaccactgcagccccagcggcagcccccaccgggtggatgtgattggaagaaccaggtcctggagccccagcgtgcccccaccccagagcagaaatgtggagcagggcctgcggggcaccaggaccatgacaggccactacaacaccatcagcaggatggacagacaccgggtgatggatgaccactacagcccagaccgggacagccacttcctgaccctgcccaggagccgctacagccagaccatcgaccaccaccacagagatggccgggactgtgaggccgctgaccggcagccctaccacaggagccgcagcacagagcagaggcccctgctggagaggaccaccaccaggagccgcagcacagagaggccagacaccaacctgatgaggtccatgcccagcctgatgacaggccgcagcgccccacccagccctgccctgagccgcagccaccccaggacaggctctgtgcagaccagccccagcagcacccctgtggccggcagaagaggccggcagctgccccagctgccccccaagggcaccctggacaggaaggccggcggcaagaagctgcggagcacagtgcagaggagcacagagaccggcctggccgtggagatgaggaactggatgacccggcaggccagccgggagagcacagatggctccatgaacagctacagcagcgagggcaacctgatcttccctggggtgcggctggccagtgacagccagttcagtgacttcctggatggcctgggccctgcccagctggtgggccggcagaccctggccaccccagccatgggagacatccaggtgggcatgatggacaagaagggccagctggaggtggagatcatccgggcccggggcctggtggtgaagccaggcagcaagaccctgcctgccccctacgtgaaggtgtacctgctggacaatggagtgtgcatcgccaagaagaagaccaaggtggccaggaagaccctggagcccctgtaccagcagctgctgagctttgaggagagcccccagggcaaggtgctgcagatcatcgtgtggggagactatggccgcatggaccacaagagcttcatgggcgtggcccagatcctgctggatgagctggagctgagcaacatggtgattggctggttcaagctgtttcctcccagcagcctggtggaccccaccctggcccccctgacccggcgggccagccagagcagcctggagagcagcacaggccccagctacagccgctcctag

SEQ ID NO: 181491 - DNA, 384 bp, Artificial Sequence
  derived and/or modified sequence
atgaccgagagcggccggctgtgcgccttcatcaccaaggtgaagaagggctcgctcgcagacaccgttgggcacctgagaccaggcgacgaagttctcgagtggaacggacgcctcctgcagggggcaaccttcgaagaagtgtacaacatcatactggagagcaagccagaaccccaggtggaactggtggtgtcaaggccgattggagatatcccgcgcatccctgatagcactcacgctcaactcgagtcttcccttccaggcctagcttggtggctgacacgggtcatccctgctctgtgggaagcagaggccggcggcagtagagggcaagaaattgaaactatcctggctaatacagtaaaaccacggctatattag

SEQ ID NO: 181492 - DNA, 3492 bp, Artificial Sequence
  derived and/or modified sequence
atgcagttcgagaccctgcggcaggtgtgcaacagcgtgctgagccactttcacggtgtgttttcttcacctcccaatatccttcagaatgaattgtttggacagaccttgaataatgcccggaaacggtcaccctcagtgagccgagaccagaacagaagatatgaccagagagaggaacgggaggaatactcccagtacgccacgagcgatacggccatgcctcgcagccctagcgattacgccgaccgacgctcgcagcatgaacctcagttctatgaggacagcgatcacctgtcatatcgtgactccaacaggaggagccacagacactccaaggagtacattgtcgatgacgaagatgtagagtcgcgggatgagtacgagagacagagacgcgaggaggaataccagagtaggtatagaagcgaccctaacctcgctaggtaccccgtcaagcctcagccttatgaagagcagatgagaatccatgctgaggtgagtcgcgcgcgtcatgagcggcggcactccgacgtctccctggccaacgcagacctggaggattcacgcataagcatgttaaggatggataggccttcacggcaacgcagtatttccgagcggcgggcagctatggagaaccaacgctcatacagtatggaacgaactcgtgaggcacagggaccttcttcttatgcccaacggaccacgaaccattcccctccaactccgcgccggagtcctttacctattgaccggcccgatttgaggagaacagattccctccgaaagcaacaccatttagatccctcatccgccgtgcggaaaaccaaacgggaaaaaatggagacaatgctgcgcaacgacagcctatcctccgatcagagcgagtccgtgcgacctccacctcccaaaccccataaatccaagaaagggggaaagatgcggcaaataagcctgagctctagcgaagaagaactagccagtacccctgaatacacaagctgtgatgacgtggaaatcgagtcggaaagcgtctcggagaaaggggacatggattataattggttagaccacactagttggcatagcagtgaggcatctccaatgtctctgcatccagtgacctggcagccaagtaaagatggcgaccgtttgatcgggcgcattctgctgaacaagcgtctgaaggacgggtcggtaccccgggatagcggggccatgctgggacttaaggtcgttggcgggaaaatgacggagtcaggccgcctgtgtgctttcatcactaaggtgaagaaaggaagccttgcagacacagtgggccatcttcggcccggtgacgaggtgctcgagtggaacggacgactccttcaaggggccacttttgaagaagtgtacaacattattctggaatccaagcctgagcctcaggtagagctggtggtgtcccgtccgataggagacatacctagaattcccgactctactcacgcacaactcgagtcctcttctagcagcttcgaaagccagaagatggacaggcctagcatcagcgtcacctctcccatgtccccaggaatgttacgagacgtcccccagttcctctcgggccagctgagcataaagctctggtttgacaaagtcggccatcagttgatagttaccatccttggagccaaggacctaccttctagggaagacggccgcccacgaaacccatatgtgaaaatctacttcctgccagaccggtctgataaaaacaagaggagaactaaaacagttaagaagacactggagccaaagtggaaccagactttcatatatagcccagtgcatcggcgcgagttccgggaaagaatgctcgagattacactctgggaccaggcccgagtacgcgaggaagaatcagagttcttaggggagatccttatcgagctcgagacagcccttctcgatgacgagcctcactggtataagctgcagacccacgacgtttcctccctgccactccctcacccctccccttatatgccccgacggcagctccacggggagtcccctacaaggcgcctccagaggtctaagagaatttcagacagcgaagtgagcgattacgactgcgatgacggaattggagtggtgtccgattacagacacgacggtagggatttacagtcgtccacattgtcagtcccagagcaggttatgtcatctaaccactgttcaccatctggatctccgcatcgcgtcgatgtgattggcagaacacgctcttggagccccagtgtacctccgccccagtctagaaatgtggaacaaggcctgcggggcactcgaacaatgacaggccattacaataccatttccagaatggaccgccaccgggtcatggatgatcactattcccccgatagggatagccatttcctgaccctgcccagatctcggtacagtcagacgatcgatcatcaccatcgagacgggagggactgtgaggctgcagacagacaaccctaccaccggtcccgcagtaccgaacagcgtcccctgctcgaaagaaccaccacccgaagtcgaagtactgaacgccctgatacaaaccttatgcgcagcatgccctctcttatgactgggcgcagtgcacctcccagcccagctctcagcaggtcccaccctagaacaggctctgtccaaacatctcccagctcaaccccagttgctggccggcgcgggcgccagcttcctcagctgcctcccaagggaactctggataggaaggccggcggcaagaagttgcgatccacagttcaaaggtctaccgagacaggactggccgtcgaaatgcggaattggatgaccaggcaggcttcgagggagtctacagacggctctatgaattcctacagcagtgaaggcaatctgatcttcccaggcgtgcgactggcctcagactctcagttcagcgactttcttgatggtctgggtccagcccagctggttggccggcagactctggccacacctgcaatgggagacatccaggtgggcatgatggataagaaggggcagctggaagtcgagatcataagagcacgtgggctcgtggtcaaaccaggaagtaaaactttgcccgcaccttacgtgaaagtgtacttgcttgataatggtgtgtgcattgccaagaagaagacgaaggtggcccggaagacacttgaaccactgtatcagcagctgctgagttttgaggagtccccacaggggaaagtcttgcagattatcgtgtggggcgattacggcagaatggaccacaaatccttcatgggcgtggcccagatcttactcgatgagctggagctttctaacatggtcattggttggttcaaactcttcccaccaagtagtttggttgatcccactctcgcacccttgacgagaagagccagccagagctcactggagtcgagcacagggccctcctattcacgtagctag

SEQ ID NO: 181493 - DNA, 384 bp, Artificial Sequence
  derived and/or modified sequence
atgaccgagagcggaaggctctgtgcttttatcacaaaggtgaagaagggctcgctggcagatactgtgggtcaccttcgcccaggggatgaagtgcttgagtggaatgggagattgctacagggggcaacttttgaggaggtgtataatattatcctggaaagtaagccggagccccaagtagagctcgtggtgtccagaccaatcggagatataccgaggattccagactctacacacgctcagcttgagtccagccttccgggactggcttggtggctgacccgagtgattccagccttgtgggaagccgaggctggtggtagcagagggcaggaaattgaaacaattctggctaatacggtgaagcccaggctctattag

SEQ ID NO: 181494 - DNA, 3492 bp, Artificial Sequence
  derived and/or modified sequence
atgcagtttgagactttgaggcaggtgtgtaactccgttctctctcacttccatggagtcttctcctcaccccctaacattctgcagaacgagttattcgggcagacactgaacaatgctcgcaagcgtagcccatcagtttctcgggaccagaataggagatacgatcagcgagaggaaagagaggagtatagtcagtatgcgacatctgacacagccatgccacgcagcccttccgactatgccgataggcgctctcagcacgaacctcagttctacgaggatagcgaccatctctcctaccgtgacagcaacaggagaagtcaccgccactctaaagagtatattgttgacgatgaagacgtggagagtcgcgacgagtatgaacgccagcgccgagaagaggagtaccagtctcgttatagatctgaccccaacctcgcgaggtatcccgtaaaaccccagccttacgaggagcagatgaggatacacgcagaggtgtctcgagccaggcacgagcggagacacagtgacgttagtctcgccaatgctgacctggaggactctcgtattagcatgctacgcatggacaggcccagccggcagcgatccatctcagagcgtcgggcagctatggagaatcaacgctcgtattccatggaacgaaccagggaggcccagggaccaagcagctatgctcagcgcacaactaaccacagccccccaactccacgccgtagcccgttgcctatcgatcgtcccgacctccgtcggaccgacagtctgcgcaagcagcatcacttggacccctcgtccgcagtgcgcaagacaaagagagaaaagatggaaactatgctgcgaaacgactccctgagctctgatcagtccgaatctgtgcgccctccccctcccaagcctcataaatcaaagaaaggcggtaagatgcgtcagatttccctttcctcttccgaagaagagttggcctctaccccggagtatactagctgtgacgacgtggaaattgaatctgaatcagtttccgaaaagggggacatggactacaactggctcgaccacaccagctggcactcgagtgaggcatccccaatgagcctgcatccggtgacctggcagcccagtaaggacggagaccgccttattggcaggatcctactgaataaacgactgaaagatggttctgtgccccgtgattctggggctatgctggggcttaaagtcgtgggcggaaaaatgacagagagcggcagactttgcgccttcatcacaaaggttaagaagggcagtttagcggatacagtcggacacctccggcctggtgatgaagtgttggagtggaatggaagactgttgcagggtgccaccttcgaggaggtgtacaacatcattctcgaaagcaagcccgagccccaagtggagctggtggtcagcagaccgataggtgacattccacgcattccagactcgactcatgcgcaacttgagtcctcttcttcttcttttgagtctcagaagatggacaggccttccattagtgttacatcgccgatgtctccaggcatgctccgagatgtccctcagtttttgagcggccagctgagtataaagttatggttcgacaaagtcggccaccaactgatcgtcacgatactgggagctaaggatcttccttccagagaggatgggagaccacggaatccatacgtgaagatctactttctaccagatagaagtgataagaataagcgtaggaccaagaccgtcaagaagacgttagagcccaaatggaaccagaccttcatttactccccggtgcaccgaagggaattccgtgagcgcatgcttgagatcacactgtgggaccaagcacgggttcgagaagaggagtccgaatttctgggggagatccttatcgagttggagacggcccttctcgatgatgagccccactggtataagttgcagacccacgacgtgtcttccctacccctacctcacccctcaccttacatgccaaggaggcagctgcacggtgaatcacctactaggcgactgcagagatcgaagcggatcagcgattctgaagtgtctgattacgactgcgacgatgggattggcgtggtttcggactaccggcatgacggtagggaccttcagtcttcaacactgagcgttcccgagcaagttatgagctctaaccactgtagcccctccggcagtccacaccgggttgacgtgattggacgtacacgcagttggtcaccatccgtccctccaccccagagccggaacgtcgagcagggactccggggaacacgtactatgactggccattataacaccataagcagaatggacaggcaccgggtgatggatgaccactacagtccagatcgcgacagtcacttccttactctccctcggtcccgatatagccagaccatcgaccaccaccaccgcgatggcagggattgtgaggcggctgatagacagccataccacaggagtaggtctaccgagcaaagaccgttgcttgagaggacgacaactcgttcgagatccaccgaacgcccagatacgaacttgatgcgaagtatgccctctctgatgacgggcagaagtgcccctcctagccccgctctttcgcgaagtcaccccaggactgggtccgttcagaccagcccttccagtacccccgtagcagggaggcgcggaagacagctgccccaactccctcctaaggggaccctagacagaaaagccggtgggaagaaactgcggagtacagttcaacgatctaccgaaactggcttagctgtggagatgcggaattggatgacaagacaagccagccgcgaatccacagacggctccatgaatagctactctagtgaaggcaatcttatcttcccaggggttcggttggcttcagactcccagttcagtgattttttggacgggttagggcctgctcagctggtcggcaggcaaacactggccaccccggcaatgggcgacatccaggttggtatgatggacaagaagggccagctggaagtcgaaattattcgggctcggggactggtggttaagcccggttctaagacgctgccagcaccctatgtaaaggtttacctgctcgacaatggtgtctgtattgccaagaagaagaccaaggtcgcccgaaaaacactagagcccttgtaccagcagttgctgtctttcgaggaatcaccacaggggaaggtgctccaaatcatagtctggggagattacggtcgaatggaccataagagcttcatgggcgtggcgcagatcctgttagatgagcttgagctgtccaacatggtgatagggtggttcaaactcttcccccctagctccttggtcgacccgacactcgcacctcttacaagaagggcctcacagagcagtctggagagttcgacaggcccatcctattcaaggtcttag

SEQ ID NO: 181495 - DNA, 1923 bp, Artificial Sequence
  derived and/or modified sequence
acacttcagctgggaatgcccaaaaagcttactgctgtttagaattcttgctacagtcaggagaaagccgaaagctgcacgggtactgaatcttctacgactgaattagaagaataatgactgtacaattaactatcaacctctgttcatttaagcacagtttttacagagctcaggagaaatatggaacttgattggcgtgtttttatttgatggtgtcagcaaatagatgattttaaagacaggtggtagggaaaaataagagaaggggaaaaaaaaagaaagaaaatgcaatttgagacattgcgccaggtctgcaattctgttttatctcattttcatggggttttttcatccccaccaaatatcttacaaaatgagctttttggacaaacactgaacaatgcaaggaaaagaagcccatctgtgtccagagatcagaatagaagatacgaccaaagggaagaaagagaggaatattcacagtatgctacttcggataccgcaatgcctagatctccatcagattatgctgataggcgatctcaacatgaacctcagttttatgaagactctgatcatttaagttatagggactccaacaggagaagtcataggcattccaaagaatatattgtagatgatgaggatgtggaaagcagagatgaatacgaaaggcaaaggagagaggaagagtaccagtcacgctaccgaagtgatccgaatttggcccgttatccagtaaagccacaaccctatgaagaacaaatgcggatccatgctgaagtgtcccgagcacggcatgagagaaggcatagtgatgtttctttggcaaatgctgatctggaagattccaggatttctatgctaaggatggatcgaccatcaaggcaaagatctatatcagaacgtagagctgccatggaaaatcagcgatcttattcaatggaaagaactcgagaggctcagggaccaagttcttatgcacaaaggaccacaaaccatagtcctcctacccccaggaggagtccactacccatagatagaccagacttgaggcgtactgactcactacggaaacagcaccacttagatcctagctctgctgtaagaaaaacaaaacgggaaaaaatggaaacaatgttaaggaatgattctctcagttcagaccagtcagagtcagtgagacctccaccaccaaagcctcataaatcaaagaaaggcggtaaaatgcgccagatttcgttgagcagttcagaggaggaattggcttccacgcctgaatatacaagttgtgatgatgttgagattgaaagtgagagtgtaagtgaaaaaggagacatggattacaactggttggatcatacgtcttggcatagcagtgaggcatccccaatgtctttgcaccctgtaacctggcaaccatctaaagatggagatcgtttaattggtcgcattttattaaataagcgtctaaaagatggaagtgtacctcgagattcaggagcaatgcttggcttgaaggttgtaggaggaaagatgactgaatcaggtcggctttgtgcatttattactaaagtaaaaaaaggaagtttagctgatactgtaggacatcttagaccaggtgatgaagtattagaatggaatggaagactactgcaaggagccacatttgaggaagtgtacaacatcattctagaatccaaacctgaaccacaagtagaacttgtagtttcaaggcctattggagatataccgcgaatacctgatagcacacatgcacaactggagtccagtcttcctggcctagcgtggtggctcacgcgtgtaatcccagcactttgggaggccgaggcgggcggatcacgaggtcaggagatcgagaccatcctggctaacacggtgaaaccccgtctctactaa

SEQ ID NO: 181496 - DNA, 8002 bp, Artificial Sequence
  derived and/or modified sequence
acagtcaggagaaagccgaaagctgcacgggtactgaatcttctacgactgaattagaagaataatgactgtacaattaactatcaacctctgttcatttaagcacagtttttacagagctcaggagaaatatggaacttgattggcgtgtttttatttgatggtgtcagcaaatagatgattttaaagacaggtggtagggaaaaataagagaaggggaaaaaaaaagaaagaaaatgcaatttgagacattgcgccaggtctgcaattctgttttatctcattttcatggggttttttcatccccaccaaatatcttacaaaatgagctttttggacaaacactgaacaatgcaaggaaaagaagcccatctgtgtccagagatcagaatagaagatacgaccaaagggaagaaagagaggaatattcacagtatgctacttcggataccgcaatgcctagatctccatcagattatgctgataggcgatctcaacatgaacctcagttttatgaagactctgatcatttaagttatagggactccaacaggagaagtcataggcattccaaagaatatattgtagatgatgaggatgtggaaagcagagatgaatacgaaaggcaaaggagagaggaagagtaccagtcacgctaccgaagtgatccgaatttggcccgttatccagtaaagccacaaccctatgaagaacaaatgcggatccatgctgaagtgtcccgagcacggcatgagagaaggcatagtgatgtttctttggcaaatgctgatctggaagattccaggatttctatgctaaggatggatcgaccatcaaggcaaagatctatatcagaacgtagagctgccatggaaaatcagcgatcttattcaatggaaagaactcgagaggctcagggaccaagttcttatgcacaaaggaccacaaaccatagtcctcctacccccaggaggagtccactacccatagatagaccagacttgaggcgtactgactcactacggaaacagcaccacttagatcctagctctgctgtaagaaaaacaaaacgggaaaaaatggaaacaatgttaaggaatgattctctcagttcagaccagtcagagtcagtgagacctccaccaccaaagcctcataaatcaaagaaaggcggtaaaatgcgccagatttcgttgagcagttcagaggaggaattggcttccacgcctgaatatacaagttgtgatgatgttgagattgaaagtgagagtgtaagtgaaaaaggagacatggattacaactggttggatcatacgtcttggcatagcagtgaggcatccccaatgtctttgcaccctgtaacctggcaaccatctaaagatggagatcgtttaattggtcgcattttattaaataagcgtctaaaagatggaagtgtacctcgagattcaggagcaatgcttggcttgaaggttgtaggaggaaagatgactgaatcaggtcggctttgtgcatttattactaaagtaaaaaaaggaagtttagctgatactgtaggacatcttagaccaggtgatgaagtattagaatggaatggaagactactgcaaggagccacatttgaggaagtgtacaacatcattctagaatccaaacctgaaccacaagtagaacttgtagtttcaaggcctattggagatataccgcgaatacctgatagcacacatgcacaactggagtccagttctagctcctttgaatctcaaaaaatggatcgtccttctatttctgttacctctcccatgagtcctggaatgttgagggatgtcccacagttcttatcaggacaactttcaataaaactatggtttgacaaggttggtcaccaattaatagttacaattttgggagcaaaagatctcccttccagggaagatgggaggccaaggaatccttatgttaaaatttactttcttccagacagaagtgataaaaacaagagaagaactaaaacagtaaagaaaacattggaacccaaatggaaccaaacattcatttattctccagtccaccgaagagaatttcgggaacgaatgctagagattaccctttgggatcaagctcgtgttcgagaggaagaaagtgaattcttaggcgagattttaattgaattagaaacagcattattagatgatgagccacattggtacaaacttcagacgcatgatgtctcttcattgccacttccccacccttctccatatatgccacgaagacagctccatggagagagcccaacacggaggttgcaaaggtcaaagagaataagtgatagtgaagtctctgactatgactgtgatgatggaattggtgtagtatcagattatcgacatgatggtcgagatcttcaaagctcaacattatcagtgccagaacaagtaatgtcatcaaaccactgttcaccatcagggtctcctcatcgagtagatgttataggaaggactagatcatggtcacccagtgtccctcctccacaaagtcggaatgtggaacaggggcttcgagggacccgcactatgaccggacattataatacaattagccgaatggacagacatcgtgtcatggatgaccattattctccagatagagacagtcattttcttactctacctcgctccagatacagtcagaccattgaccatcatcacagggatggcagggattgtgaagcagcagatagacagccatatcacagatccagatcaacagaacaacggcctctccttgagcggaccaccacccgctccagatccactgaacgtcctgatacaaacctcatgaggtcgatgccttcattaatgactggaagatctgcccctccttcacctgccttatcgaggtctcatcctcgtactgggtctgtccagacaagcccatcaagtactccagtcgcaggacgaaggggccgacagcttccacagcttccaccaaagggaacgttggatagaaaagcaggaggtaaaaaactaaggagcactgtccaaagaagtacagaaacaggcctggccgtggaaatgaggaactggatgactcgacaggcaagccgagagtctacagatggtagcatgaacagctacagctcagaaggaaatctgattttccctggtgttcgcttggcctctgatagccagttcagtgatttcctggatggccttggccctgctcagctagtgggacgccagactctggcaacacctgcaatgggtgacattcaggtaggaatgatggacaaaaagggacagctggaggtagaaatcatccgggcccgtggccttgttgtaaaaccaggttccaagacactgccagcaccgtatgtaaaagtgtatctattagataacggagtctgcatagccaaaaagaaaacaaaagtggcaagaaaaacgctggaacccctttaccagcagctattatctttcgaagagagtccacaaggaaaagttttacagatcatcgtctggggagattatggccgcatggatcacaaatcttttatgggagtggcccagatacttttagatgaactagagctatccaatatggtgatcggatggttcaaacttttcccaccttcctccctagtagatccaaccttggcccctctgacaagaagagcttcccaatcatctctggaaagttcaactggaccttcttactctcgttcatagcagctgtaaaaaaattgttgtcacagcaaccagcgttacaaaaaaaaaaaaaaaaatcacaggttgcaaaccctggtaacactgcatgcttaatgttgtgtcttctgagcctgtttctagggatacaaagcaatcctgtgttctcagaggaagttgcacacattgtgccctaaagaaggccctcaggtgaaagagcagagctgtgaagaactatcagatttggaattcaatgacactcgagttctggtccaatctgaagccatggattaatctcaaagaatcagtcagtttcatgcaacagaagcccttttcaatggcacctttatatttttatcattcctttttcttcatttatctaaccccaaagccctgatatgccacagaaatggagctatacagccatgaagcggtgttacaggtgaggagtgtaatcctaggaagcatcaggtgaaaagcaggagaccaaagaagtggtcaggaacaatcatcagccctcctctgggcgggaatcagagcagtcagtccagcaggaagagtggcagactttgtagctccatgggcacgtcaattactaatgctaagatgtgttggactctgaaaaacaaaattctgtggctacactgtactgaatgaaattaaagaaactttttttgcatggacacagattagctgaatacttaaattattttcttggggctgcaacttgcaaaaaaaaaaaaaagaataaaaatcagccattttcaacaatttatattatttttaaaaataaatttcactagtgcatggttttaaaaaggagagagaatgcaacagggtgatacaaagatacaccatgtttattctttaatcatagtctgtgttttggcagacattacaaatggaaatactttctagaagatacttaaaattctctttatgtgacaaataagtataatatattcaatttatttccatgttaaatatacaaatcttatgaagttcaatatgtgcaaatttttcacatctttctccttctctcactttacctcttctccctcttttaaacttttctttctccctgccagagtgaaccttatactaaaaaattacaagttttgatctgatcctctctcataccccatgtttgattcagagctgtagatgcctctgaatttgcgaatttctcaagggaaaattaactttaagagctttctttatttcaagcatgttgaaaaggattttgcaacatgacttgggagtacattaaagtaagtcagcatgtatttgacgaagaagatatttgaacttttgcagtttattgtacagtgcatggtaattttttcacctttaaaattcagtttacaggaaaattctaaaatcatgttgccattgtgatgtccaataaatttgtttttagcaccagcattattcatacaggggttaaagtattatttgtagaaggtcttaggttttgtttgttttttaatcatttaaagcaatttctttagccagtttccatttactatgtgaatagaagcactgctaaaaattgggaaccctgaaacacagggctgtttattaattcatttttctgtagtaaaattcaatttttcacaaattatatttctaaagaaatatagtaaacataaatttgcaacaattttaaagctccagtttttaggtgactcaaagaaagtcattatgcctattaatagttatttgatgccatcaccaaaagtctatgtgaaaatctcctaaagtcaaaacccctgcctttggttttacagacggttattaccattgggtggagctgcaaggtcaaatttctcctaagttcccctatttagaggaaaagtcactggttattgtaataaaccacccatggttctttatgtacattttgataacacattattatagcttgattttaattttttgcattaatttttgaaatccacatacatctcatttgtttaaattaaggccatgcacaaatattttttttagttcagtgctgaccattaaaaactatcatgcttgatacggtgcaaaagttaaaatgagtatcactaaaaatgccttctttttatgtggtgcaatatgaaatacaccaagactgtgtcttgacattctgatggacccaggtaaagttgttaaaagaacgaataaaactttattaaaataatttagacacctgtgtaccagcaacaattgatttaatagacctatagtgtctatactatcccttagaataaaggtttatgattttcctgatactaagatgcagtcacataatcttttgtgcatattcctatacaaattatttctaattttaataagaaggacgtgactacggaatatttgtacatacttgtcattatgcagtatttatttaaaagttggtgtttttttttaattttcacatctgcacctcgacttgtggtttagtcatgtaactagcactatgccagtgaccgttgttgccctgtacatagtatgtttgaaaagtaaagggaattccagttgggaaaaaagggcagattagtcctgtaatgaacaccaactaatgtaaatcaaattcattctggtgatggtatttaacactttaaataaaacattttctttacaggcgtctgcagtgctttctctgacttttctccccacacagccctgagcctgctgcagctcattccctgaactcatgtgtcatttaaagaatgaaatcaccgtctcctacttctcgataacataagtggactgctggtcttagcagcggccctcagtagagcatttctttaaaacgccaaaggatttctgctcacactatgaaaaggtgctgttttttaaaaggttgttattttggattgagtttctttctgattaaatgactcagcaactcacagattttttgagtgaaatttttaatttagtcatggccttcactgacagcatagtcacaaatactcaggcacaggctctgctagcccctgggtgaagatggcgaaggcataactggctttatgcagcatatgtgtttctgctaaagtgtcagttttgctttgtggggagtggagggtgtgttttcgggatggggagacgtggtaacctgacatgtaacaacctgtccggagactagcttctacgtgtggatatgaatgggtgagaggatttctccatatccttctggggcgattcctcaactgggagaaggaaaccctgcagagttctcatgggagtctgcttcaggtttgaaatttaagagctagtttggattcatgtttagtaatcgaactgaaatctaagtctagctgtctctctattcttggaaacaaccatttcctccatttccaaagactcaactcgagtccaattccccctatctgtcccatatatttttcctttatcccatatataccccctactctagtgaattgtttctttgttgttcattcctgttctttgttgttcatatacattcctgtatatgaacaacattttcctttatcccatatataccccctactctagtgaattgtttctttgttgttcattcctgtttctttgttgttcatatacattcctgttataaaaattcccttccctttcttatgtgccctctcctgaaaagcccttctacttttctcaataatgatccatgcgagtcccttcttgcaactcccagctcacgaatgagctctttcggcaactcctgactaaaccctaacaacatggctgccattgatgccaacaccttcactttcccagggaccccagatgccaaggctccataggcaacaataaaggatatgatggtcctgtagtgggtatgatagaattaggcaagagatcaccaaagctgtctgcctactactgatgtaaaccttgacattctgtgcacgtaaaaatcatgtgctcaatgtgtttgtctcaactccctcagctcgtgatgccctcagggttctgtgggcatttatgcactgaagaaacaggagttcacacatccacctctggactgtgaaatgtgtattgagaaatactttgcaagagagaatttttttaagtgaacaaacaacaagtctgtgccacacacatcttccatatgccctgactcaggtcacttaatctccaggatttcatttcctcacctggaaaatatggagtttgaggtagattctcatctatcattaaatcaacactttaactaaaacgtaagctccttcagggcagagaccgtatcttcagtatcaaaaacaatgtttgacacatagctgctcaataaacatctgtccaatgaa

SEQ ID NO: 181497 - DNA, 384 bp, Artificial Sequence
  derived and/or modified sequence
atgaccgagagcggcagactgtgcgccttcatcaccaaggtgaagaagggcagcctggccgacaccgtgggccacctgagacccggcgacgaggtgctggagtggaacggcagactgctgcagggcgccaccttcgaggaggtgtacaacatcatcctggagagcaagcccgagccccaggtggagctggtggtgagcagacccatcggcgacatccccagaatccccgacagcacccacgcccagctggagagcagcctgcccggcctggcctggtggctgaccagagtgatccccgccctgtgggaggccgaggccggcggcagcagaggccaggagatcgagaccatcctggccaacaccgtgaagcccagactgtactag

SEQ ID NO: 181498 - DNA, 3492 bp, Artificial Sequence
  derived and/or modified sequence
atgcagttcgagaccctgagacaggtgtgcaacagcgtgctgagccacttccacggcgtgttcagcagcccccccaacatcctgcagaacgagctgttcggccagaccctgaacaacgccagaaagagaagccccagcgtgagcagagaccagaacagaagatacgaccagagagaggagagagaggagtacagccagtacgccaccagcgacaccgccatgcccagaagccccagcgactacgccgacagaagaagccagcacgagccccagttctacgaggacagcgaccacctgagctacagagacagcaacagaagaagccacagacacagcaaggagtacatcgtggacgacgaggacgtggagagcagagacgagtacgagagacagagaagagaggaggagtaccagagcagatacagaagcgaccccaacctggccagataccccgtgaagccccagccctacgaggagcagatgagaatccacgccgaggtgagcagagccagacacgagagaagacacagcgacgtgagcctggccaacgccgacctggaggacagcagaatcagcatgctgagaatggacagacccagcagacagagaagcatcagcgagagaagagccgccatggagaaccagagaagctacagcatggagagaaccagagaggcccagggccccagcagctacgcccagagaaccaccaaccacagcccccccacccccagaagaagccccctgcccatcgacagacccgacctgagaagaaccgacagcctgagaaagcagcaccacctggaccccagcagcgccgtgagaaagaccaagagagagaagatggagaccatgctgagaaacgacagcctgagcagcgaccagagcgagagcgtgagaccccccccccccaagccccacaagagcaagaagggcggcaagatgagacagatcagcctgagcagcagcgaggaggagctggccagcacccccgagtacaccagctgcgacgacgtggagatcgagagcgagagcgtgagcgagaagggcgacatggactacaactggctggaccacaccagctggcacagcagcgaggccagccccatgagcctgcaccccgtgacctggcagcccagcaaggacggcgacagactgatcggcagaatcctgctgaacaagagactgaaggacggcagcgtgcccagagacagcggcgccatgctgggcctgaaggtggtgggcggcaagatgaccgagagcggcagactgtgcgccttcatcaccaaggtgaagaagggcagcctggccgacaccgtgggccacctgagacccggcgacgaggtgctggagtggaacggcagactgctgcagggcgccaccttcgaggaggtgtacaacatcatcctggagagcaagcccgagccccaggtggagctggtggtgagcagacccatcggcgacatccccagaatccccgacagcacccacgcccagctggagagcagcagcagcagcttcgagagccagaagatggacagacccagcatcagcgtgaccagccccatgagccccggcatgctgagagacgtgccccagttcctgagcggccagctgagcatcaagctgtggttcgacaaggtgggccaccagctgatcgtgaccatcctgggcgccaaggacctgcccagcagagaggacggcagacccagaaacccctacgtgaagatctacttcctgcccgacagaagcgacaagaacaagagaagaaccaagaccgtgaagaagaccctggagcccaagtggaaccagaccttcatctacagccccgtgcacagaagagagttcagagagagaatgctggagatcaccctgtgggaccaggccagagtgagagaggaggagagcgagttcctgggcgagatcctgatcgagctggagaccgccctgctggacgacgagccccactggtacaagctgcagacccacgacgtgagcagcctgcccctgccccaccccagcccctacatgcccagaagacagctgcacggcgagagccccaccagaagactgcagagaagcaagagaatcagcgacagcgaggtgagcgactacgactgcgacgacggcatcggcgtggtgagcgactacagacacgacggcagagacctgcagagcagcaccctgagcgtgcccgagcaggtgatgagcagcaaccactgcagccccagcggcagcccccacagagtggacgtgatcggcagaaccagaagctggagccccagcgtgccccccccccagagcagaaacgtggagcagggcctgagaggcaccagaaccatgaccggccactacaacaccatcagcagaatggacagacacagagtgatggacgaccactacagccccgacagagacagccacttcctgaccctgcccagaagcagatacagccagaccatcgaccaccaccacagagacggcagagactgcgaggccgccgacagacagccctaccacagaagcagaagcaccgagcagagacccctgctggagagaaccaccaccagaagcagaagcaccgagagacccgacaccaacctgatgagaagcatgcccagcctgatgaccggcagaagcgccccccccagccccgccctgagcagaagccaccccagaaccggcagcgtgcagaccagccccagcagcacccccgtggccggcagaagaggcagacagctgccccagctgccccccaagggcaccctggacagaaaggccggcggcaagaagctgagaagcaccgtgcagagaagcaccgagaccggcctggccgtggagatgagaaactggatgaccagacaggccagcagagagagcaccgacggcagcatgaacagctacagcagcgagggcaacctgatcttccccggcgtgagactggccagcgacagccagttcagcgacttcctggacggcctgggccccgcccagctggtgggcagacagaccctggccacccccgccatgggcgacatccaggtgggcatgatggacaagaagggccagctggaggtggagatcatcagagccagaggcctggtggtgaagcccggcagcaagaccctgcccgccccctacgtgaaggtgtacctgctggacaacggcgtgtgcatcgccaagaagaagaccaaggtggccagaaagaccctggagcccctgtaccagcagctgctgagcttcgaggagagcccccagggcaaggtgctgcagatcatcgtgtggggcgactacggcagaatggaccacaagagcttcatgggcgtggcccagatcctgctggacgagctggagctgagcaacatggtgatcggctggttcaagctgttcccccccagcagcctggtggaccccaccctggcccccctgaccagaagagccagccagagcagcctggagagcagcaccggccccagctacagcagaagctag

SEQ ID NO: 181499 - DNA, 2799 bp, Artificial Sequence
  derived and/or modified sequence
atgttctggaagttcgacctgaacaccaccagccacgtggacaagctgctggacaaggagcacgtgaccctgcaggagctgatggacgaggacgacatcctgcaggagtgcaaggcccagaaccagaagctgctggacttcctgtgcagacagcagtgcatggaggagctggtgagcctgatcacccaggacccccccctggacatggaggagaaggtgagattcaagtaccccaacaccgcctgcgagctgctgacctgcgacgtgccccagatcagcgacagactgggcggcgacgagagcctgctgagcctgctgtacgacttcctggaccacgagccccccctgaaccccctgctggccagcttcttcagcaagaccatcggcaacctgatcgccagaaagaccgagcaggtgatcaccttcctgaagaagaaggacaagttcatcagcctggtgctgaagcacatcggcaccagcgccctgatggacctgctgctgagactggtgagctgcgtggagcccgccggcctgagacaggacgtgctgcactggctgaacgaggagaaggtgatccagagactggtggagctgatccaccccagccaggacgaggacagacagagcaacgccagccagaccctgtgcgacatcgtgagactgggcagagaccagggcagccagctgcaggaggccctggagcccgaccccctgctgaccgccctggagagccaggactgcgtggagcagctgctgaagaacatgttcgacggcgacagaaccgagagctgcctggtgagcggcacccaggtgctgctgaccctgctggagaccagaagagtgggcaccgagggcctggtggacagcttcagccagggcctggagagaagctacgccgtgagcagcagcgtgctgcacggcatcgagcccagactgaaggacttccaccagctgctgctgaacccccccaagaagaaggccatcctgaccaccatcggcgtgctggaggagcccctgggcaacgccagactgcacggcgccagactgatggccgccctgctgcacaccaacacccccagcatcaaccaggagctgtgcagactgaacaccatggacctgctgctggacctgttcttcaagtacacctggaacaacttcctgcacttccaggtggagctgtgcatcgccgccatcctgagccacgccgccagagaggagagaaccgaggccagcggcagcgagagcagagtggagcccccccacgagaacggcaacagaagcctggagaccccccagcccgccgccagcctgcccgacaacaccatggtgacccacctgttccagaagtgctgcctggtgcagagaatcctggaggcctgggaggccaacgaccacacccaggccgccggcggcatgagaagaggcaacatgggccacctgaccagaatcgccaacgccgtggtgcagaacctggagagaggccccgtgcagacccacatcagcgaggtgatcagaggcctgcccgccgactgcagaggcagatgggagagcttcgtggaggagaccctgaccgagaccaacagaagaaacaccgtggacctggccttcagcgactaccagatccagcagatgaccgccaacttcgtggaccagttcggcttcaacgacgaggagttcgccgaccaggacgacaacatcaacgcccccttcgacagaatcgccgagatcaacttcaacatcgacgccgacgaggacagccccagcgccgccctgttcgaggcctgctgcagcgacagaatccagcccttcgacgacgacgaggacgaggacatctgggaggacagcgacaccagatgcgccgccagagtgatggccagacccagattcggcgccccccacgccagcgagagctgcagcaagaacggccccgagagaggcggccaggacggcaaggccagcctggaggcccacagagacgcccccggcgccggcgccccccccgcccccggcaagaaggaggccccccccgtggagggcgacagcgagggcgccatgtggaccgccgtgttcgacgagcccgccaacagcacccccaccgcccccggcgtggtgagagacgtgggcagcagcgtgtgggccgccggcaccagcgcccccgaggagaagggctgggccaagttcaccgacttccagcccttctgctgcagcgagagcggccccagatgcagcagccccgtggacaccgagtgcagccacgccgagggcagcagaagccagggccccgagaaggccttcagccccgccagcccctgcgcctggaacgtgtgcgtgaccagaaaggcccccctgctggccagcgacagcagcagcagcggcggcagccacagcgaggacggcgaccagaaggccgccagcgccatggacgccgtgagcagaggccccggcagagaggccccccccctgcccaccgtggccagaaccgaggaggccgtgggcagagtgggctgcgccgacagcagactgctgagccccgcctgccccgcccccaaggaggtgaccgccgcccccgccgtggccgtgccccccgaggccaccgtggccatcaccaccgccctgagcaaggccggccccgccatccccacccccgccgtgagcagcgccctggccgtggccgtgcccctgggccccatcatggccgtgaccgccgcccccgccatggtggccaccctgggcaccgtgaccaaggacggcaagaccgacgccccccccgagggcgccgccctgaacggccccgtgtag

SEQ ID NO: 181500 - DNA, 2799 bp, Artificial Sequence
  derived and/or modified sequence
atgttctggaagttcgatctcaatactaccagccacgtggataaactcctggacaaagagcacgtgacacttcaggagctcatggatgaggacgatatactgcaggagtgcaaggcccaaaaccagaagctcctggacttcctgtgtcgacagcaatgtatggaggagctcgtcagtttgattacccaggaccctcctcttgatatggaggagaaggtccgcttcaagtaccccaacaccgcatgcgaactcctgacatgcgatgtgccgcagatctctgatcgactcggcggagatgaatccctcctcagcctgttatacgactttctggatcatgagccaccactgaaccctttacttgcatctttcttttctaagacaattggcaacctgatcgccagaaagaccgagcaggtgatcacattcttgaagaaaaaggataagtttataagcctcgtcctcaaacacatcggtacctcagccctgatggatcttctgctgcgcctcgtgtcttgtgtggagccagccgggttgcgtcaggatgtgttgcattggttgaacgaagagaaagtgatccagagattggtggagttaattcaccctagccaggacgaggaccggcagagcaatgccagtcagaccctgtgcgatatcgttcgcctgggtagagaccagggcagccaattacaagaggccttggaacctgaccctttgctcaccgctctagagtctcaggactgcgtcgaacaactccttaagaatatgttcgatggcgacaggacggaaagctgcctcgtttcagggacccaggtgcttctaacgctgctggagacgaggcgggtgggcactgaggggctagtagactcattctcccaggggctggaacgctcatatgctgtcagctctagcgtgctccatggcattgagccaaggcttaaggactttcaccaactcctcctcaatcctccaaagaaaaaggccattttgaccactattggcgttctggaagagcctcttggcaacgccagacttcacggcgccaggctgatggccgccctcctgcatactaacactccaagcatcaatcaggagctgtgccgtctgaacacaatggatctgctcttagatctgttttttaaatacacctggaacaacttcctacatttccaggtggagttatgtattgctgctattctgagccacgccgcacgcgaagagcgaacagaagcgtctggcagtgaatctagagtggaacctcctcatgagaacggaaataggtcactcgaaaccccacaacctgcagcctctctgccagataacacaatggttacacacctatttcagaagtgctgcctcgtgcaaagaatattagaggcctgggaggcgaatgatcatacccaggctgccggcggaatgcggcgtggaaacatgggacatcttacccgcattgcaaatgcagttgtgcaaaatttagagcggggaccagttcagacccacatcagtgaagtcattagaggccttcccgccgactgtcggggcaggtgggaaagctttgtggaggaaactctcactgagacaaatagacgaaacactgtagatctagctttttccgattaccaaatccagcagatgacagcgaattttgttgaccaattcggatttaatgatgaggaattcgctgatcaggatgacaacattaacgctccgttcgacaggattgccgagatcaactttaatatcgatgccgacgaagactctccctcagctgcgcttttcgaagcttgttgctccgaccggattcagcccttcgacgatgacgaggacgaggacatctgggaggactctgatacaagatgcgcagccagagtgatggcccgacccagatttggggctcctcacgcgagtgaaagctgttccaagaatggacccgagcggggcggccaggacggcaaggcttcactggaagcacatcgcgatgcacctggtgcaggcgctcctccagctcccggcaagaaagaagcacctccagtcgagggagatagtgagggtgcgatgtggacagccgtatttgatgaacctgctaacagcactcccacggcacccggggttgtccgggacgttggaagcagcgtctgggccgccggcactagcgcccccgaagaaaaaggctgggctaagtttacagattttcaaccattctgttgttcggaatccgggcccaggtgcagttcacctgttgacaccgagtgctcgcatgctgaaggcagccgctcccagggccccgagaaggccttcagccctgcgagcccctgtgcatggaacgtgtgtgttaccaggaaggcacctctgcttgcgagtgatagctcctccagcgggggctcccattccgaggatggcgaccagaaggcagctagtgctatggacgcagtgagccgcggcccgggccgcgaggctccgcctctaccaactgtggcaaggactgaggaggccgtcggtagagtgggctgtgctgactccaggctgctttcccctgcatgcccggccccaaaggaggtgacggcggctcctgccgtcgcagttcccccagaggctacggtcgccattaccactgccctgagcaaggctggtcccgctattcctactcctgctgttagtagtgccctggctgtggcagtccctctcggaccaatcatggcagttactgcagccccagcgatggtggcaactctggggactgtaactaaagatggtaagacggacgcccctcccgaaggcgcggctctgaacggacccgtgtag

SEQ ID NO: 181501 - DNA, 2799 bp, Artificial Sequence
  derived and/or modified sequence
atgttctggaagtttgacctgaacaccaccagccacgtggacaagctgctggacaaggagcacgtgaccctgcaggagctgatggatgaagatgacatcctgcaggagtgcaaggcccagaaccagaagctgctggacttcctgtgccggcagcagtgcatggaggagctggtgtccctcatcacccaggacccccccctggacatggaggagaaggtgcgcttcaagtaccccaacacagcctgtgagctgctgacctgtgatgtgccccagatcagtgaccggctgggcggagatgagagcctgctgagcctgctgtatgacttcctggaccacgagccccccctgaaccccctgctggccagcttcttcagcaagaccatcggcaacctgattgccaggaagacagagcaggtgatcaccttcctgaagaagaaggacaagttcatcagcctggtgctgaagcacatcggcaccagcgccctgatggacctgctgctgcggctggtgtcctgtgtggagcccgccggcctgcggcaggatgtgctgcactggctgaatgaggagaaggtgatccagaggctggtggagctgatccaccccagccaggatgaagatcggcagagcaatgccagccagaccctgtgtgacatcgtgcggctgggccgggaccagggcagccagctgcaggaggccctggagccagaccccctgctgacagccctggagagccaggactgtgtggagcagctgctgaagaacatgtttgatggagacagaacagagagctgcctggtgtctggcacccaggtgctgctgaccctgctggagaccaggagagtgggcacagagggcctggtggacagcttcagccagggcctggagaggagctatgctgtgagcagctctgtgctgcacggcatcgagccccggctgaaggacttccaccagctgctgctgaacccccccaagaagaaggccatcctgaccaccatcggcgtgctggaggagcccctgggcaatgcccggctgcatggagcccggctgatggccgccctgctgcacaccaacacccccagcatcaaccaggagctgtgccgcctgaacaccatggacctgctgctggacctcttcttcaagtacacctggaacaacttcctgcacttccaggtggagctgtgcatcgccgccatcctgagccacgccgcccgggaggagaggacagaggccagcggcagcgagagccgggtggagccccctcatgaaaatggaaacagaagcctggagaccccccagcctgctgccagcctgcctgacaacaccatggtgacccacctgttccagaagtgctgcctggtgcagaggatcctggaggcctgggaggccaatgaccacacccaggccgccggcggcatgagaagaggcaacatgggccacctgaccagaattgccaatgctgtggtgcagaacctggagcggggccctgtgcagacccacatcagcgaggtgatccggggcctgcctgctgactgccggggccgctgggagagctttgtggaggagaccctgacagagaccaacagaagaaacacagtggacctggccttcagtgactaccagatccagcagatgacagccaactttgtggaccagtttggcttcaatgatgaggagtttgctgaccaggatgacaacatcaatgccccctttgacagaattgctgagatcaacttcaacattgatgctgatgaggacagccccagcgctgccctgtttgaggcctgctgcagcgaccgcatccagccctttgatgatgatgaagatgaggacatctgggaggacagcgacacccgctgtgccgcccgggtgatggcccggcccaggtttggagcccctcatgccagcgagagctgcagcaagaatggacctgagcggggcggccaggacggcaaggccagcctggaggcccacagagatgcccctggagctggggcccccccagcccctgggaagaaggaggcccctcctgtggagggggacagcgagggcgccatgtggacagctgtgtttgatgagcccgccaacagcacccccacagcccctggggtggtgagagatgtgggcagctctgtgtgggccgccggcaccagcgcccctgaggagaagggctgggccaagttcacagacttccagcccttctgctgcagcgagagcggcccccgctgcagcagccctgtggacacagaatgttctcatgctgagggcagccgcagccagggccctgagaaggccttctccccagccagcccctgtgcctggaatgtgtgtgtgaccaggaaggcccccctgctggccagtgacagcagcagcagcggcggcagccacagtgaagatggagaccagaaggccgccagcgccatggatgctgtgtcccggggccctggccgggaggccccacccctgcccaccgtggccaggacagaggaggccgtgggccgggtgggctgtgccgacagccggctgctgagccctgcctgcccagcccccaaggaggtgacagctgccccagctgtggccgtgcccccagaggccaccgtggccatcaccacagccctgagcaaggccggccctgccatccccaccccagctgtgagcagcgccctggccgtggccgtgcccctgggccccatcatggctgtgacagctgccccagccatggtggccaccctgggcaccgtgaccaaggatggcaagacagatgcccctcctgagggcgccgccctgaatggacctgtgtag

SEQ ID NO: 181502 - DNA, 2799 bp, Artificial Sequence
  derived and/or modified sequence
atgttctggaagttcgacctgaacaccaccagccacgtggacaagctcctggacaaggaacacgtcacattgcaggagctaatggatgaggacgatatcctgcaggaatgcaaagcccagaatcaaaagctgctcgattttctttgccgacagcagtgcatggaagaactggtgagtctgatcacacaggacccccccttggatatggaggagaaagtcagattcaagtatccgaacacagcatgcgagctgcttacatgtgatgtgccccagatctcagatagacttggaggcgatgaaagcctcctctctctgctgtacgatttcttagaccacgaaccaccactgaaccctctcttagcctcgttcttttccaagacaatcggcaaccttatcgcaagaaagacagagcaggtgatcactttccttaaaaagaaagacaaattcataagcctggtcctgaaacatatcggtacgagcgctttgatggatctgctgctgcgtttggtgtcttgcgtggaacccgccggtttacgacaagacgtgctgcattggctgaatgaggaaaaggtcatacagcggctggttgagctgattcatcctagccaggacgaagaccgacaatcgaatgctagtcagacactctgcgacatcgtgagacttggccgcgaccagggctcgcaactacaggaggcccttgaacccgacccacttctcaccgcgctggaaagccaggactgcgtcgagcaacttttgaagaacatgtttgatggtgatcgaaccgagagctgtctggttagcggaacacaggtactcctaacattgttggaaacacgacgggtcggcacagaggggctcgtggactccttttcccaggggctggaacgttcatatgccgtaagcagctctgtgctacacggaatcgagccccgcctcaaagattttcatcagcttctgttaaatccacctaaaaagaaggccattttgaccacaatcggagtgcttgaggagcctttgggtaacgcccgactccatggtgcacgacttatggcagcgcttttgcataccaatacaccctccatcaaccaggagttatgtcggcttaatactatggatctcctactggacctcttcttcaagtatacttggaacaactttctccatttccaggttgagctgtgtattgcagccattctttcgcacgctgcccgcgaagaacgcactgaagcctctgggagcgagtccagggtagagcccccccacgagaacggaaataggtcactggagacacctcagcctgcggcatccctgcctgacaatacaatggtaacccacctgttccaaaagtgctgtctggtgcagaggatcctggaagcatgggaagcaaacgaccacacacaggcggccggaggcatgagacgggggaacatggggcatctgactcgtattgccaatgccgtggtccagaacttggagagggggcccgtgcaaacccatatcagcgaggtcattcgcggactgcctgccgattgtagaggtagatgggagtcgttcgttgaagagacgctcaccgaaacgaatagacggaacaccgtggaccttgctttctctgattaccagattcagcaaatgacagcgaattttgtggaccagtttggcttcaatgatgaggaatttgccgaccaggacgataatattaacgctccgttcgaccggatcgctgagatcaatttcaacatcgatgccgacgaggacagcccttctgctgcattgtttgaggcatgctgctccgacaggattcagcctttcgatgatgacgaagacgaggacatctgggaagattccgacactcggtgtgccgcgcgagtgatggcccggcctcggtttggtgccccccacgccagcgaaagctgcagcaagaatggacccgagcgcggtggacaggacggaaaagcgtctctggaagcacacagagacgccccgggcgccggggcaccacccgcccctggtaagaaagaagctcctcctgtcgaaggggactcagagggggcgatgtggacagcagtattcgacgagcctgcaaactctacgcccacagcaccaggagtggtcagggatgtcggctcgtccgtttgggcagcgggtacttcagctccagaggaaaagggctgggccaagttcactgactttcagcctttttgctgttccgagtcaggccctaggtgttcatcacccgtggacaccgagtgcagccacgccgagggcagccgcagccagggaccagaaaaggcctttagccctgcatccccttgtgcctggaacgtttgcgtcacgaggaaagcccccttattggcatcggatagctcttctagcggcggctctcacagcgaagatggcgatcagaaagctgcatccgctatggacgctgtaagcagagggccgggtcgagaagcaccaccacttcctacagtcgcaaggacggaggaggccgtgggccgtgtcggatgcgccgacagccgattactttctcctgcatgcccagccccgaaggaggtgaccgccgcacccgccgtagccgttcccccggaagctactgtagctatcaccaccgcactatcgaaagctggccctgctatcccaaccccagcggtttcatcggctctagctgtcgctgtgccactcggccccattatggcggtcactgctgccccagctatggtggccaccttaggtactgtcactaaggatgggaagacagatgcaccaccagagggagcagcgctaaacggccccgtctag

SEQ ID NO: 181503 - DNA, 2799 bp, Artificial Sequence
  derived and/or modified sequence
atgttttggaaatttgacctgaacacgacgagtcatgtcgataagctgctggacaaagaacacgtgacgctgcaagagctgatggacgaagacgacatcctgcaggaatgtaaggctcagaatcaaaagctattagacttcctttgtagacaacagtgtatggaggagctggtctctctcatcactcaggaccctccactggacatggaggaaaaggtccggttcaagtatccaaatacagcctgcgagttgctaacatgcgatgtaccccagatctcagacaggttgggaggggacgagtctctgctgagcctcctatacgatttcctggaccacgagcccccactgaatcccctcttggcgtctttcttcagtaaaactatcggtaatctaatcgctcggaagacggagcaggtgatcactttcctgaagaaaaaggacaaattcatcagcttggtactgaaacatattgggacctccgcactcatggatctcctcctgcggctggtttcctgcgtggaaccagccggactcaggcaagatgttctgcactggctgaatgaggaaaaagttatccagaggttagtggaactgattcacccaagtcaggatgaggacaggcagtcaaatgcttcacagactttatgcgatatcgtaaggctgggcagagatcagggctcccaattacaagaagctctggagccggacccgctgctgacggctctggaaagccaagattgtgtcgaacagctcttgaagaacatgttcgacggagataggaccgagtcatgcttagtgagtggcacacaggtgctgctaacccttttagagactagaagggtcggaactgaaggtctggtggatagtttcagtcaggggctcgaacggtcgtatgctgtaagctcgagtgtattacacggcatcgagcccagactgaaagacttccatcaacttctgttgaatccccctaaaaagaaagctatcttgacaacaattggggtcctcgaggaaccgctggggaacgcgcgactgcacggcgcaaggctgatggccgctctgctacacacgaataccccaagcataaaccaggagttgtgtcgtttgaacacgatggatctactgctggacttgtttttcaagtatacatggaacaactttctgcacttccaagtggagctgtgtatcgcggctattttgagtcacgcagccagagaagagcgtactgaagccagtggatcggaaagtagggttgagcctcctcacgaaaatggtaatcggtctctggagacaccgcagcctgccgcatctctgcctgacaacacaatggtcacccacctattccaaaaatgctgcctcgtgcagcggattctcgaagcatgggaggccaatgatcacacccaagcagccggaggtatgaggcgcggaaacatgggtcacctaacccgaatcgctaacgccgttgtgcagaacctggagcgaggtcccgtccagacccatatcagcgaagtaataagaggactccccgctgattgccgtggaaggtgggaaagttttgtcgaagagaccctgacggaaacgaaccggagaaatactgtggatctggcctttagcgattatcagatacagcagatgactgctaacttcgtcgatcagtttgggtttaacgacgaggagttcgcggatcaggacgacaatatcaatgccccattcgatcgtatagctgaaatcaattttaacattgacgccgatgaggactcaccgagcgccgcactattcgaggcttgctgctctgataggattcagccgtttgacgacgacgaagatgaggacatctgggaggactctgacacccgctgcgcagccagggttatggctaggcctcggtttggcgctccccatgccagcgaatcttgcagcaagaatggccctgagcgaggagggcaggacggtaaggcctcactagaggctcacagggatgccccaggggcaggcgctcctccagcacctggtaagaaagaggccccacctgttgagggcgactcggagggcgcaatgtggactgccgtttttgacgaacctgccaacagcacacctactgctccaggagttgtgcgcgatgtgggaagtagcgtatgggccgcaggcactagcgcgcctgaggagaagggctgggccaaattcaccgattttcaaccattctgctgcagtgaaagcggccctcgctgcagttctcccgtcgatacagagtgctcccatgcggaggggtctcgttcacagggccctgaaaaggcattttcaccagcctcaccatgcgcttggaatgtttgtgttacacggaaggccccactcttggcctctgactcgagctcttccgggggttcccactccgaggacggggatcagaaagctgccagtgctatggatgccgtaagcagaggcccaggacgggaggcccctccactgcccacagtagccaggacagaggaggctgtgggccgagtgggatgcgccgacagccgactcttaagcccagcttgccctgcccctaaggaagtgacagcagccccagccgtggctgtgccccctgaagctactgttgccatcaccactgccttgtcaaaagcgggtccagccattcccacccccgctgtctcctccgccttagcagtggctgtgcccctgggacccataatggcagttacggctgcgccagctatggttgccacgttaggtaccgtcaccaaagacggaaaaacagatgccccacctgaaggcgctgctctcaatggaccagtctag

SEQ ID NO: 181504 - protein, 500 aa, Artificial Sequence
  derived and/or modified sequence
MAAASVSAASGSHLSNSFAEPSRSNGSMVRHSSSPYVVYPSDKPFLNSDLRRSPSKPTLAYPESNSRAIFSALKNLQDKIRRLELERIQAEESVKTLSRETIEYKKVLDEQIQERENSKNEESKHNQELTSQLLAAENKCNLLEKQLEYMRNMIKHAEMERTSVLEKQVSLERERQHDQTHVQSQLEKLDLLEQEYNKLTTMQALAEKKMQELEAKLHEEEQERKRMQAKAAELQTGLETNRLIFEDKATPCVPNARRIKKKKSKPPEKKSSRNYFGAQPHYRLCLGDMPFVAGKSTSPSHAVVANVQLVLHLMKQHSKALCNDRVINSIPLAKQVSSRGGKSKKLSVTPPSSNGINEELSEVLQTLQDEFGQMSFDHQQLAKLIQESPTVELKDKLECELEALVGRMEAKANQITKVRKYQAQLEKQKLEKQKKELKATKKTLDEERNSSSRSGITGTTNKKDFMKLRPGEKRRKNLQLLKDMQSIQNSLQSSSLCWDY

SEQ ID NO: 181505 - protein, 2235 aa, Artificial Sequence
  derived and/or modified sequence
MPLFFSALLVLLLVALSALFLGRWLVVRLATKWCQRKLQAELKIGSFRFFWIQNVSLKFQQHQQTVEIDNLWISSKLLSHDLPHYVALCFGEVRIRTDLQKVSDLSAPFSQSAGVDQKELSFSPSLLKIFCQLFSIHVDAINIMVLKVDTSESLWHIQISRSRFLLDSDGKRLICEVSLCKINSKVLKSGQLEDTCLVELSLALDLCLKVGISSRHLTAITVDVWTLHAELHEGLFQSQLLCQGPSLASKPVPCSEVTENLVEPTLPGLFLLQQLPDQVKVKMENTSVVLSMNSQKRHLTWTLKLLQFLYHRDEDQLPLRSFTANSDMAQMSTELLLEDGLLLSQSRQRIVCLNSLKASVQVTTIDLSASLVLNTCIIHYRHQEFSHWLHLLALETQGSSSPVLKQRKKRTFPQILAPIIFSTSISNVNISIQLGDTPPFALGFNSISLDYQHLRPQSIHQRGVLTVDHLCWRVGSDSHIQRAPHPPNMHVWGEALVLDSFTLQGSYNQPLGLSSTQSDTLFLDCTIRGLQVEASDTCAQCLSRILSLMGPQSGKSAVSRHSSFGESVSLLWKVDLKVEDMNLFTLSALVGASEVRLDTLTILGSAETSTVGIQGLVLALVKSVTEKMQPCCKAPDIPTPVLSLSMLSITYHSSIRSLEVQCGAGLTLLWSPPDHMYLYQHVLATLQCRDLLRATVFPETVPSLALETSGTTSELEGRAPEPLPPKRLLNLTLEVSTAKLTAFVAEDKFITLAAESVSLSRHGGSLQAYCPELAAGFDGNSIFNFKEVEVQLLPELEEMILHRNPFPALQTLRNRVWLLSFGSVSVEFPYQYDFSRTLDEAVGVQKWLKGLHQGTRAWASPSPVPLPPDLLLKVEHFSWVFLDDVFEVKLHDNYELMKDESKESAKRLQLLDAKVAALRKQHGELLPARKIEELYASLERKNIEIYIQRSRRLYGNTPMRRALLTWSLAGLELVALADASFHGPEHVVEQVQELDPGSPFPPEGLDLVIQWCRMLKCNVKSFLVRIRDYPRYLFEIRDWRLMGRLVGTEQSGQPCSRRRQILHLGLPWGNVAVERNMPPLKFYHDFHSEIFQYTVVWGPCWDPAWTLIGQCVDLLTKPSADPSPPLPWWDKSRLLFHGDWHMDIEQANLHQLATEDPYNTTENMHWEWSHLSFHWKPGQFVFKGDLDINVRTASKYDDCCFLHLPDLCMTLDLQWLCHGNPHDHHSVTLRAPEFLPEVPLGQLHDSYRAFRSENLNLSIKMDLTRHSGTISQPRILLYSSTLRWMQNFWATWTSVTRPICRGKLFNNLKPSKKKLGQHYKQLSYTALFPQLQVHYWASFAQQRGIQIECSQGHVFTRGTQRLIPQAGTVMRRLISDWSVTQMVSDLSQVTVHLMASPTEENADHCLDPLVTKTHLLSLSSLTYQRHSNRTAEEELSARDGDPTFHTHQLHLVDLRISWTTTNRDIAFGLYDGYKKAAVLKRNLSTEALKGLKIDPQMPAKKPKRGVPTSASAPPRVNTPSFSGQPDKGSSGGAYMLQKLIEETDRFVVFTEEESGMSDQLCGIAACQTDDIYNRNCLIELVNCQMVLRGAETEGCVIVSAAKAQLLQCQHHPAWYGDTLKQKTSWTCLLDGMQYFATTESSPTEQDGRQLWLEVKNIEEHRQRSLDSVQELMESGQAVGGMVTTTTDWNQPAEAQQAQQVQRIISRCNCRMYYISYSHDIDPELATQIKPPEVLENQEKEDLLKKQEGAVDTFTLIHHELEISTNPAQYAMILDIVNNLLLHVEPKRKEHSEKKQRVRFQLEISSNPEEQRSSILHLQEAVRQHVAQIRQLEKQMYSIMKSLQDDSKNENLLDLNQKLQLQLNQEKANLQLESEELNILIRCFKDFQLQRANKMELRKQQEDVSVVRRTEFYFAQARWRLTEEDGQLGIAELELQRFLYSKVNKSDDTAEHLLELGWFTMNNLLPNAVYKVVLRPQSSCQSGRQLALRLFSKVRPPVGGISVKEHFEVNVVPLTIQLTHQFFHRMMGFFFPGRSVEDDEVGDEEDKSKLVTTGIPVVKPRQLIATDDAVPLGPGKGVAQGLTRSSGVRRSFRKSPEHPVDDIDKMKERAAMNNSFIYIKIPQVPLCVSYKGEKNSVDWGDLNLVLPCLEYHNNTWTWLDFAMAVKRDSRKALVAQVIKEKLRLKSATGSEVRGKLETKSDLNMQQQEEEEKARLLIGLSVGDKNPGKKSIFGRRK

SEQ ID NO: 181506 - protein, 2205 aa, Artificial Sequence
  derived and/or modified sequence
MPLFFSALLVLLLVALSALFLGRWLVVRLATKWCQRKLQAELKIGSFRFFWIQNVSLKFQQHQQTVEIDNLWISSKLLSHDLPHYVALCFGEVRIRTDLQKVSDLSAPFSQSAGVDQKELSFSPSLLKIFCQLFSIHVDAINIMVLKVDTSESLWHIQISRSRFLLDSDGKRLICEVSLCKINSKVLKSGQLEDTCLVELSLALDLCLKVGISSRHLTAITVDVWTLHAELHEGLFQSQLLCQGPSLASKPVPCSEVTENLVEPTLPGLFLLQQLPDQVKVKMENTSVVLSMNSQKRHLTWTLKLLQFLYHRDEDQLPLRSFTANSDMAQMSTELLLEDGLLLSQSRQRIVCLNSLKASVQVTTIDLSASLVLNTCIIHYRHQEFSHWLHLLALETQGSSSPVLKQRKKRTFPQILAPIIFSTSISNVNISIQLGDTPPFALGFNSISLDYQHLRPQSIHQRGVLTVDHLCWRVGSDSHIQRAPHPPNMHVWGEALVLDSFTLQGSYNQPLGLSSTQSDTLFLDCTIRGLQVEASDTCAQCLSRILSLMGPQSGKSAVSRHSSFGESVSLLWKVDLKVEDMNLFTLSALVGASEVRLDTLTILGSAETSTVGIQGLVLALVKSVTEKMQPCCKAPDIPTPVLSLSMLSITYHSSIRSLEVQCGAGLTLLWSPPDHMYLYQHVLATLQCRDLLRATVFPETVPSLALETSGTTSELEGRAPEPLPPKRLLNLTLEVSTAKLTAFVAEDKFITLAAESVSLSRHGGSLQAYCPELAAGFDGNSIFNFKEVEVQLLPEVEFPYQYDFSRTLDEAVGVQKWLKGLHQGTRAWASPSPVPLPPDLLLKVEHFSWVFLDDVFEVKLHDNYELMKDESKESAKRLQLLDAKVAALRKQHGELLPARKIEELYASLERKNIEIYIQRSRRLYGNTPMRRALLTWSLAGLELVALADASFHGPEHVVEQVQELDPGSPFPPEGLDLVIQWCRMLKCNVKSFLVRIRDYPRYLFEIRDWRLMGRLVGTEQSGQPCSRRRQILHLGLPWGNVAVERNMPPLKFYHDFHSEIFQYTVVWGPCWDPAWTLIGQCVDLLTKPSADPSPPLPWWDKSRLLFHGDWHMDIEQANLHQLATEDPYNTTENMHWEWSHLSFHWKPGQFVFKGDLDINVRTASKYDDCCFLHLPDLCMTLDLQWLCHGNPHDHHSVTLRAPEFLPEVPLGQLHDSYRAFRSENLNLSIKMDLTRHSGTISQPRILLYSSTLRWMQNFWATWTSVTRPICRGKLFNNLKPSKKKLGQHYKQLSYTALFPQLQVHYWASFAQQRGIQIECSQGHVFTRGTQRLIPQAGTVMRRLISDWSVTQMVSDLSQVTVHLMASPTEENADHCLDPLVTKTHLLSLSSLTYQRHSNRTAEEELSARDGDPTFHTHQLHLVDLRISWTTTNRDIAFGLYDGYKKAAVLKRNLSTEALKGLKIDPQMPAKKPKRGVPTSASAPPRVNTPSFSGQPDKGSSGGAYMLQKLIEETDRFVVFTEEESGMSDQLCGIAACQTDDIYNRNCLIELVNCQMVLRGAETEGCVIVSAAKAQLLQCQHHPAWYGDTLKQKTSWTCLLDGMQYFATTESSPTEQDGRQLWLEVKNIEEHRQRSLDSVQELMESGQAVGGMVTTTTDWNQPAEAQQAQQVQRIISRCNCRMYYISYSHDIDPELATQIKPPEVLENQEKEDLLKKQEGAVDTFTLIHHELEISTNPAQYAMILDIVNNLLLHVEPKRKEHSEKKQRVRFQLEISSNPEEQRSSILHLQEAVRQHVAQIRQLEKQMYSIMKSLQDDSKNENLLDLNQKLQLQLNQEKANLQLESEELNILIRCFKDFQLQRANKMELRKQQEDVSVVRRTEFYFAQARWRLTEEDGQLGIAELELQRFLYSKVNKSDDTAEHLLELGWFTMNNLLPNAVYKVVLRPQSSCQSGRQLALRLFSKVRPPVGGISVKEHFEVNVVPLTIQLTHQFFHRMMGFFFPGRSVEDDEVGDEEDKSKLVTTGIPVVKPRQLIATDDAVPLGPGKGVAQGLTRSSGVRRSFRKSPEHPVDDIDKMKERAAMNNSFIYIKIPQVPLCVSYKGEKNSVDWGDLNLVLPCLEYHNNTWTWLDFAMAVKRDSRKALVAQVIKEKLRLKSATGSEVRGKLETKSDLNMQQQEEEEKARLLIGLSVGDKNPGKKSIFGRRK

SEQ ID NO: 181507 - protein, 2235 aa, Artificial Sequence
  derived and/or modified sequence
MPLFFSALLVLLLVALSALFLGRWLVVRLATKWCQRKLQAELKIGSFRFFWIQNVSLKFQQHQQTVEIDNLWISSKLLSHDLPHYVALCFGEVRIRTDLQKVSDLSAPFSQSAGVDQKELSFSPSLLKIFCQLFSIHVDAINIMVLKVDTSESLWHIQISRSRFLLDSDGKRLICEVSLCKINSKVLKSGQLEDTCLVELSLALDLCLKVGISSRHLTAITVDVWTLHAELHEGLFQSQLLCQGPSLASKPVPCSEVTENLVEPTLPGLFLLQQLPDQVKVKMENTSVVLSMNSQKRHLTWTLKLLQFLYHRDEDQLPLRSFTANSDMAQMSTELLLEDGLLLSQSRQRIVCLNSLKASVQVTTIDLSASLVLNTCIIHYRHQEFSHWLHLLALETQGSSSPVLKQRKKRTFPQILAPIIFSTSISNVNISIQLGDTPPFALGFNSISLDYQHLRPQSIHQRGVLTVDHLCWRVGSDSHIQRAPHPPNMHVWGEALVLDSFTLQGSYNQPLGLSSTQSDTLFLDCTIRGLQVEASDTCAQCLSRILSLMGPQSGKSAVSRHSSFGESVSLLWKVDLKVEDMNLFTLSALVGASEVRLDTLTILGSAETSTVGIQGLVLALVKSVTEKMQPCCKAPDIPTPVLSLSMLSITYHSSIRSLEVQCGAGLTLLWSPPDHMYLYQHVLATLQCRDLLRATVFPETVPSLALETSGTTSELEGRAPEPLPPKRLLNLTLEVSTAKLTAFVAEDKFITLAAESVSLSRHGGSLQAYCPELAAGFDGNSIFNFKEVEVQLLPELEEMILHRNPFPALQTLRNRVWLLSFGSVSVEFPYQYDFSRTLDEAVGVQKWLKGLHQGTRAWASPSPVPLPPDLLLKVEHFSWVFLDDVFEVKLHDNYELMKDESKESAKRLQLLDAKVAALRKQHGELLPARKIEELYASLERKNIEIYIQRSRRLYGNTPMRRALLTWSLAGLELVALADASFHGPEHVVEQVQELDPGSPFPPEGLDLVIQWCRMLKCNVKSFLVRIRDYPRYLFEIRDWRLMGRLVGTEQSGQPCSRRRQILHLGLPWGNVAVERNMPPLKFYHDFHSEIFQYTVVWGPCWDPAWTLIGQCVDLLTKPSADPSPPLPWWDKSRLLFHGDWHMDIEQANLHQLATEDPYNTTENMHWEWSHLSFHWKPGQFVFKGDLDINVRTASKYDDCCFLHLPDLCMTLDLQWLCHGNPHDHHSVTLRAPEFLPEVPLGQLHDSYRAFRSENLNLSIKMDLTRHSGTISQPRILLYSSTLRWMQNFWATWTSVTRPICRGKLFNNLKPSKKKLGQHYKQLSYTALFPQLQVHYWASFAQQRGIQIECSQGHVFTRGTQRLIPQAGTVMRRLISDWSVTQMVSDLSQVTVHLMASPTEENADHCLDPLVTKTHLLSLSSLTYQRHSNRTAEEELSARDGDPTFHTHQLHLVDLRISWTTTNRDIAFGLYDGYKKAAVLKRNLSTEALKGLKIDPQMPAKKPKRGVPTSASAPPRVNTPSFSGQPDKGSSGGAYMLQKLIEETDRFVVFTEEESGMSDQLCGIAACQTDDIYNRNCLIELVNCQMVLRGAETEGCVIVSAAKAQLLQCQHHPAWYGDTLKQKTSWTCLLDGMQYFATTESSPTEQDGRQLWLEVKNIEEHRQRSLDSVQELMESGQAVGGMVTTTTDWNQPAEAQQAQQVQRIISRCNCRMYYISYSHDIDPELATQIKPPEVLENQEKEDLLKKQEGAVDTFTLIHHELEISTNPAQYAMILDIVNNLLLHVEPKRKEHSEKKQRVRFQLEISSNPEEQRSSILHLQEAVRQHVAQIRQLEKQMYSIMKSLQDDSKNENLLDLNQKLQLQLNQEKANLQLESEELNILIRCFKDFQLQRANKMELRKQQEDVSVVRRTEFYFAQARWRLTEEDGQLGIAELELQRFLYSKVNKSDDTAEHLLELGWFTMNNLLPNAVYKAILRPQSSCQSGRQLALRLFSKVRPPVGGISVKEHFEVNVVPLTIQLTHQFFHRMMGFFFPGRSVEDDEVGDEEDKSKLVTTGIPVVKPRQLIATDDAVPLGPGKGVAQGLTRSSGVRRSFRKSPEHPVDDIDKMKERAAMNNSFIYIKIPQVPLCVSYKGEKNSVDWGDLNLVLPCLEYHNNTWTWLDFAMAVKRDSRKALVAQVIKEKLRLKSATGSEVRGKLETKSDLNMQQQEEEEKARLLIGLSVGDKNPGKKSIFGRRK

SEQ ID NO: 181508 - protein, 2092 aa, Artificial Sequence
  derived and/or modified sequence
MVLKVDTSESLWHIQISRSRFLLDSDGKRLICEVSLCKINSKVLKSGQLEDTCLVELSLALDLCLKVGISSRHLTAITVDVWTLHAELHEGLFQSQLLCQGPSLASKPVPCSEVTENLVEPTLPGLFLLQQLPDQVKVKMENTSVVLSMNSQKRHLTWTLKLLQFLYHRDEDQLPLRSFTANSDMAQMSTELLLEDGLLLSQSRQRIVCLNSLKASVQVTTIDLSASLVLNTCIIHYRHQEFSHWLHLLALETQGSSSPVLKQRKKRTFPQILAPIIFSTSISNVNISIQLGDTPPFALGFNSISLDYQHLRPQSIHQRGVLTVDHLCWRVGSDSHIQRAPHPPNMHVWGEALVLDSFTLQGSYNQPLGLSSTQSDTLFLDCTIRGLQVEASDTCAQCLSRILSLMGPQSGKSAVSRHSSFGESVSLLWKVDLKVEDMNLFTLSALVGASEVRLDTLTILGSAETSTVGIQGLVLALVKSVTEKMQPCCKAPDIPTPVLSLSMLSITYHSSIRSLEVQCGAGLTLLWSPPDHMYLYQHVLATLQCRDLLRATVFPETVPSLALETSGTTSELEGRAPEPLPPKRLLNLTLEVSTAKLTAFVAEDKFITLAAESVSLSRHGGSLQAYCPELAAGFDGNSIFNFKEVEVQLLPELEEMILHRNPFPALQTLRNRVWLLSFGSVSVEFPYQYDFSRTLDEAVGVQKWLKGLHQGTRAWASPSPVPLPPDLLLKVEHFSWVFLDDVFEVKLHDNYELMKDESKESAKRLQLLDAKVAALRKQHGELLPARKIEELYASLERKNIEIYIQRSRRLYGNTPMRRALLTWSLAGLELVALADASFHGPEHVVEQVQELDPGSPFPPEGLDLVIQWCRMLKCNVKSFLVRIRDYPRYLFEIRDWRLMGRLVGTEQSGQPCSRRRQILHLGLPWGNVAVERNMPPLKFYHDFHSEIFQYTVVWGPCWDPAWTLIGQCVDLLTKPSADPSPPLPWWDKSRLLFHGDWHMDIEQANLHQLATEDPYNTTENMHWEWSHLSFHWKPGQFVFKGDLDINVRTASKYDDCCFLHLPDLCMTLDLQWLCHGNPHDHHSVTLRAPEFLPEVPLGQLHDSYRAFRSENLNLSIKMDLTRHSGTISQPRILLYSSTLRWMQNFWATWTSVTRPICRGKLFNNLKPSKKKLGQHYKQLSYTALFPQLQVHYWASFAQQRGIQIECSQGHVFTRGTQRLIPQAGTVMRRLISDWSVTQMVSDLSQVTVHLMASPTEENADHCLDPLVTKTHLLSLSSLTYQRHSNRTAEEELSARDGDPTFHTHQLHLVDLRISWTTTNRDIAFGLYDGYKKAAVLKRNLSTEALKGLKIDPQMPAKKPKRGVPTSASAPPRVNTPSFSGQPDKGSSGGAYMLQKLIEETDRFVVFTEEESGMSDQLCGIAACQTDDIYNRNCLIELVNCQMVLRGAETEGCVIVSAAKAQLLQCQHHPAWYGDTLKQKTSWTCLLDGMQYFATTESSPTEQDGRQLWLEVKNIEEHRQRSLDSVQELMESGQAVGGMVTTTTDWNQPAEAQQAQQVQRIISRCNCRMYYISYSHDIDPELATQIKPPEVLENQEKEDLLKKQEGAVDTFTLIHHELEISTNPAQYAMILDIVNNLLLHVEPKRKEHSEKKQRVRFQLEISSNPEEQRSSILHLQEAVRQHVAQIRQLEKQMYSIMKSLQDDSKNENLLDLNQKLQLQLNQEKANLQLESEELNILIRCFKDFQLQRANKMELRKQQEDVSVVRRTEFYFAQARWRLTEEDGQLGIAELELQRFLYSKVNKSDDTAEHLLELGWFTMNNLLPNAVYKVVLRPQSSCQSGRQLALRLFSKVRPPVGGISVKEHFEVNVVPLTIQLTHQFFHRMMGFFFPGRSVEDDEVGDEEDKSKLVTTGIPVVKPRQLIATDDAVPLGPGKGVAQGLTRSSGVRRSFRKSPEHPVDDIDKMKERAAMNNSFIYIKIPQVPLCVSYKGEKNSVDWGDLNLVLPCLEYHNNTWTWLDFAMAVKRDSRKALVAQVIKEKLRLKSATGSEVRGKLETKSDLNMQQQEEEEKARLLIGLSVGDKNPGKKSIFGRRK

SEQ ID NO: 181509 - DNA, 6708 bp, Artificial Sequence
  derived and/or modified sequence
atgcccctgttcttcagcgccctgctggtgctgctgctggtggccctgagcgccctgttcctgggcagatggctggtggtgagactggccaccaagtggtgccagagaaagctgcaggccgagctgaagatcggcagcttcagattcttctggatccagaacgtgagcctgaagttccagcagcaccagcagaccgtggagatcgacaacctgtggatcagcagcaagctgctgagccacgacctgccccactacgtggccctgtgcttcggcgaggtgagaatcagaaccgacctgcagaaggtgagcgacctgagcgcccccttcagccagagcgccggcgtggaccagaaggagctgagcttcagccccagcctgctgaagatcttctgccagctgttcagcatccacgtggacgccatcaacatcatggtgctgaaggtggacaccagcgagagcctgtggcacatccagatcagcagaagcagattcctgctggacagcgacggcaagagactgatctgcgaggtgagcctgtgcaagatcaacagcaaggtgctgaagagcggccagctggaggacacctgcctggtggagctgagcctggccctggacctgtgcctgaaggtgggcatcagcagcagacacctgaccgccatcaccgtggacgtgtggaccctgcacgccgagctgcacgagggcctgttccagagccagctgctgtgccagggccccagcctggccagcaagcccgtgccctgcagcgaggtgaccgagaacctggtggagcccaccctgcccggcctgttcctgctgcagcagctgcccgaccaggtgaaggtgaagatggagaacaccagcgtggtgctgagcatgaacagccagaagagacacctgacctggaccctgaagctgctgcagttcctgtaccacagagacgaggaccagctgcccctgagaagcttcaccgccaacagcgacatggcccagatgagcaccgagctgctgctggaggacggcctgctgctgagccagagcagacagagaatcgtgtgcctgaacagcctgaaggccagcgtgcaggtgaccaccatcgacctgagcgccagcctggtgctgaacacctgcatcatccactacagacaccaggagttcagccactggctgcacctgctggccctggagacccagggcagcagcagccccgtgctgaagcagagaaagaagagaaccttcccccagatcctggcccccatcatcttcagcaccagcatcagcaacgtgaacatcagcatccagctgggcgacaccccccccttcgccctgggcttcaacagcatcagcctggactaccagcacctgagaccccagagcatccaccagagaggcgtgctgaccgtggaccacctgtgctggagagtgggcagcgacagccacatccagagagccccccacccccccaacatgcacgtgtggggcgaggccctggtgctggacagcttcaccctgcagggcagctacaaccagcccctgggcctgagcagcacccagagcgacaccctgttcctggactgcaccatcagaggcctgcaggtggaggccagcgacacctgcgcccagtgcctgagcagaatcctgagcctgatgggcccccagagcggcaagagcgccgtgagcagacacagcagcttcggcgagagcgtgagcctgctgtggaaggtggacctgaaggtggaggacatgaacctgttcaccctgagcgccctggtgggcgccagcgaggtgagactggacaccctgaccatcctgggcagcgccgagaccagcaccgtgggcatccagggcctggtgctggccctggtgaagagcgtgaccgagaagatgcagccctgctgcaaggcccccgacatccccacccccgtgctgagcctgagcatgctgagcatcacctaccacagcagcatcagaagcctggaggtgcagtgcggcgccggcctgaccctgctgtggagcccccccgaccacatgtacctgtaccagcacgtgctggccaccctgcagtgcagagacctgctgagagccaccgtgttccccgagaccgtgcccagcctggccctggagaccagcggcaccaccagcgagctggagggcagagcccccgagcccctgccccccaagagactgctgaacctgaccctggaggtgagcaccgccaagctgaccgccttcgtggccgaggacaagttcatcaccctggccgccgagagcgtgagcctgagcagacacggcggcagcctgcaggcctactgccccgagctggccgccggcttcgacggcaacagcatcttcaacttcaaggaggtggaggtgcagctgctgcccgagctggaggagatgatcctgcacagaaaccccttccccgccctgcagaccctgagaaacagagtgtggctgctgagcttcggcagcgtgagcgtggagttcccctaccagtacgacttcagcagaaccctggacgaggccgtgggcgtgcagaagtggctgaagggcctgcaccagggcaccagagcctgggccagccccagccccgtgcccctgccccccgacctgctgctgaaggtggagcacttcagctgggtgttcctggacgacgtgttcgaggtgaagctgcacgacaactacgagctgatgaaggacgagagcaaggagagcgccaagagactgcagctgctggacgccaaggtggccgccctgagaaagcagcacggcgagctgctgcccgccagaaagatcgaggagctgtacgccagcctggagagaaagaacatcgagatctacatccagagaagcagaagactgtacggcaacacccccatgagaagagccctgctgacctggagcctggccggcctggagctggtggccctggccgacgccagcttccacggccccgagcacgtggtggagcaggtgcaggagctggaccccggcagccccttcccccccgagggcctggacctggtgatccagtggtgcagaatgctgaagtgcaacgtgaagagcttcctggtgagaatcagagactaccccagatacctgttcgagatcagagactggagactgatgggcagactggtgggcaccgagcagagcggccagccctgcagcagaagaagacagatcctgcacctgggcctgccctggggcaacgtggccgtggagagaaacatgccccccctgaagttctaccacgacttccacagcgagatcttccagtacaccgtggtgtggggcccctgctgggaccccgcctggaccctgatcggccagtgcgtggacctgctgaccaagcccagcgccgaccccagcccccccctgccctggtgggacaagagcagactgctgttccacggcgactggcacatggacatcgagcaggccaacctgcaccagctggccaccgaggacccctacaacaccaccgagaacatgcactgggagtggagccacctgagcttccactggaagcccggccagttcgtgttcaagggcgacctggacatcaacgtgagaaccgccagcaagtacgacgactgctgcttcctgcacctgcccgacctgtgcatgaccctggacctgcagtggctgtgccacggcaacccccacgaccaccacagcgtgaccctgagagcccccgagttcctgcccgaggtgcccctgggccagctgcacgacagctacagagccttcagaagcgagaacctgaacctgagcatcaagatggacctgaccagacacagcggcaccatcagccagcccagaatcctgctgtacagcagcaccctgagatggatgcagaacttctgggccacctggaccagcgtgaccagacccatctgcagaggcaagctgttcaacaacctgaagcccagcaagaagaagctgggccagcactacaagcagctgagctacaccgccctgttcccccagctgcaggtgcactactgggccagcttcgcccagcagagaggcatccagatcgagtgcagccagggccacgtgttcaccagaggcacccagagactgatcccccaggccggcaccgtgatgagaagactgatcagcgactggagcgtgacccagatggtgagcgacctgagccaggtgaccgtgcacctgatggccagccccaccgaggagaacgccgaccactgcctggaccccctggtgaccaagacccacctgctgagcctgagcagcctgacctaccagagacacagcaacagaaccgccgaggaggagctgagcgccagagacggcgaccccaccttccacacccaccagctgcacctggtggacctgagaatcagctggaccaccaccaacagagacatcgccttcggcctgtacgacggctacaagaaggccgccgtgctgaagagaaacctgagcaccgaggccctgaagggcctgaagatcgacccccagatgcccgccaagaagcccaagagaggcgtgcccaccagcgccagcgccccccccagagtgaacacccccagcttcagcggccagcccgacaagggcagcagcggcggcgcctacatgctgcagaagctgatcgaggagaccgacagattcgtggtgttcaccgaggaggagagcggcatgagcgaccagctgtgcggcatcgccgcctgccagaccgacgacatctacaacagaaactgcctgatcgagctggtgaactgccagatggtgctgagaggcgccgagaccgagggctgcgtgatcgtgagcgccgccaaggcccagctgctgcagtgccagcaccaccccgcctggtacggcgacaccctgaagcagaagaccagctggacctgcctgctggacggcatgcagtacttcgccaccaccgagagcagccccaccgagcaggacggcagacagctgtggctggaggtgaagaacatcgaggagcacagacagagaagcctggacagcgtgcaggagctgatggagagcggccaggccgtgggcggcatggtgaccaccaccaccgactggaaccagcccgccgaggcccagcaggcccagcaggtgcagagaatcatcagcagatgcaactgcagaatgtactacatcagctacagccacgacatcgaccccgagctggccacccagatcaagccccccgaggtgctggagaaccaggagaaggaggacctgctgaagaagcaggagggcgccgtggacaccttcaccctgatccaccacgagctggagatcagcaccaaccccgcccagtacgccatgatcctggacatcgtgaacaacctgctgctgcacgtggagcccaagagaaaggagcacagcgagaagaagcagagagtgagattccagctggagatcagcagcaaccccgaggagcagagaagcagcatcctgcacctgcaggaggccgtgagacagcacgtggcccagatcagacagctggagaagcagatgtacagcatcatgaagagcctgcaggacgacagcaagaacgagaacctgctggacctgaaccagaagctgcagctgcagctgaaccaggagaaggccaacctgcagctggagagcgaggagctgaacatcctgatcagatgcttcaaggacttccagctgcagagagccaacaagatggagctgagaaagcagcaggaggacgtgagcgtggtgagaagaaccgagttctacttcgcccaggccagatggagactgaccgaggaggacggccagctgggcatcgccgagctggagctgcagagattcctgtacagcaaggtgaacaagagcgacgacaccgccgagcacctgctggagctgggctggttcaccatgaacaacctgctgcccaacgccgtgtacaaggtggtgctgagaccccagagcagctgccagagcggcagacagctggccctgagactgttcagcaaggtgagaccccccgtgggcggcatcagcgtgaaggagcacttcgaggtgaacgtggtgcccctgaccatccagctgacccaccagttcttccacagaatgatgggcttcttcttccccggcagaagcgtggaggacgacgaggtgggcgacgaggaggacaagagcaagctggtgaccaccggcatccccgtggtgaagcccagacagctgatcgccaccgacgacgccgtgcccctgggccccggcaagggcgtggcccagggcctgaccagaagcagcggcgtgagaagaagcttcagaaagagccccgagcaccccgtggacgacatcgacaagatgaaggagagagccgccatgaacaacagcttcatctacatcaagatcccccaggtgcccctgtgcgtgagctacaagggcgagaagaacagcgtggactggggcgacctgaacctggtgctgccctgcctggagtaccacaacaacacctggacctggctggacttcgccatggccgtgaagagagacagcagaaaggccctggtggcccaggtgatcaaggagaagctgagactgaagagcgccaccggcagcgaggtgagaggcaagctggagaccaagagcgacctgaacatgcagcagcaggaggaggaggagaaggccagactgctgatcggcctgagcgtgggcgacaagaaccccggcaagaagagcatcttcggcagaagaaagtag

SEQ ID NO: 181510 - DNA, 6618 bp, Artificial Sequence
  derived and/or modified sequence
atgcccctgttcttcagcgccctgctggtgctgctgctggtggccctgagcgccctgttcctgggcagatggctggtggtgagactggccaccaagtggtgccagagaaagctgcaggccgagctgaagatcggcagcttcagattcttctggatccagaacgtgagcctgaagttccagcagcaccagcagaccgtggagatcgacaacctgtggatcagcagcaagctgctgagccacgacctgccccactacgtggccctgtgcttcggcgaggtgagaatcagaaccgacctgcagaaggtgagcgacctgagcgcccccttcagccagagcgccggcgtggaccagaaggagctgagcttcagccccagcctgctgaagatcttctgccagctgttcagcatccacgtggacgccatcaacatcatggtgctgaaggtggacaccagcgagagcctgtggcacatccagatcagcagaagcagattcctgctggacagcgacggcaagagactgatctgcgaggtgagcctgtgcaagatcaacagcaaggtgctgaagagcggccagctggaggacacctgcctggtggagctgagcctggccctggacctgtgcctgaaggtgggcatcagcagcagacacctgaccgccatcaccgtggacgtgtggaccctgcacgccgagctgcacgagggcctgttccagagccagctgctgtgccagggccccagcctggccagcaagcccgtgccctgcagcgaggtgaccgagaacctggtggagcccaccctgcccggcctgttcctgctgcagcagctgcccgaccaggtgaaggtgaagatggagaacaccagcgtggtgctgagcatgaacagccagaagagacacctgacctggaccctgaagctgctgcagttcctgtaccacagagacgaggaccagctgcccctgagaagcttcaccgccaacagcgacatggcccagatgagcaccgagctgctgctggaggacggcctgctgctgagccagagcagacagagaatcgtgtgcctgaacagcctgaaggccagcgtgcaggtgaccaccatcgacctgagcgccagcctggtgctgaacacctgcatcatccactacagacaccaggagttcagccactggctgcacctgctggccctggagacccagggcagcagcagccccgtgctgaagcagagaaagaagagaaccttcccccagatcctggcccccatcatcttcagcaccagcatcagcaacgtgaacatcagcatccagctgggcgacaccccccccttcgccctgggcttcaacagcatcagcctggactaccagcacctgagaccccagagcatccaccagagaggcgtgctgaccgtggaccacctgtgctggagagtgggcagcgacagccacatccagagagccccccacccccccaacatgcacgtgtggggcgaggccctggtgctggacagcttcaccctgcagggcagctacaaccagcccctgggcctgagcagcacccagagcgacaccctgttcctggactgcaccatcagaggcctgcaggtggaggccagcgacacctgcgcccagtgcctgagcagaatcctgagcctgatgggcccccagagcggcaagagcgccgtgagcagacacagcagcttcggcgagagcgtgagcctgctgtggaaggtggacctgaaggtggaggacatgaacctgttcaccctgagcgccctggtgggcgccagcgaggtgagactggacaccctgaccatcctgggcagcgccgagaccagcaccgtgggcatccagggcctggtgctggccctggtgaagagcgtgaccgagaagatgcagccctgctgcaaggcccccgacatccccacccccgtgctgagcctgagcatgctgagcatcacctaccacagcagcatcagaagcctggaggtgcagtgcggcgccggcctgaccctgctgtggagcccccccgaccacatgtacctgtaccagcacgtgctggccaccctgcagtgcagagacctgctgagagccaccgtgttccccgagaccgtgcccagcctggccctggagaccagcggcaccaccagcgagctggagggcagagcccccgagcccctgccccccaagagactgctgaacctgaccctggaggtgagcaccgccaagctgaccgccttcgtggccgaggacaagttcatcaccctggccgccgagagcgtgagcctgagcagacacggcggcagcctgcaggcctactgccccgagctggccgccggcttcgacggcaacagcatcttcaacttcaaggaggtggaggtgcagctgctgcccgaggtggagttcccctaccagtacgacttcagcagaaccctggacgaggccgtgggcgtgcagaagtggctgaagggcctgcaccagggcaccagagcctgggccagccccagccccgtgcccctgccccccgacctgctgctgaaggtggagcacttcagctgggtgttcctggacgacgtgttcgaggtgaagctgcacgacaactacgagctgatgaaggacgagagcaaggagagcgccaagagactgcagctgctggacgccaaggtggccgccctgagaaagcagcacggcgagctgctgcccgccagaaagatcgaggagctgtacgccagcctggagagaaagaacatcgagatctacatccagagaagcagaagactgtacggcaacacccccatgagaagagccctgctgacctggagcctggccggcctggagctggtggccctggccgacgccagcttccacggccccgagcacgtggtggagcaggtgcaggagctggaccccggcagccccttcccccccgagggcctggacctggtgatccagtggtgcagaatgctgaagtgcaacgtgaagagcttcctggtgagaatcagagactaccccagatacctgttcgagatcagagactggagactgatgggcagactggtgggcaccgagcagagcggccagccctgcagcagaagaagacagatcctgcacctgggcctgccctggggcaacgtggccgtggagagaaacatgccccccctgaagttctaccacgacttccacagcgagatcttccagtacaccgtggtgtggggcccctgctgggaccccgcctggaccctgatcggccagtgcgtggacctgctgaccaagcccagcgccgaccccagcccccccctgccctggtgggacaagagcagactgctgttccacggcgactggcacatggacatcgagcaggccaacctgcaccagctggccaccgaggacccctacaacaccaccgagaacatgcactgggagtggagccacctgagcttccactggaagcccggccagttcgtgttcaagggcgacctggacatcaacgtgagaaccgccagcaagtacgacgactgctgcttcctgcacctgcccgacctgtgcatgaccctggacctgcagtggctgtgccacggcaacccccacgaccaccacagcgtgaccctgagagcccccgagttcctgcccgaggtgcccctgggccagctgcacgacagctacagagccttcagaagcgagaacctgaacctgagcatcaagatggacctgaccagacacagcggcaccatcagccagcccagaatcctgctgtacagcagcaccctgagatggatgcagaacttctgggccacctggaccagcgtgaccagacccatctgcagaggcaagctgttcaacaacctgaagcccagcaagaagaagctgggccagcactacaagcagctgagctacaccgccctgttcccccagctgcaggtgcactactgggccagcttcgcccagcagagaggcatccagatcgagtgcagccagggccacgtgttcaccagaggcacccagagactgatcccccaggccggcaccgtgatgagaagactgatcagcgactggagcgtgacccagatggtgagcgacctgagccaggtgaccgtgcacctgatggccagccccaccgaggagaacgccgaccactgcctggaccccctggtgaccaagacccacctgctgagcctgagcagcctgacctaccagagacacagcaacagaaccgccgaggaggagctgagcgccagagacggcgaccccaccttccacacccaccagctgcacctggtggacctgagaatcagctggaccaccaccaacagagacatcgccttcggcctgtacgacggctacaagaaggccgccgtgctgaagagaaacctgagcaccgaggccctgaagggcctgaagatcgacccccagatgcccgccaagaagcccaagagaggcgtgcccaccagcgccagcgccccccccagagtgaacacccccagcttcagcggccagcccgacaagggcagcagcggcggcgcctacatgctgcagaagctgatcgaggagaccgacagattcgtggtgttcaccgaggaggagagcggcatgagcgaccagctgtgcggcatcgccgcctgccagaccgacgacatctacaacagaaactgcctgatcgagctggtgaactgccagatggtgctgagaggcgccgagaccgagggctgcgtgatcgtgagcgccgccaaggcccagctgctgcagtgccagcaccaccccgcctggtacggcgacaccctgaagcagaagaccagctggacctgcctgctggacggcatgcagtacttcgccaccaccgagagcagccccaccgagcaggacggcagacagctgtggctggaggtgaagaacatcgaggagcacagacagagaagcctggacagcgtgcaggagctgatggagagcggccaggccgtgggcggcatggtgaccaccaccaccgactggaaccagcccgccgaggcccagcaggcccagcaggtgcagagaatcatcagcagatgcaactgcagaatgtactacatcagctacagccacgacatcgaccccgagctggccacccagatcaagccccccgaggtgctggagaaccaggagaaggaggacctgctgaagaagcaggagggcgccgtggacaccttcaccctgatccaccacgagctggagatcagcaccaaccccgcccagtacgccatgatcctggacatcgtgaacaacctgctgctgcacgtggagcccaagagaaaggagcacagcgagaagaagcagagagtgagattccagctggagatcagcagcaaccccgaggagcagagaagcagcatcctgcacctgcaggaggccgtgagacagcacgtggcccagatcagacagctggagaagcagatgtacagcatcatgaagagcctgcaggacgacagcaagaacgagaacctgctggacctgaaccagaagctgcagctgcagctgaaccaggagaaggccaacctgcagctggagagcgaggagctgaacatcctgatcagatgcttcaaggacttccagctgcagagagccaacaagatggagctgagaaagcagcaggaggacgtgagcgtggtgagaagaaccgagttctacttcgcccaggccagatggagactgaccgaggaggacggccagctgggcatcgccgagctggagctgcagagattcctgtacagcaaggtgaacaagagcgacgacaccgccgagcacctgctggagctgggctggttcaccatgaacaacctgctgcccaacgccgtgtacaaggtggtgctgagaccccagagcagctgccagagcggcagacagctggccctgagactgttcagcaaggtgagaccccccgtgggcggcatcagcgtgaaggagcacttcgaggtgaacgtggtgcccctgaccatccagctgacccaccagttcttccacagaatgatgggcttcttcttccccggcagaagcgtggaggacgacgaggtgggcgacgaggaggacaagagcaagctggtgaccaccggcatccccgtggtgaagcccagacagctgatcgccaccgacgacgccgtgcccctgggccccggcaagggcgtggcccagggcctgaccagaagcagcggcgtgagaagaagcttcagaaagagccccgagcaccccgtggacgacatcgacaagatgaaggagagagccgccatgaacaacagcttcatctacatcaagatcccccaggtgcccctgtgcgtgagctacaagggcgagaagaacagcgtggactggggcgacctgaacctggtgctgccctgcctggagtaccacaacaacacctggacctggctggacttcgccatggccgtgaagagagacagcagaaaggccctggtggcccaggtgatcaaggagaagctgagactgaagagcgccaccggcagcgaggtgagaggcaagctggagaccaagagcgacctgaacatgcagcagcaggaggaggaggagaaggccagactgctgatcggcctgagcgtgggcgacaagaaccccggcaagaagagcatcttcggcagaagaaagtag

SEQ ID NO: 181511 - DNA, 6708 bp, Artificial Sequence
  derived and/or modified sequence
atgcccctgttcttcagcgccctgctggtgctgctgctggtggccctgagcgccctgttcctgggcagatggctggtggtgagactggccaccaagtggtgccagagaaagctgcaggccgagctgaagatcggcagcttcagattcttctggatccagaacgtgagcctgaagttccagcagcaccagcagaccgtggagatcgacaacctgtggatcagcagcaagctgctgagccacgacctgccccactacgtggccctgtgcttcggcgaggtgagaatcagaaccgacctgcagaaggtgagcgacctgagcgcccccttcagccagagcgccggcgtggaccagaaggagctgagcttcagccccagcctgctgaagatcttctgccagctgttcagcatccacgtggacgccatcaacatcatggtgctgaaggtggacaccagcgagagcctgtggcacatccagatcagcagaagcagattcctgctggacagcgacggcaagagactgatctgcgaggtgagcctgtgcaagatcaacagcaaggtgctgaagagcggccagctggaggacacctgcctggtggagctgagcctggccctggacctgtgcctgaaggtgggcatcagcagcagacacctgaccgccatcaccgtggacgtgtggaccctgcacgccgagctgcacgagggcctgttccagagccagctgctgtgccagggccccagcctggccagcaagcccgtgccctgcagcgaggtgaccgagaacctggtggagcccaccctgcccggcctgttcctgctgcagcagctgcccgaccaggtgaaggtgaagatggagaacaccagcgtggtgctgagcatgaacagccagaagagacacctgacctggaccctgaagctgctgcagttcctgtaccacagagacgaggaccagctgcccctgagaagcttcaccgccaacagcgacatggcccagatgagcaccgagctgctgctggaggacggcctgctgctgagccagagcagacagagaatcgtgtgcctgaacagcctgaaggccagcgtgcaggtgaccaccatcgacctgagcgccagcctggtgctgaacacctgcatcatccactacagacaccaggagttcagccactggctgcacctgctggccctggagacccagggcagcagcagccccgtgctgaagcagagaaagaagagaaccttcccccagatcctggcccccatcatcttcagcaccagcatcagcaacgtgaacatcagcatccagctgggcgacaccccccccttcgccctgggcttcaacagcatcagcctggactaccagcacctgagaccccagagcatccaccagagaggcgtgctgaccgtggaccacctgtgctggagagtgggcagcgacagccacatccagagagccccccacccccccaacatgcacgtgtggggcgaggccctggtgctggacagcttcaccctgcagggcagctacaaccagcccctgggcctgagcagcacccagagcgacaccctgttcctggactgcaccatcagaggcctgcaggtggaggccagcgacacctgcgcccagtgcctgagcagaatcctgagcctgatgggcccccagagcggcaagagcgccgtgagcagacacagcagcttcggcgagagcgtgagcctgctgtggaaggtggacctgaaggtggaggacatgaacctgttcaccctgagcgccctggtgggcgccagcgaggtgagactggacaccctgaccatcctgggcagcgccgagaccagcaccgtgggcatccagggcctggtgctggccctggtgaagagcgtgaccgagaagatgcagccctgctgcaaggcccccgacatccccacccccgtgctgagcctgagcatgctgagcatcacctaccacagcagcatcagaagcctggaggtgcagtgcggcgccggcctgaccctgctgtggagcccccccgaccacatgtacctgtaccagcacgtgctggccaccctgcagtgcagagacctgctgagagccaccgtgttccccgagaccgtgcccagcctggccctggagaccagcggcaccaccagcgagctggagggcagagcccccgagcccctgccccccaagagactgctgaacctgaccctggaggtgagcaccgccaagctgaccgccttcgtggccgaggacaagttcatcaccctggccgccgagagcgtgagcctgagcagacacggcggcagcctgcaggcctactgccccgagctggccgccggcttcgacggcaacagcatcttcaacttcaaggaggtggaggtgcagctgctgcccgagctggaggagatgatcctgcacagaaaccccttccccgccctgcagaccctgagaaacagagtgtggctgctgagcttcggcagcgtgagcgtggagttcccctaccagtacgacttcagcagaaccctggacgaggccgtgggcgtgcagaagtggctgaagggcctgcaccagggcaccagagcctgggccagccccagccccgtgcccctgccccccgacctgctgctgaaggtggagcacttcagctgggtgttcctggacgacgtgttcgaggtgaagctgcacgacaactacgagctgatgaaggacgagagcaaggagagcgccaagagactgcagctgctggacgccaaggtggccgccctgagaaagcagcacggcgagctgctgcccgccagaaagatcgaggagctgtacgccagcctggagagaaagaacatcgagatctacatccagagaagcagaagactgtacggcaacacccccatgagaagagccctgctgacctggagcctggccggcctggagctggtggccctggccgacgccagcttccacggccccgagcacgtggtggagcaggtgcaggagctggaccccggcagccccttcccccccgagggcctggacctggtgatccagtggtgcagaatgctgaagtgcaacgtgaagagcttcctggtgagaatcagagactaccccagatacctgttcgagatcagagactggagactgatgggcagactggtgggcaccgagcagagcggccagccctgcagcagaagaagacagatcctgcacctgggcctgccctggggcaacgtggccgtggagagaaacatgccccccctgaagttctaccacgacttccacagcgagatcttccagtacaccgtggtgtggggcccctgctgggaccccgcctggaccctgatcggccagtgcgtggacctgctgaccaagcccagcgccgaccccagcccccccctgccctggtgggacaagagcagactgctgttccacggcgactggcacatggacatcgagcaggccaacctgcaccagctggccaccgaggacccctacaacaccaccgagaacatgcactgggagtggagccacctgagcttccactggaagcccggccagttcgtgttcaagggcgacctggacatcaacgtgagaaccgccagcaagtacgacgactgctgcttcctgcacctgcccgacctgtgcatgaccctggacctgcagtggctgtgccacggcaacccccacgaccaccacagcgtgaccctgagagcccccgagttcctgcccgaggtgcccctgggccagctgcacgacagctacagagccttcagaagcgagaacctgaacctgagcatcaagatggacctgaccagacacagcggcaccatcagccagcccagaatcctgctgtacagcagcaccctgagatggatgcagaacttctgggccacctggaccagcgtgaccagacccatctgcagaggcaagctgttcaacaacctgaagcccagcaagaagaagctgggccagcactacaagcagctgagctacaccgccctgttcccccagctgcaggtgcactactgggccagcttcgcccagcagagaggcatccagatcgagtgcagccagggccacgtgttcaccagaggcacccagagactgatcccccaggccggcaccgtgatgagaagactgatcagcgactggagcgtgacccagatggtgagcgacctgagccaggtgaccgtgcacctgatggccagccccaccgaggagaacgccgaccactgcctggaccccctggtgaccaagacccacctgctgagcctgagcagcctgacctaccagagacacagcaacagaaccgccgaggaggagctgagcgccagagacggcgaccccaccttccacacccaccagctgcacctggtggacctgagaatcagctggaccaccaccaacagagacatcgccttcggcctgtacgacggctacaagaaggccgccgtgctgaagagaaacctgagcaccgaggccctgaagggcctgaagatcgacccccagatgcccgccaagaagcccaagagaggcgtgcccaccagcgccagcgccccccccagagtgaacacccccagcttcagcggccagcccgacaagggcagcagcggcggcgcctacatgctgcagaagctgatcgaggagaccgacagattcgtggtgttcaccgaggaggagagcggcatgagcgaccagctgtgcggcatcgccgcctgccagaccgacgacatctacaacagaaactgcctgatcgagctggtgaactgccagatggtgctgagaggcgccgagaccgagggctgcgtgatcgtgagcgccgccaaggcccagctgctgcagtgccagcaccaccccgcctggtacggcgacaccctgaagcagaagaccagctggacctgcctgctggacggcatgcagtacttcgccaccaccgagagcagccccaccgagcaggacggcagacagctgtggctggaggtgaagaacatcgaggagcacagacagagaagcctggacagcgtgcaggagctgatggagagcggccaggccgtgggcggcatggtgaccaccaccaccgactggaaccagcccgccgaggcccagcaggcccagcaggtgcagagaatcatcagcagatgcaactgcagaatgtactacatcagctacagccacgacatcgaccccgagctggccacccagatcaagccccccgaggtgctggagaaccaggagaaggaggacctgctgaagaagcaggagggcgccgtggacaccttcaccctgatccaccacgagctggagatcagcaccaaccccgcccagtacgccatgatcctggacatcgtgaacaacctgctgctgcacgtggagcccaagagaaaggagcacagcgagaagaagcagagagtgagattccagctggagatcagcagcaaccccgaggagcagagaagcagcatcctgcacctgcaggaggccgtgagacagcacgtggcccagatcagacagctggagaagcagatgtacagcatcatgaagagcctgcaggacgacagcaagaacgagaacctgctggacctgaaccagaagctgcagctgcagctgaaccaggagaaggccaacctgcagctggagagcgaggagctgaacatcctgatcagatgcttcaaggacttccagctgcagagagccaacaagatggagctgagaaagcagcaggaggacgtgagcgtggtgagaagaaccgagttctacttcgcccaggccagatggagactgaccgaggaggacggccagctgggcatcgccgagctggagctgcagagattcctgtacagcaaggtgaacaagagcgacgacaccgccgagcacctgctggagctgggctggttcaccatgaacaacctgctgcccaacgccgtgtacaaggccatcctgagaccccagagcagctgccagagcggcagacagctggccctgagactgttcagcaaggtgagaccccccgtgggcggcatcagcgtgaaggagcacttcgaggtgaacgtggtgcccctgaccatccagctgacccaccagttcttccacagaatgatgggcttcttcttccccggcagaagcgtggaggacgacgaggtgggcgacgaggaggacaagagcaagctggtgaccaccggcatccccgtggtgaagcccagacagctgatcgccaccgacgacgccgtgcccctgggccccggcaagggcgtggcccagggcctgaccagaagcagcggcgtgagaagaagcttcagaaagagccccgagcaccccgtggacgacatcgacaagatgaaggagagagccgccatgaacaacagcttcatctacatcaagatcccccaggtgcccctgtgcgtgagctacaagggcgagaagaacagcgtggactggggcgacctgaacctggtgctgccctgcctggagtaccacaacaacacctggacctggctggacttcgccatggccgtgaagagagacagcagaaaggccctggtggcccaggtgatcaaggagaagctgagactgaagagcgccaccggcagcgaggtgagaggcaagctggagaccaagagcgacctgaacatgcagcagcaggaggaggaggagaaggccagactgctgatcggcctgagcgtgggcgacaagaaccccggcaagaagagcatcttcggcagaagaaagtag

SEQ ID NO: 181512 - DNA, 6279 bp, Artificial Sequence
  derived and/or modified sequence
atggtgctgaaggtggacaccagcgagagcctgtggcacatccagatcagcagaagcagattcctgctggacagcgacggcaagagactgatctgcgaggtgagcctgtgcaagatcaacagcaaggtgctgaagagcggccagctggaggacacctgcctggtggagctgagcctggccctggacctgtgcctgaaggtgggcatcagcagcagacacctgaccgccatcaccgtggacgtgtggaccctgcacgccgagctgcacgagggcctgttccagagccagctgctgtgccagggccccagcctggccagcaagcccgtgccctgcagcgaggtgaccgagaacctggtggagcccaccctgcccggcctgttcctgctgcagcagctgcccgaccaggtgaaggtgaagatggagaacaccagcgtggtgctgagcatgaacagccagaagagacacctgacctggaccctgaagctgctgcagttcctgtaccacagagacgaggaccagctgcccctgagaagcttcaccgccaacagcgacatggcccagatgagcaccgagctgctgctggaggacggcctgctgctgagccagagcagacagagaatcgtgtgcctgaacagcctgaaggccagcgtgcaggtgaccaccatcgacctgagcgccagcctggtgctgaacacctgcatcatccactacagacaccaggagttcagccactggctgcacctgctggccctggagacccagggcagcagcagccccgtgctgaagcagagaaagaagagaaccttcccccagatcctggcccccatcatcttcagcaccagcatcagcaacgtgaacatcagcatccagctgggcgacaccccccccttcgccctgggcttcaacagcatcagcctggactaccagcacctgagaccccagagcatccaccagagaggcgtgctgaccgtggaccacctgtgctggagagtgggcagcgacagccacatccagagagccccccacccccccaacatgcacgtgtggggcgaggccctggtgctggacagcttcaccctgcagggcagctacaaccagcccctgggcctgagcagcacccagagcgacaccctgttcctggactgcaccatcagaggcctgcaggtggaggccagcgacacctgcgcccagtgcctgagcagaatcctgagcctgatgggcccccagagcggcaagagcgccgtgagcagacacagcagcttcggcgagagcgtgagcctgctgtggaaggtggacctgaaggtggaggacatgaacctgttcaccctgagcgccctggtgggcgccagcgaggtgagactggacaccctgaccatcctgggcagcgccgagaccagcaccgtgggcatccagggcctggtgctggccctggtgaagagcgtgaccgagaagatgcagccctgctgcaaggcccccgacatccccacccccgtgctgagcctgagcatgctgagcatcacctaccacagcagcatcagaagcctggaggtgcagtgcggcgccggcctgaccctgctgtggagcccccccgaccacatgtacctgtaccagcacgtgctggccaccctgcagtgcagagacctgctgagagccaccgtgttccccgagaccgtgcccagcctggccctggagaccagcggcaccaccagcgagctggagggcagagcccccgagcccctgccccccaagagactgctgaacctgaccctggaggtgagcaccgccaagctgaccgccttcgtggccgaggacaagttcatcaccctggccgccgagagcgtgagcctgagcagacacggcggcagcctgcaggcctactgccccgagctggccgccggcttcgacggcaacagcatcttcaacttcaaggaggtggaggtgcagctgctgcccgagctggaggagatgatcctgcacagaaaccccttccccgccctgcagaccctgagaaacagagtgtggctgctgagcttcggcagcgtgagcgtggagttcccctaccagtacgacttcagcagaaccctggacgaggccgtgggcgtgcagaagtggctgaagggcctgcaccagggcaccagagcctgggccagccccagccccgtgcccctgccccccgacctgctgctgaaggtggagcacttcagctgggtgttcctggacgacgtgttcgaggtgaagctgcacgacaactacgagctgatgaaggacgagagcaaggagagcgccaagagactgcagctgctggacgccaaggtggccgccctgagaaagcagcacggcgagctgctgcccgccagaaagatcgaggagctgtacgccagcctggagagaaagaacatcgagatctacatccagagaagcagaagactgtacggcaacacccccatgagaagagccctgctgacctggagcctggccggcctggagctggtggccctggccgacgccagcttccacggccccgagcacgtggtggagcaggtgcaggagctggaccccggcagccccttcccccccgagggcctggacctggtgatccagtggtgcagaatgctgaagtgcaacgtgaagagcttcctggtgagaatcagagactaccccagatacctgttcgagatcagagactggagactgatgggcagactggtgggcaccgagcagagcggccagccctgcagcagaagaagacagatcctgcacctgggcctgccctggggcaacgtggccgtggagagaaacatgccccccctgaagttctaccacgacttccacagcgagatcttccagtacaccgtggtgtggggcccctgctgggaccccgcctggaccctgatcggccagtgcgtggacctgctgaccaagcccagcgccgaccccagcccccccctgccctggtgggacaagagcagactgctgttccacggcgactggcacatggacatcgagcaggccaacctgcaccagctggccaccgaggacccctacaacaccaccgagaacatgcactgggagtggagccacctgagcttccactggaagcccggccagttcgtgttcaagggcgacctggacatcaacgtgagaaccgccagcaagtacgacgactgctgcttcctgcacctgcccgacctgtgcatgaccctggacctgcagtggctgtgccacggcaacccccacgaccaccacagcgtgaccctgagagcccccgagttcctgcccgaggtgcccctgggccagctgcacgacagctacagagccttcagaagcgagaacctgaacctgagcatcaagatggacctgaccagacacagcggcaccatcagccagcccagaatcctgctgtacagcagcaccctgagatggatgcagaacttctgggccacctggaccagcgtgaccagacccatctgcagaggcaagctgttcaacaacctgaagcccagcaagaagaagctgggccagcactacaagcagctgagctacaccgccctgttcccccagctgcaggtgcactactgggccagcttcgcccagcagagaggcatccagatcgagtgcagccagggccacgtgttcaccagaggcacccagagactgatcccccaggccggcaccgtgatgagaagactgatcagcgactggagcgtgacccagatggtgagcgacctgagccaggtgaccgtgcacctgatggccagccccaccgaggagaacgccgaccactgcctggaccccctggtgaccaagacccacctgctgagcctgagcagcctgacctaccagagacacagcaacagaaccgccgaggaggagctgagcgccagagacggcgaccccaccttccacacccaccagctgcacctggtggacctgagaatcagctggaccaccaccaacagagacatcgccttcggcctgtacgacggctacaagaaggccgccgtgctgaagagaaacctgagcaccgaggccctgaagggcctgaagatcgacccccagatgcccgccaagaagcccaagagaggcgtgcccaccagcgccagcgccccccccagagtgaacacccccagcttcagcggccagcccgacaagggcagcagcggcggcgcctacatgctgcagaagctgatcgaggagaccgacagattcgtggtgttcaccgaggaggagagcggcatgagcgaccagctgtgcggcatcgccgcctgccagaccgacgacatctacaacagaaactgcctgatcgagctggtgaactgccagatggtgctgagaggcgccgagaccgagggctgcgtgatcgtgagcgccgccaaggcccagctgctgcagtgccagcaccaccccgcctggtacggcgacaccctgaagcagaagaccagctggacctgcctgctggacggcatgcagtacttcgccaccaccgagagcagccccaccgagcaggacggcagacagctgtggctggaggtgaagaacatcgaggagcacagacagagaagcctggacagcgtgcaggagctgatggagagcggccaggccgtgggcggcatggtgaccaccaccaccgactggaaccagcccgccgaggcccagcaggcccagcaggtgcagagaatcatcagcagatgcaactgcagaatgtactacatcagctacagccacgacatcgaccccgagctggccacccagatcaagccccccgaggtgctggagaaccaggagaaggaggacctgctgaagaagcaggagggcgccgtggacaccttcaccctgatccaccacgagctggagatcagcaccaaccccgcccagtacgccatgatcctggacatcgtgaacaacctgctgctgcacgtggagcccaagagaaaggagcacagcgagaagaagcagagagtgagattccagctggagatcagcagcaaccccgaggagcagagaagcagcatcctgcacctgcaggaggccgtgagacagcacgtggcccagatcagacagctggagaagcagatgtacagcatcatgaagagcctgcaggacgacagcaagaacgagaacctgctggacctgaaccagaagctgcagctgcagctgaaccaggagaaggccaacctgcagctggagagcgaggagctgaacatcctgatcagatgcttcaaggacttccagctgcagagagccaacaagatggagctgagaaagcagcaggaggacgtgagcgtggtgagaagaaccgagttctacttcgcccaggccagatggagactgaccgaggaggacggccagctgggcatcgccgagctggagctgcagagattcctgtacagcaaggtgaacaagagcgacgacaccgccgagcacctgctggagctgggctggttcaccatgaacaacctgctgcccaacgccgtgtacaaggtggtgctgagaccccagagcagctgccagagcggcagacagctggccctgagactgttcagcaaggtgagaccccccgtgggcggcatcagcgtgaaggagcacttcgaggtgaacgtggtgcccctgaccatccagctgacccaccagttcttccacagaatgatgggcttcttcttccccggcagaagcgtggaggacgacgaggtgggcgacgaggaggacaagagcaagctggtgaccaccggcatccccgtggtgaagcccagacagctgatcgccaccgacgacgccgtgcccctgggccccggcaagggcgtggcccagggcctgaccagaagcagcggcgtgagaagaagcttcagaaagagccccgagcaccccgtggacgacatcgacaagatgaaggagagagccgccatgaacaacagcttcatctacatcaagatcccccaggtgcccctgtgcgtgagctacaagggcgagaagaacagcgtggactggggcgacctgaacctggtgctgccctgcctggagtaccacaacaacacctggacctggctggacttcgccatggccgtgaagagagacagcagaaaggccctggtggcccaggtgatcaaggagaagctgagactgaagagcgccaccggcagcgaggtgagaggcaagctggagaccaagagcgacctgaacatgcagcagcaggaggaggaggagaaggccagactgctgatcggcctgagcgtgggcgacaagaaccccggcaagaagagcatcttcggcagaagaaagtag

SEQ ID NO: 181513 - DNA, 6708 bp, Artificial Sequence
  derived and/or modified sequence
atgcctcttttctttagtgcactcctggtgctgttgttggtggctctctccgccctcttcctgggcagatggctcgtggtgagactggctactaaatggtgccaacgcaagctccaagccgaattaaaaatcggatctttcaggttcttctggattcaaaatgtgtccctgaaattccagcagcaccagcagactgtcgagatcgataacctgtggattagctcaaaattgcttagtcacgatctccctcactacgtagccttatgctttggtgaggtgaggattaggacagacctgcagaaagtcagcgacttgagcgcccccttctcgcagtctgccggagtggatcagaaggaactgtcttttagcccatcactgttgaagatcttttgtcaactgttctctatccacgtagatgcaatcaatataatggtgctcaaggtggacacttctgaaagtctgtggcatatccagattagccgctcgaggtttctactcgatagtgacggaaagaggctcatttgtgaggtgtctctgtgcaagatcaattccaaggttttgaaatctggccaactggaagacacctgtctggtggaactgtctctggcgctggatctatgcctgaaggtggggatatcaagccggcacttaacggccatcaccgtggatgtgtggacccttcacgccgagctgcacgagggcctgtttcagtcgcagctgctgtgccaggggcctagtcttgcctctaagcctgtaccatgcagcgaagtgaccgaaaacctggtggagcccaccctgccgggtctgtttctcctgcagcagcttcccgatcaagtcaaagtaaaaatggagaatacgtcggtggtgctgtctatgaatagccagaagaggcatctgacttggaccctgaagctcctacagtttttataccatagagacgaagatcagttacccctgagatccttcacagctaactcagacatggcccagatgagtaccgagctcctgctcgaggatggcctgctgttgagtcagtctagacaacggatcgtgtgtctgaattccctgaaggcaagtgtgcaggtgacgactatcgacctgagcgcatccctcgtcctcaatacctgcatcattcattacagacatcaggaattttcccactggcttcatctcctcgctctcgagacacaaggcagctcgtcaccagtcctgaaacagcgaaaaaaaagaacgtttccacaaatcttggctcccattatattctcaacctccatctcgaatgttaacatcagtatccaacttggcgacaccccccccttcgcattgggcttcaattctatttccctggactatcagcatctcagaccccagtccatccatcaaagaggcgtacttactgtagaccatctctgttggcgggtgggatctgactcacacatccagcgtgctccccatccgcctaatatgcatgtctggggggaggctctagtcctcgactcatttacccttcagggtagctataaccaacctctcggactgtcttccacacagtcagatactctcttcctggattgcactattaggggcttgcaggttgaagcctctgatacctgtgctcagtgcctctcaagaatcttaagcctcatgggccctcagtccggcaagagtgccgtcagtagacattcatccttcggagagagcgtgtcattgttgtggaaagtcgacttaaaggttgaagacatgaacttatttaccctctccgctctcgtaggtgcatctgaggtacgtctggataccctgacaattctgggctctgccgagacgtctactgtcggcatccagggtctggtgctggcactggtgaagtccgtcacggaaaagatgcagccctgctgcaaagcccccgatattcctacaccagtgctcagcctcagcatgttgagcataacttatcacagttccatccgcagtctggaggttcagtgcggagctggactcaccctgctgtggtccccgcctgatcatatgtacctgtatcagcacgtcctcgcaacgctccagtgtagagacctcctgagagccacagtgtttcctgagaccgtcccgtccctcgctttggaaactagtgggacaaccagcgagttggagggtcgtgcaccagaacctttgcctccgaagcgccttctcaatttgacgcttgaggtgagtacggctaagttgacagcctttgttgcagaggataagtttatcactctggccgccgagagtgtgagcctgtcccggcatggcggctccctccaggcctactgtcctgagttagctgctggctttgatggcaacagcattttcaatttcaaggaggtggaggtccaactcctgccagaacttgaagaaatgatcttacatagaaacccatttccggctctccagacactcagaaatcgcgtatggctgcttagctttggctcagtcagcgtggagttcccctatcagtacgacttttctcggacccttgacgaggccgtcggggtacagaagtggttaaagggtctgcatcaaggtacaagggcctgggccagcccatctccggtaccactgcctcccgatctgctgttgaaggtggagcacttcagctgggtgtttctcgacgacgtattcgaagtgaagctgcatgacaattacgaactgatgaaagatgagtcaaaggagtcagcaaagcgtctgcagctgttggacgcaaaagtagctgctctacggaagcagcacggagagctcctacccgcccgaaaaattgaggaactttatgcctccctggaaagaaagaatatcgaaatttacattcagcggtctaggcgcctgtatggaaatacacccatgcgacgggccttactgacctggagtctggccggcctggagctggtcgcccttgccgatgcctcctttcatgggccagagcacgttgtggagcaagtccaggagttagaccccggctccccattcccccccgaaggtttggatctggtgatccagtggtgccgcatgctgaagtgcaatgtaaagtcgttcctcgtacggataagagactatccccgctatttgttcgagatacgcgactggcgactgatgggacggctcgtaggcaccgagcaaagcggtcagccatgctctagacggcggcaaattctgcacctggggctgccttggggcaatgtcgcagtcgaacgaaatatgccccccttaaagttctatcatgactttcattccgagatcttccaatataccgtggtgtggggcccctgttgggaccccgcatggacactgatcggccagtgcgtggatcttttgacaaagcccagtgcagatcctagcccgcccttgccctggtgggataaaagtcgcttgttattccacggcgattggcatatggatatcgaacaagccaatctccaccagcttgctaccgaagatccttataacaccaccgagaatatgcattgggagtggtcccacctgagcttccattggaagcctggacagtttgtgttcaagggagatttagatatcaacgtgagaaccgcttccaaatacgacgactgttgcttcttgcatcttcctgacctttgcatgacactcgatttgcaatggctgtgtcacggaaacccacatgatcaccatagcgtaactctgagagcacccgagtttctgcctgaggttccgttaggacaactgcatgacagctaccgggcatttcgaagtgagaacctgaaccttagcataaaaatggatttaaccagacactctgggactatcagccaacctcggatcctcctgtatagttctaccctgcgctggatgcagaatttttgggcgacttggaccagcgtgacccggcccatctgccggggaaaactgttcaataacctgaaaccaagcaagaagaagctggggcagcattacaagcaactgtcatacaccgcactctttccgcagctccaggtccactattgggcttccttcgcacagcagagagggatccagatagagtgcagccaggggcacgtgttcacacgcgggactcagagactgattcctcaagccggcacggtgatgaggcgcttgatctccgattggagcgtgacacagatggtttccgacctaagccaggttactgttcatctcatggccagcccaactgaggaaaatgccgatcattgcctggatccgttggtgaccaagacccacctgctctcacttagcagcttaacttaccagcggcactccaacagaacagccgaagaggagctctctgcgagagatggtgatcctacctttcatacacatcagctgcacctggtggaccttcggatctcttggacaaccactaaccgagatattgccttcggactgtatgacgggtataagaaggccgctgttctcaagaggaatctctcaacggaagccttaaagggcctgaaaattgatccccagatgccagctaagaagcccaagagaggtgttcctacctctgcgagcgctccacctagagtcaacactccatccttttccggacagcctgacaaggggtcaagcggtggagcttacatgctccaaaaactgattgaggagacagatagattcgtagtcttcacagaggaagagtctgggatgtcagatcagttatgtggcattgccgcgtgccagaccgacgatatttataatagaaactgtttaatagaattggtcaactgccaaatggtcctgaggggcgccgagacggaagggtgcgtgatcgtatcagcagcgaaggctcaactgctgcagtgtcagcaccatcctgcctggtacggggataccctgaaacaaaaaacctcctggacctgcctcctcgacggcatgcagtatttcgccaccaccgagtcctctcctactgaacaggacggccgacagctgtggttggaggtgaaaaatattgaagaacacaggcaacgatcactggattccgtgcaagagctgatggagtccggtcaggccgtcgggggcatggtgactacaactaccgattggaaccagcccgccgaggctcagcaagctcaacaagtccagcggattatttctcgctgcaactgtagaatgtattacatcagttacagtcacgatattgaccctgagttggcaacacaaatcaagcctccggaggtgctggagaaccaagaaaaagaggatctcctgaaaaaacaagagggagccgttgataccttcaccctgatccaccacgagctggaaatctccactaatccagctcagtatgctatgattctggatatcgtaaataatttattgctgcatgtcgaacctaagaggaaggagcatagcgaaaagaagcagagggtgagatttcagttggaaatctccagtaatcctgaagagcagcggagctctatcctgcacctgcaggaggcagtgcggcaacatgttgcccagatacggcagctcgaaaagcagatgtatagtatcatgaagtccctccaggacgattccaagaatgagaatctcctggaccttaaccagaagctccagcttcagctgaaccaggagaaggccaatcttcaactggaaagcgaagagctgaacattcttattcggtgcttcaaagatttccaattacaacgggccaacaagatggaactcagaaagcagcaagaagacgtgtctgttgtgaggcgcaccgagttctattttgcccaggcacggtggcgtttgactgaggaggacggacagctcggtatagctgaattggaattgcagaggttcttgtacagtaaggttaataagtctgacgacacagctgagcaccttctggagctggggtggttcaccatgaataacctgctgccaaacgcagtttataaggtagttctgcgaccacagagttcctgtcagtccggtcggcagctggcactcagattattctccaaagttaggcctcctgttgggggtatttccgtcaaggagcactttgaagtcaacgttgttcctctcaccatacaacttactcatcaattctttcatcgcatgatgggcttcttttttccaggccggtccgtggaggatgatgaggtgggggatgaggaagacaagtcaaaactcgtgaccactgggataccagtggtgaaaccaagacagctcattgccacggacgatgccgtgccactagggcctggaaaaggggtggcccaggggctgactcgttcaagcggagttcgacggagcttccggaaatcccctgaacacccagtggacgacattgataaaatgaaggaacgcgccgccatgaataacagcttcatctatattaaaatcccgcaggtgcctctctgtgtcagttataagggcgagaaaaactcagtggattggggcgatcttaatctagtgttgccttgtcttgaataccataacaatacgtggacttggctggactttgctatggccgtgaagcgtgactcccgtaaggccctggtcgcacaggtgataaaggagaagcttcggctgaagtctgcaaccgggtccgaggtgcgtggcaagctggagaccaaaagcgacctaaatatgcagcagcaggaggaggaggaaaaagccaggttacttatcggactgagcgtaggggacaaaaaccctggcaagaaaagtatctttgggcgaagaaaatag

SEQ ID NO: 181514 - DNA, 6618 bp, Artificial Sequence
  derived and/or modified sequence
atgcctttgtttttctcagcgttgctggtgctgctactcgtggcactctccgctctgttcttgggccgttggttggtcgtccggctggccacaaagtggtgtcagcgtaagctccaggccgaactgaaaatcgggagtttcaggttcttctggattcagaacgtatctctgaagtttcagcagcatcagcagacagtggagatagataatctgtggatctctagtaaactcttgtcccatgatctccctcactacgtagccctctgtttcggagaggttcgcataagaaccgatctgcaaaaggttagcgatctgtcagccccctttagccagagcgcaggcgtcgaccaaaaagagctgagcttttccccctcattgctaaagatattctgccagctgttttccattcacgtggacgccatcaatatcatggtcctgaaagttgacaccagcgagagcctctggcatattcagatttcgagatcccggttcctgttggactctgacggaaaaagactgatttgcgaggtgtcactatgtaagattaattctaaagtgctgaagagcggtcagctcgaggacacctgtttggttgagttaagcctcgcgttagatctgtgccttaaagttggaataagcagccgccacttaaccgccatcacagtggacgtctggactctgcatgctgaactgcacgaaggcctgttccagtcacagcttctgtgtcagggcccgtcgctggcctccaaacccgtgccttgctctgaggtgacagagaaccttgtagaaccgaccctgccggggttgtttttactccagcagctccctgatcaggtgaaggtgaagatggaaaatacatccgtcgtactatccatgaattctcaaaagaggcacctgacatggaccctgaagctactgcagttcctttaccaccgcgatgaggatcagctgccccttcgcagcttcacagccaattctgacatggcccagatgagcaccgaactgctgctggaggacggactgctcctctcccagtcacgacagagaatcgtttgtcttaactccctgaaggcctccgtccaagtgacaacaatagacctgtctgctagtctggtgcttaatacgtgtatcattcactacagacatcaagagttctcccattggctccatttgctcgctcttgagacgcagggttcctcttcccccgtcttaaagcaaagaaaaaaacggactttcccgcaaatccttgcccccatcatttttagtacgtctatctcgaatgtcaatatctcaatccagctgggggatacaccaccctttgctttgggattcaactcaatttctctggactatcagcacctgcgtccacagtccatccatcagcggggcgtgctgactgtggaccatctgtgctggcgcgttggaagtgacagtcacatacaacgggccccacatccacccaacatgcatgtgtggggagaagctctggtgctggattcatttacattgcaggggtcttacaaccagcctctagggctatcttcaacgcagtccgacaccctgttcttagactgcacaatccggggcttgcaggtggaggcatccgacacgtgtgctcagtgtctcagtcggatcttgtccctcatgggtccacagtccggtaagtccgccgtgtcccgccacagctcattcggagaatcggtgtctttattgtggaaagtcgacctgaaggtggaagacatgaaccttttcacactcagcgcactggttggggcgagtgaggtgcgcctggacaccctcacaattttgggatctgcagagacttctactgtgggcattcagggcctcgtccttgccctcgtcaaatccgtcaccgaaaagatgcagccctgctgtaaggcccccgatatccctacgccggtgctatcactgagcatgttgtccataacttaccattcctccatcaggtccctggaggtacagtgcggcgcaggactgacactattgtggtctcctcctgatcacatgtatctgtatcaacacgtgcttgccacattacagtgtcgggacctgttgagggcgactgtatttcccgaaacagttccgtcattggccttggagacctctggaaccacctccgagctggagggccgggcacctgagcctctcccgcctaagagactactcaatttgaccctggaagtttccacggccaagctcactgcctttgttgccgaagataagttcataacactcgcagccgaatcagtgtctcttagccgacacggcggtagtctccaagcttattgtccagaactggcagctggcttcgacggcaactctattttcaacttcaaagaggtcgaggtgcagctgctgccagaggtggaattcccctatcagtacgatttcagtaggactttagacgaggctgtcggtgttcagaaatggcttaagggactgcaccagggcacgcgggcgtgggccagccccagtcccgtgcctcttcccccagacctacttttgaaagtggaacatttctcctgggtgtttttggacgacgtcttcgaggtgaagttgcatgacaactacgagctcatgaaggatgaatccaaggagtcggcaaagcggctccagttactcgacgctaaggtcgcagcccttaggaagcagcacggggagctgctgcctgcgcgcaagatcgaggaactttatgccagtcttgagcggaaaaacattgaaatctatatccaacgctcccgcaggctctatgggaacacacctatgaggcgagcgctactgacctggtctctggctgggctcgaattggttgctctggctgacgcctccttccatggccctgagcacgtggtcgagcaggttcaagaactggaccccggctcaccgtttcccccagagggcctcgatctggtcatccagtggtgccggatgctcaaatgtaatgtaaaatctttcttagtgcggattcgggattatccacgctacctttttgagatcagagactggagactcatgggacggctggttggaaccgagcagagcggccaaccctgttcccggcgaagacagattctgcaccttgggctcccctgggggaacgtggccgttgagcggaatatgccacctcttaagttctaccacgattttcactctgaaattttccagtacaccgtcgtatggggaccatgctgggatccagcctggacactgattgggcaatgcgtggacctacttactaaaccaagtgcggatccaagccctcctttgccatggtgggacaagtccagactgctttttcatggtgattggcatatggacattgagcaggctaacttacatcagctggctaccgaggatccctataatactaccgaaaacatgcattgggaatggtctcatttgtctttccattggaagccgggccagtttgttttcaagggagacctagatatcaacgtacgcaccgcaagtaaatacgacgactgttgcttcctgcacctgcccgatctctgtatgactctggacctccaatggctgtgccatggcaatcctcatgaccaccactctgtgacactgcgggcaccggagttcctccctgaggtgcccctcgggcagcttcacgattcttacagggcatttcgttcggagaacttgaacctttccatcaagatggatttaacaaggcactctggcactatcagtcagccccgaatcctcttgtactccagcacccttaggtggatgcagaacttttgggctacttggacctcagtgactcgtcccatctgccgcggcaagctgtttaacaatcttaagccatccaaaaaaaaactgggtcaacattataagcagctgtcctacacagctctgtttcctcagcttcaggtgcattattgggccagttttgcacaacaacgtggcatccagattgagtgttctcagggccatgtgttcactcgaggcacccagcgactgatcccgcaggctggtaccgtcatgagacgattaattagtgactggtctgttactcaaatggtctcggacctgagccaggtgaccgtgcatctcatggctagtccgacagaggagaatgctgatcattgtctggatccgctggtgactaagacacacttactgtccctgtcttccttgacataccagcgccacagtaatagaacagcagaagaggaattatccgctagggatggagatcctacgtttcacactcatcaacttcatcttgtagatctgcgcattagttggactaccacaaaccgcgacatcgcatttggcttatacgacggctataagaaagccgcagttctaaaaaggaatctgtctactgaggctctgaaagggctgaagatcgatccacagatgcccgccaagaagcccaaaagaggagtgccgaccagcgcctccgccccgcctcgcgttaacaccccatccttttcaggccagcctgacaaggggtcaagtggaggtgcatacatgttacagaaattgatcgaagagaccgatcggtttgtcgtattcacagaagaggagagtggcatgtccgatcagctgtgtggcatcgccgcatgtcaaacagacgacatttacaatcggaactgcctaatagagttggtcaattgccagatggttctgaggggcgcagagacagagggatgtgtgatcgtcagtgccgccaaagcccaactgttacagtgccagcaccatccggcatggtacggtgacacgctcaaacaaaagacgtcctggacatgcctgttggatggcatgcagtactttgcaaccacggagagttctcccacagagcaagacggccggcaactatggctcgaggtgaagaacattgaggaacaccggcaacgcagccttgactcagtgcaggagctcatggagtcagggcaggcagttggcggcatggttacaacaacaaccgattggaaccagccagccgaggcccagcaagctcagcaagttcagcgcattatctcccggtgtaattgtcgcatgtactatatttcctacagccacgacatcgaccccgagctcgccacccagattaaaccccctgaagttctggagaaccaggaaaaagaggacctcctgaagaaacaggagggcgcagtagacacgtttaccctgattcaccacgaattagaaatttccaccaacccagcacagtacgcgatgatcctggacatcgtgaacaatctgctgcttcatgtggaaccaaaacggaaagaacacagcgagaagaaacagagggtgagattccaactggaaatttccagcaatcccgaggagcagcgctcttcaatattacacttacaggaggcggtcagacagcatgttgcccagattaggcagttggagaagcagatgtacagtattatgaagagcctacaggacgatagtaaaaatgaaaacctactcgacctaaatcaaaagctgcagctgcagcttaaccaagaaaaggcaaacctgcagctggagtctgaggaattaaacatattaattaggtgctttaaagacttccagttacagagagccaacaaaatggagcttcggaaacaacaggaagatgtgagcgtcgttcgcaggacagagttctattttgcccaggcaaggtggaggctgaccgaggaggacgggcagctcggaatcgcggagctggagctgcagcggttcttgtatagcaaagtcaataagtccgatgacaccgccgaacacctcctcgagctcggatggttcaccatgaataacctgctccccaacgcggtctataaagtggtattaaggccacagtcctcatgtcagagtggccgtcagctcgccctcagattgtttagcaaagttcgtcccccagtgggcgggatatctgtaaaagagcatttcgaggtaaatgtcgtgccgttgaccatccagctgacccaccagttcttccacaggatgatggggtttttctttccaggtcggtcggtggaggatgatgaggtcggcgatgaggaggataagtccaaactcgtcacgacagggatcccggtcgtgaaaccccgccagttgatagctaccgatgacgccgtgcccctggggcccgggaaaggtgtggcccagggactaactcgtagtagcggtgtgcgacggtcttttcgtaagtctccagagcaccccgtggatgacattgacaagatgaaggaacgagcagccatgaacaatagctttatttatattaagatcccccaggttccgttgtgcgtgtcatacaaaggcgaaaagaatagcgtcgattggggcgacctgaacctagtcctgccctgcctggagtatcataacaacacatggacatggctggacttcgcaatggccgtaaagcgagactctcgtaaagctttggttgcccaagtgattaaggaaaagctgaggttaaagagtgccaccggctcagaagtacggggtaagctagaaactaagagtgatctaaacatgcagcagcaggaggaagaggagaaggccagacttctcataggcctaagtgtcggagacaaaaatccagggaagaagtcaatctttgggcgaagaaagtag

SEQ ID NO: 181515 - DNA, 6708 bp, Artificial Sequence
  derived and/or modified sequence
atgccactgttctttagcgctttactagtgctgctgctggtcgcactttctgctttgtttctgggtcgatggctcgtggtacgcctcgcgacaaagtggtgccagaggaagcttcaggctgagctgaaaattggttcgtttaggttcttttggatccagaacgtatccctcaaatttcagcagcatcaacagaccgttgaaatcgacaatctgtggatttcctcaaagctcctgtcccatgacctgcctcattacgtggcactgtgcttcggcgaggtgcgcatcagaacggacttacagaaggtgtccgatttgtccgcaccttttagccagagcgcaggtgtggatcagaaagaactgtcattcagcccatcgctgctgaagatcttctgccagcttttctctattcacgttgacgccatcaatattatggttcttaaggtcgataccagcgaatcattgtggcacatccagattagtcggtcccggtttctcctcgattctgatgggaaaagacttatctgtgaggtaagcctgtgcaagatcaacagcaaggttcttaaatcaggtcaactggaggacacctgtctcgtagaactgtcacttgccctggatttatgcctgaaggtcggcatctctagcagacacctgacagctataacggtggacgtgtggactctgcacgcagaattgcacgaggggctttttcagagccagctactgtgccaggggccttctctagcctcgaagcccgtcccctgcagcgaagtaaccgagaatttggtcgagcccaccctgccaggactctttcttctacagcagctccctgatcaggtgaaggtgaagatggagaacacctcagtggtgctgagcatgaactctcagaagagacatctcacgtggaccctgaagctgctgcagtttctgtaccacagagatgaagaccagctcccgcttcgctctttcaccgccaactcagatatggcccagatgtcaaccgaacttctgctggaggatggtttattgttgagccagtcaaggcagcgcatcgtgtgcttaaactccttaaaagccagcgtgcaggtgacaaccattgacttgagcgcgtcacttgtgctcaatacgtgtattattcactacaggcaccaggagttcagtcactggctgcatctgttggctctggaaacccagggatccagctcccccgtgcttaaacagaggaaaaagcgaacctttcctcagatcctggctcccatcattttttccactagcatatctaatgtgaacatttctatccaactgggagatacacccccttttgcactgggattcaacagcatctccctcgattaccagcacctgcgcccccagtcaatccaccagcgtggcgtactgaccgttgaccacttgtgctggagagtggggtccgatagccatatccagcgggccccccaccctcctaacatgcatgtctggggagaggcccttgtgctggacagctttactcttcagggaagctataatcagcccctggggctttcatccacacaatctgacacactgtttctggactgcacaataagagggcttcaagtcgaagcttccgatacctgcgctcaatgcctgtcaagaatcttatctctaatgggaccccaaagcggtaaaagtgctgtgtcaagacattcgagcttcggagagagtgttagtctgctgtggaaagtagacctgaaggtcgaagatatgaacctgtttactctgtcagccctcgtcggggcttccgaggttcggctggacacattaaccattttagggtccgctgaaacaagtaccgtgggcatccaaggattggtgttagcccttgtcaaatccgttaccgagaaaatgcagccctgttgtaaagcccccgacattcccacaccggttctatcactttcaatgctgagcattacgtatcactcatccatcagatctttagaggtccagtgcggggccggcttaactttactatggagtcctcctgatcacatgtatctctatcaacatgtgctggcaactctccagtgccgcgatctgcttcgggccactgtgttcccagaaaccgtgcctagtctggcactggaaacctcgggtactacttccgaactcgaaggcagagctcccgagccattgccccctaagcggctcctgaacctaacattagaagtttctacagctaagcttaccgcttttgtggctgaggacaagttcatcactctcgcggccgaaagcgtctccctatccagacatggcggctccctgcaggcttactgtcccgagctggctgccggttttgatggaaactccatttttaacttcaaggaagtggaagttcaactgctgcctgaactggaagagatgattctccataggaatccttttccggcactccagactctcaggaacagggtttggctattatccttcggctccgttagcgtcgaattcccatatcagtacgattttagtagaaccctcgacgaggcggttggcgttcaaaagtggctgaaaggactccaccaggggacgcgcgcctgggctagcccgtctccagtgccactcccccctgacttgctgctcaaagtcgagcacttttcctgggtattcctggatgacgtgttcgaggtgaaattacatgacaactatgagctcatgaaagatgaaagtaaagagagcgccaagcggctccagttattagatgccaaggttgcagcgttacgcaaacaacatggtgaattattgcccgcacgaaagatcgaggagctctatgccagcctcgagcgcaaaaatattgaaatttacattcagcgatcccggagactgtatggaaatacccctatgaggagagccctgctgacatggagcctcgccgggctggagcttgttgcactggcagatgcctccttccacggacccgaacatgtggtcgaacaggtgcaggaactggacccagggtccccgtttcccccagaaggcctggatttagtcattcagtggtgccgtatgttgaagtgcaatgttaaatcattcttagtcagaatcagagactacccaaggtacctctttgagattagggactggagactgatggggaggttggtcggcaccgaacagtctggtcagccttgttcaagacgaagacagatactccacttggggctgccctggggaaatgtggcagttgaacgcaacatgccccccctaaaattctatcatgacttccactctgagatattccagtatactgtcgtgtggggcccatgttgggaccctgcctggacactcataggacagtgtgtggatctgctgaccaagccaagcgctgatcctagtccacccttgccatggtgggacaaaagccggctgctgtttcacggcgactggcacatggacatcgagcaagcgaacctgcatcaactcgctactgaagacccctataacaccactgaaaatatgcactgggaatggagccacctctctttccattggaagccggggcagtttgttttcaagggagatctcgacatcaatgtgagaactgcttccaaatatgacgactgctgcttcctgcatcttccagacctgtgtatgactctggacctacagtggctctgtcacggaaacccccacgaccaccacagcgtgacactgagagctcctgaattcttgcccgaggtcccactcggtcagttgcatgacagctatcgtgcctttaggtctgaaaatttgaacctgagcatcaaaatggatctcacacggcattccggaacgatcagccagccaaggattttactatactcgtccacccttaggtggatgcagaatttttgggctacgtggacatctgtgactcgacctatctgccgcggtaaattattcaacaacctgaaaccatctaagaagaagctaggccagcactacaaacagctgtcttacaccgctctctttccacagttgcaggtgcactactgggcttcctttgcccaacagaggggaattcagatcgaatgttcacagggacacgtctttacccggggcacgcagcggctcatcccacaagccggtaccgttatgcgaagactcatctccgattggtcggtcactcagatggtgtctgacctgtcccaagtgaccgttcatctcatggcctctccaaccgaggaaaacgcagaccactgtctcgatccactcgtcacaaagacacacctattatctctatcctctcttacatatcagcgccacagcaataggaccgccgaggaggagctgtctgctagggacggagaccctaccttccacacccatcagctccacctggtggacctccggatcagctggacaacaaccaaccgagatatcgcgttcggactatacgacggttacaagaaagccgccgttctgaaaaggaacctcagcactgaggccctgaaaggtcttaagatcgatccccagatgcccgcaaagaaaccaaagcggggcgtgcctacttccgcgagtgctccacccagagtgaacacacctagcttctcaggccaaccagacaagggcagctcaggaggggcctatatgcttcagaaattaatcgaggagactgatcgcttcgtggtgttcacagaggaagaatccggtatgtccgaccagctgtgcgggatcgcggcctgtcagacggatgacatttataacaggaactgcctcatcgagctagtgaattgtcaaatggtcttgcgtggggcggaaacagagggttgtgtaattgttagcgccgccaaggcgcagctgttacagtgtcagcaccaccctgcttggtacggcgatactttgaagcagaagacctcatggacgtgccttctggatggcatgcaatactttgccaccacagagagcagtcccaccgaacaggacggcagacagctttggttggaggtcaagaacatcgaggagcacaggcagagatccctagattctgtgcaagaacttatggaaagcggccaggcagttggaggtatggtgaccactaccacagactggaatcaacccgccgaggctcagcaggctcagcaggtgcaacggatcatcagcagatgcaattgccggatgtattatattagttactcccacgacatagatcccgaactggccacccagatcaagcccccagaggtactggagaatcaggagaaggaggatctgctgaaaaagcaggaaggagctgtcgatacattcaccttgattcatcatgaactggagatctctaccaatcctgcccagtatgctatgatattggatattgtcaataaccttttacttcacgtagagcctaaacgcaaggagcatagtgagaaaaaacagagagtgaggttccagttggaaatcagtagcaatcctgaagagcaacgttcgtccatccttcatcttcaagaagcggtacgtcagcacgtggctcaaatccgacagctggagaagcagatgtattcaatcatgaagtcccttcaggatgactcgaaaaatgaaaatctcctggacctcaaccagaaactgcaactccagctaaaccaggagaaagcaaatctacagctggagtccgaagaattaaacattcttatcagatgcttcaaggactttcagctgcagcgggctaacaaaatggagctgagaaaacagcaggaagacgtgtcagtggtccgcagaactgagttctattttgcacaggcccgttggagactcaccgaagaagacggccagctgggtatcgcggaactggagctccagaggttcctgtattcgaaggtcaacaaatccgatgacacagcagaacatctgctggaactcggatggtttacaatgaataacttacttcctaatgcagtgtacaaagctattctcagaccccaatccagctgtcagtctgggaggcagctggctctccggctgttttctaaggttcggccaccggtcggcggaatctctgtgaaagagcactttgaagtgaacgtggtgcctctgactattcagttaacacatcagttcttccaccggatgatgggtttcttttttcctgggaggtctgtcgaagacgatgaggttggagatgaggaagataaaagtaagctcgtgaccacggggattcctgttgttaaaccccggcagctgattgccaccgatgatgctgtaccactaggaccagggaagggggtggcacaaggcttaacacggtccagcggagtgaggcgctccttccgaaagtcgcctgagcatcctgtagatgacatcgataaaatgaaagaacgcgcagcaatgaacaactcattcatatacatcaaaatcccccaggttcccctgtgtgtatcatataaaggcgagaaaaatagtgttgactggggagacctcaaccttgtgctgccttgcctcgagtatcacaataatacctggacatggctcgacttcgcaatggccgttaaacgcgactctcgtaaagctctggtggcacaggtgatcaaagaaaagctgcgactcaagtctgccaccggcagcgaggttcgcggcaaactggaaacgaagagcgacctgaacatgcaacagcaagaagaggaagagaaggcccgcctcttgatcggcctatctgtcggagacaagaaccctggaaaaaaatctattttcgggcggaggaaatag

SEQ ID NO: 181516 - DNA, 6279 bp, Artificial Sequence
  derived and/or modified sequence
atggttcttaaagtggatacaagtgagagcctgtggcatattcagatcagtcggagcagattcctgctcgactcagacgggaagaggctcatctgtgaggtgtccttgtgcaaaatcaacagcaaagtgctcaaaagcggccagttggaagacacatgcctggtggagctttctttggccttggacctgtgtttgaaagtcggcatctcctcgcgtcacctgaccgccatcactgttgatgtttggaccttacacgccgagctccatgaggggctcttccagtcgcagctgttgtgccaaggcccttccctcgcatccaagccagttccctgctccgaagtgaccgagaatctggttgaaccaaccttgcccggcctgtttcttttacagcagctgccagatcaggtcaaagttaagatggaaaacacaagcgtagtgctgtcgatgaattcacaaaagagacacctcacctggaccctgaagcttctgcagtttctgtatcacagagacgaggatcaactccccctgaggtcctttactgctaactcagatatggcccaaatgtcaaccgagctacttctggaagacggacttttactgagccagagtagacagcggattgtgtgtttgaattccctcaaggcctctgtccaggtgacaaccattgatctgtccgcatctctcgtcttaaatacctgcattatccactatagacaccaagaattttctcattggctgcatctactcgctcttgaaactcagggctctagctctcccgtactgaagcagcggaagaagcgtacttttcctcagatccttgcccctataattttcagcacttcaatctccaatgtaaatattagcatccagttaggtgacaccccaccatttgcgttgggctttaacagcatatccctggactaccagcatcttaggccccaaagtattcatcagcgcggcgtgctcaccgttgaccatttgtgctggcgggtcggtagtgactcccatatccaacgggcgccccaccccccaaacatgcatgtgtggggcgaggctctggtccttgattcttttaccctgcaggggtcctacaaccagccgctcggcttatctagcacccagtctgatacgctgttcctcgactgtaccatccggggacttcaagtggaggcttctgacacctgcgctcagtgcctctcacggattctctcccttatgggtccacagtccggtaagagcgcagtgtcccggcactcgtcttttggcgaatccgtgtccttactctggaaggttgacctgaaggtggaggatatgaacctctttacgttaagcgccctcgtgggtgcgagcgaggtgcgattggatacacttacaattctgggctccgccgaaaccagcaccgtcggtatacagggtttagtgctggcgcttgtgaaaagtgtaacagagaaaatgcaaccctgctgcaaagccccagacattcccacccctgtcttgagcctgtctatgctctctatcacgtaccattctagcattagaagtctggaggtgcaatgtggggccgggttgactctcctgtggtcaccccccgaccacatgtacctgtaccaacatgtcctggccacccttcagtgtcgtgatttacttagggcaaccgtgttccctgagactgtgccgagcctcgctttggaaacctctggtaccacatctgaattagagggccgagcccctgagcccctcccgcctaagagactcctgaaccttaccttggaagttagcaccgccaagctgaccgcatttgttgcggaggacaagttcattacactagctgccgaaagcgtctcccttagccgacacggcgggtcgctccaggcttactgccccgagctagcggcagggtttgatggcaactccatcttcaacttcaaggaggttgaagtgcagctgctgccagagcttgaggagatgattctgcatcgaaacccgtttcccgcactacagacacttaggaaccgcgtatggctcctgtccttcgggagcgtgagcgtggagtttccataccaatatgacttcagtcgcacgctagatgaagccgtcggagtacagaagtggctcaagggtctgcaccagggcacaagagcttgggcatccccttcccctgtgcccttgccccccgacctgctgctgaaggttgagcacttcagctgggttttccttgatgatgtgttcgaagtcaaacttcacgataattacgagctgatgaaggacgaatcaaaggagagtgcaaagcgccttcaattattggatgcgaaagttgcagcccttaggaagcagcacggggagctgctgcccgctagaaagatcgaggagctgtacgccagtctggagagaaagaacatcgagatctatatccagcggtcgcgaagactgtatgggaacactcccatgagacgcgcccttctgacttggagtcttgctgggctggaacttgtcgctttggcggatgcatccttccacggccccgagcacgtcgtggaacaggtacaagagctagatcccggttcccctttccccccagaggggctggatctggttatccagtggtgccggatgttgaaatgtaacgtgaagagcttcctggtcagaatacgcgactatccaaggtacctgttcgagattcgggactggcgattaatggggcggctagttggaacagagcagagcggtcagccgtgctccaggaggcggcaaattctgcacctaggactgccgtggggaaatgtagctgtggagcgcaacatgccaccactcaagttttaccacgatttccacagcgagatattccagtacaccgtggtgtggggcccatgttgggatccggcctggaccctgattggtcagtgcgtcgatttactgacaaagccttcggccgatccttctcccccccttccttggtgggacaaaagcaggttactgttccatggagactggcatatggatatcgagcaggccaacctccatcagttagcgacagaggacccttacaatacgacggagaacatgcattgggagtggtcccatttgtcttttcattggaaacccggacagttcgtatttaagggggatctcgatattaacgtccggactgcctccaaatacgacgactgctgttttctacatctgcccgatctgtgtatgacactagacctccagtggctgtgtcacgggaacccacatgatcatcattctgtcactctcagggcccccgaattcttgcccgaagtgcccctgggtcagttgcatgactcttatagggctttcagaagtgagaatttgaatctgtcgattaagatggatctgaccagacattctgggaccattagtcaacctaggattctgttgtattcatccacactgcgatggatgcagaacttttgggcgacgtggacgtccgttaccaggcctatctgccgaggcaagctgttcaacaacctgaagcccagtaaaaaaaagctggggcaacactacaagcagcttagttatactgccctgttcccccagctccaggtgcactattgggcttcattcgcccaacagcgagggatacagatagaatgtagccagggccatgtctttactcgggggactcagcgcctgataccccaggccggtactgtgatgagacgactaataagcgactggtccgtgacccagatggtctccgatttatcccaggttaccgtacacctcatggcctcacccacagaagagaacgccgatcactgtcttgaccccctggtgaccaagacacatctgctgtccttgtctagccttacttaccaacgacatagcaatcggacggcagaggaggagctgtccgccagagacggtgaccccaccttccacacgcaccagcttcatctggtcgatttgaggattagttggacaacaacaaacagggatatagccttcggcctttacgatgggtacaagaaggcagccgttctgaaaaggaacctgtccaccgaggcgctaaaaggactgaagatcgaccctcagatgcctgctaagaagccgaaaaggggtgtacctacatcagcttctgccccccctcgcgtgaacacgccaagtttctcagggcagcccgataaagggtctagcggcggagcttacatgctccagaagcttattgaagaaaccgatcggttcgtagtgtttactgaggaggagtcgggaatgtccgatcaactctgtggaattgcagcgtgccagacagatgacatttacaaccgcaactgcctcatcgaattggtcaattgtcagatggtcctgagaggcgcagagaccgagggatgtgttatcgtgagcgccgcgaaggcccagttactgcagtgccagcatcacccagcttggtatggagataccctcaaacaaaagactagctggacctgtctgttggacggcatgcaatattttgccacaacagaatccagcccgacagagcaggacggaagacagctctggctggaggttaagaatattgaggagcacagacagaggtctttagacagcgtgcaggaactcatggaaagcggccaggcggtcggggggatggtcacaactactacagattggaaccaaccagcagaggcccagcaggcccagcaggtacagaggattatctcgaggtgcaactgcaggatgtactatatctcttacagccatgacattgatcctgaactcgcaacccagatcaagccacccgaagtgctcgagaaccaggagaaggaggatttacttaagaaacaagagggagctgtggatacattcacacttattcaccatgagctggaaatttcgacaaatccggcccagtatgctatgatcctggacatcgtcaataacctcctgttgcatgttgaacccaaaaggaaggagcatagcgagaagaaacagcgcgttaggtttcaactcgagatttctagcaacccagaggaacagcgtagcagcatccttcacctccaagaggcggtccgccagcacgtggcacagattcggcagctcgagaagcagatgtactccattatgaagtcccttcaagatgactctaaaaatgagaacctactggatttgaaccagaaactacagttacagctgaatcaggagaaagctaatttacaacttgaatccgaggagttaaacatcttgatccggtgctttaaggactttcaactacaaagggcgaacaagatggagcttcgcaagcaacaggaggatgtctctgtcgttaggcgcacagagttctacttcgctcaggctcgatggcgcctgacggaggaagacggacagcttggcattgcggagctcgaactccagcggttcttgtattctaaagtgaacaagtccgatgacacagcagaacatctcctggagcttggatggtttactatgaataacctgctgcccaatgccgtttataaggtggtgctcaggccacagtccagctgccagagtgggcggcaactcgcactccggttgttttccaaggtgagaccacccgtggggggaatatcagtgaaagagcacttcgaagtgaatgtagtgcccctgactatccagctgacacatcagttctttcatcgcatgatgggattttttttcccaggcaggtcggtggaggatgacgaggtgggcgatgaggaagacaaatctaaattagttacaacaggaatcccagtggtaaaaccccggcagctgattgcaacggatgacgccgttccattgggacctggcaagggcgtggcacaagggctgacccgttccagtggcgttcggcgcagtttccgtaagagcccagagcatccagtggacgatatcgacaagatgaaggagcgcgccgcgatgaataatagctttatttatatcaaaatcccacaggtcccactgtgcgtgtcgtacaaaggcgaaaagaacagcgttgactggggggacctcaacctcgtacttccctgtctggagtaccacaacaatacctggacctggcttgactttgctatggcagtgaagcgagactcccgcaaggccctggtagcacaagtgatcaaggagaagctgagactgaagtccgccaccggatccgaggtgcgggggaagctcgaaactaaatctgatctgaacatgcaacagcaagaggaagaggaaaaagcaaggctcctcataggtctctccgtgggggacaaaaatccaggcaagaaatctatctttggcaggcggaaatag

SEQ ID NO: 181517 - DNA, 6708 bp, Artificial Sequence
  derived and/or modified sequence
atgcccctcttcttcagcgccctgctggtgctgctgctggtggccctgagcgccctcttcctgggccgctggctggtggtgcggctggccaccaagtggtgccagaggaagctgcaggccgagctgaagattggcagcttccgcttcttctggatccagaatgtgtccctgaagttccagcagcaccagcagacagtggagattgacaacctgtggatcagcagcaagctgctgagccatgacctgccccactacgtggccctgtgcttcggggaggtgcgcatcagaacagacctgcagaaggtgtctgacctgagcgcccccttcagccagagcgctggggtggaccagaaggagctgtccttcagccccagcctgctgaagatcttctgccagctgttcagcatccacgtggatgccatcaacatcatggtgctgaaggtggacaccagcgagagcctgtggcacatccagatcagccgcagccgcttcctgctggacagtgatggcaagaggctcatctgtgaggtgtccctgtgcaagatcaacagcaaggtgctgaagagcggccagctggaggacacctgcctggtggagctgagcctggccctggacctgtgcctgaaggtgggcatcagcagccgccacctgacagccatcaccgtggatgtgtggaccctgcatgctgagctgcacgagggcctcttccagagccagctgctgtgccagggccccagcctggccagcaagcctgtgccctgcagcgaggtgacagagaacctggtggagcccaccctgcccggcctcttcctgctgcagcagctgcctgaccaggtgaaggtgaagatggagaacacctctgtggtgctgtccatgaacagccagaagaggcacctgacctggaccctgaagctgctgcagttcctgtaccacagagatgaggaccagctgcccctgcgctccttcaccgccaacagcgacatggcccagatgagcacagagctgctgctggaggatggcctgctgctgagccagagccggcagagaattgtgtgcctgaacagcctgaaggcctctgtgcaggtgaccaccatcgacctgagcgccagcctggtgctgaacacctgcatcatccactaccgccaccaggagttcagccactggctgcacctgctggccctggagacccagggcagcagcagccctgtgctgaagcagaggaagaagaggaccttcccccagatcctggcccccatcatcttcagcaccagcatcagcaatgtgaacatcagcatccagctgggggacaccccaccatttgccctgggcttcaacagcatcagcctggactaccagcacctgcggccccagagcatccaccagaggggcgtgctgactgtggaccacctgtgctggagggtgggcagtgacagccacatccagagggccccccacccccccaacatgcacgtgtggggcgaggccctggtgctggacagcttcaccctgcagggcagctacaaccagcccctgggcctgagcagcacccagagcgacaccctcttcctggactgcaccatccggggcctgcaggtggaggccagtgacacctgtgcccagtgcctgagccgcatcctgagcctgatgggcccccagagcggcaagtctgctgtgagccgccacagcagctttggagagagcgtgtccctgctgtggaaggtggacctgaaggtggaggacatgaacctcttcaccctgagcgccctggtgggcgccagcgaggtgcggctggacaccctgaccatcctgggcagcgctgagaccagcacagtgggcatccagggcctggtgctggccctggtgaagtctgtgacagagaagatgcagccctgctgcaaggccccagacatccccacccctgtgctgagcctgtccatgctgagcatcacctaccacagcagcatccgcagcctggaggtgcagtgtggggccggcctgaccctgctgtggagccccccagaccacatgtacctgtaccagcacgtgctggccaccctgcagtgccgggacctgctgcgggccaccgtcttccctgagaccgtgcccagcctggccctggagaccagcggcaccaccagcgagctggagggccgggcccctgagcccctgccccccaagaggctgctgaacctgaccctggaggtgtccacagccaagctgacagcctttgtggccgaggacaagttcatcaccctggccgctgagagcgtgtccctgagccgccacggcggcagcctgcaggcctactgcccagagctggccgccggctttgatggcaacagcatcttcaacttcaaggaggtggaggtgcagctgctgcctgagctggaggagatgatcctgcacaggaaccccttccctgccctgcagaccctgaggaacagagtgtggctgctgagctttggatctgtgtctgtggagttcccctaccagtatgacttcagcaggaccctggatgaagctgtgggcgtgcagaagtggctgaagggcctgcaccagggcacccgggcctgggccagccccagccctgtgcccctgcccccagacctgctgctgaaggtggagcacttctcctgggtgttcctggatgatgtgtttgaggtgaagctgcatgacaactatgagctgatgaaggatgagagcaaggagagcgccaagaggctgcagctgctggatgccaaggtggccgccctgaggaagcagcacggggagctgctgcctgccaggaagattgaggagctgtatgccagcctggagaggaagaacatcgagatctacatccagaggagccggcggctgtatggcaacacccccatgaggcgggccctgctgacctggagcctggccggcctggagctggtggccctggctgatgccagcttccacggccctgagcacgtggtggagcaggtgcaggagctggaccccggcagccccttccccccagagggcctggacctggtgatccagtggtgcaggatgctgaagtgcaatgtgaagagcttcctggtgcgcatccgggactacccccgctacctgtttgagatccgggactggaggctgatgggccgcctggtgggcacagagcagagcggccagccctgcagcagaagacggcagatcctgcacctgggcctgccctggggcaatgtggccgtggagaggaacatgccacccctgaagttctaccatgacttccacagcgagatcttccagtacacagtggtgtggggcccctgctgggaccctgcctggaccctcatcggccagtgtgtggacctgctgaccaagcccagcgctgaccccagcccccccctgccctggtgggacaagagccggctgctcttccatggagactggcacatggacatcgagcaggccaacctgcaccagctggccacagaggacccctacaacaccacagagaacatgcactgggagtggagccacctgtccttccactggaagccaggccagtttgtgttcaagggggacctggacatcaacgtgaggacagccagcaaatatgatgactgctgcttcctgcacctgcctgacctgtgcatgaccctggacctgcagtggctgtgccacggcaacccccatgaccaccacagcgtgaccctgcgggcccctgagttcctgcctgaggtgcccctgggccagctgcatgacagctaccgggccttccgctctgagaacctgaacctgagcatcaagatggacctgaccaggcacagcggcaccatcagccagccccgcatcctgctgtacagcagcaccctgcgctggatgcagaacttctgggccacctggacctctgtgacccggcccatctgccggggcaagctgttcaacaacctgaagcccagcaagaagaagctgggccagcactacaagcagctgagctacacagccctcttcccccagctgcaggtgcactactgggccagctttgcccagcagaggggcatccagatcgagtgcagccagggccacgtgttcacccggggcacccagaggctcatcccccaggccggcaccgtgatgagaagactcatcagtgactggagcgtgacccagatggtgtctgacctgagccaggtgacagtgcacctgatggccagccccacagaggagaatgctgaccactgcctggaccccctggtgaccaagacccacctgctgagcctgagcagcctgacctaccagaggcacagcaacagaacagctgaggaggagctgagcgccagagatggagaccccaccttccacacccaccagctgcacctggtggacctgcgcatctcctggaccaccaccaacagagacatcgccttcggcctgtatgatggctacaagaaggctgctgtgctgaagaggaacctgagcacagaggccctgaagggcctgaagattgacccccagatgcctgccaagaagcccaagaggggcgtgcccaccagcgccagcgccccaccccgggtgaacacccccagcttcagcggccagcctgacaagggcagcagcggcggggcctacatgctgcagaagctgattgaggagacagacagatttgtggtgttcacagaggaggagagcggcatgtctgaccagctgtgtggcattgctgcctgccagacagatgacatctacaacagaaactgcctgattgagctggtgaactgccagatggtgctgcggggagctgagacagagggctgtgtgattgtgtctgctgccaaggcccagctgctgcagtgccagcaccacccagcctggtatggagacaccctgaagcagaagacctcctggacctgcctgctggatggcatgcagtactttgccaccacagagagcagccccacagagcaggacggccggcagctgtggctggaggtgaagaacatcgaggagcaccggcagaggagcctggacagcgtgcaggagctgatggagagcggccaggccgtgggcggcatggtgaccaccaccacagactggaaccagcctgctgaggcccagcaggcccagcaggtgcagaggatcatcagccgctgcaactgcaggatgtactacatctcctacagccatgacatcgaccctgagctggccacccagatcaagcccccagaggtgctggagaaccaggagaaggaggacctgctgaagaagcaggagggcgctgtggacaccttcaccctcatccaccacgagctggagatcagcaccaacccagcccagtatgccatgatcctggacatcgtgaacaacctgctgctgcacgtggagcccaagaggaaggagcacagcgagaagaagcagagggtgcgcttccagctggagatcagcagcaaccctgaggagcagaggagcagcatcctgcacctgcaggaggccgtgcggcagcacgtggcccagatccggcagctggagaagcagatgtacagcatcatgaagagcctgcaggatgacagcaagaatgaaaacctgctggacctgaaccagaagctgcagctgcagctgaaccaggagaaggccaacctgcagctggagagcgaggagctgaacatcctgatccgctgcttcaaggacttccagctgcagagggccaacaagatggagctgaggaagcagcaggaggatgtgtctgtggtgagaagaacagagttctactttgcccaggcccgctggaggctgacagaagaagatggccagctgggcattgctgagctggagctgcagcgcttcctgtacagcaaggtgaacaagagtgatgacacagctgagcacctgctggagctgggctggttcaccatgaacaacctgctgcccaatgctgtgtacaaggtggtgctgcggccccagagcagctgccagagcggccggcagctggccctgcggctcttcagcaaggtgcggccccctgtgggcggcatctctgtgaaggagcactttgaggtgaatgtggtgcccctgaccatccagctgacccaccagttcttccacaggatgatgggcttcttcttccctggccgctctgtggaggatgatgaggtgggagatgaggaggacaagagcaagctggtgaccaccggcatccctgtggtgaagccccggcagctgattgccacagatgatgctgtgcccctgggccctggaaaaggagtggcccagggcctgaccaggagcagtggagtgcggcgctccttcaggaagagccctgagcaccctgtggatgacatcgacaagatgaaggagagagctgccatgaacaacagcttcatctacatcaagatcccccaggtgcccctgtgtgtgtcctacaagggggagaagaacagcgtggactggggagacctgaacctggtgctgccctgcctggagtaccacaacaacacctggacctggctggactttgccatggctgtgaagagggacagcaggaaggccctggtggcccaggtgatcaaggagaagctgcggctgaagagcgccactggaagtgaggtgcggggcaagctggagaccaagagtgacctgaacatgcagcagcaggaggaggaggagaaggcccggctgctgattggcctgtctgtgggggacaagaaccctgggaagaagagcatctttggaagaaggaagtag

SEQ ID NO: 181518 - DNA, 6618 bp, Artificial Sequence
  derived and/or modified sequence
atgcccctcttcttcagcgccctgctggtgctgctgctggtggccctgagcgccctcttcctgggccgctggctggtggtgcggctggccaccaagtggtgccagaggaagctgcaggccgagctgaagattggcagcttccgcttcttctggatccagaatgtgtccctgaagttccagcagcaccagcagacagtggagattgacaacctgtggatcagcagcaagctgctgagccatgacctgccccactacgtggccctgtgcttcggggaggtgcgcatcagaacagacctgcagaaggtgtctgacctgagcgcccccttcagccagagcgctggggtggaccagaaggagctgtccttcagccccagcctgctgaagatcttctgccagctgttcagcatccacgtggatgccatcaacatcatggtgctgaaggtggacaccagcgagagcctgtggcacatccagatcagccgcagccgcttcctgctggacagtgatggcaagaggctcatctgtgaggtgtccctgtgcaagatcaacagcaaggtgctgaagagcggccagctggaggacacctgcctggtggagctgagcctggccctggacctgtgcctgaaggtgggcatcagcagccgccacctgacagccatcaccgtggatgtgtggaccctgcatgctgagctgcacgagggcctcttccagagccagctgctgtgccagggccccagcctggccagcaagcctgtgccctgcagcgaggtgacagagaacctggtggagcccaccctgcccggcctcttcctgctgcagcagctgcctgaccaggtgaaggtgaagatggagaacacctctgtggtgctgtccatgaacagccagaagaggcacctgacctggaccctgaagctgctgcagttcctgtaccacagagatgaggaccagctgcccctgcgctccttcaccgccaacagcgacatggcccagatgagcacagagctgctgctggaggatggcctgctgctgagccagagccggcagagaattgtgtgcctgaacagcctgaaggcctctgtgcaggtgaccaccatcgacctgagcgccagcctggtgctgaacacctgcatcatccactaccgccaccaggagttcagccactggctgcacctgctggccctggagacccagggcagcagcagccctgtgctgaagcagaggaagaagaggaccttcccccagatcctggcccccatcatcttcagcaccagcatcagcaatgtgaacatcagcatccagctgggggacaccccaccatttgccctgggcttcaacagcatcagcctggactaccagcacctgcggccccagagcatccaccagaggggcgtgctgactgtggaccacctgtgctggagggtgggcagtgacagccacatccagagggccccccacccccccaacatgcacgtgtggggcgaggccctggtgctggacagcttcaccctgcagggcagctacaaccagcccctgggcctgagcagcacccagagcgacaccctcttcctggactgcaccatccggggcctgcaggtggaggccagtgacacctgtgcccagtgcctgagccgcatcctgagcctgatgggcccccagagcggcaagtctgctgtgagccgccacagcagctttggagagagcgtgtccctgctgtggaaggtggacctgaaggtggaggacatgaacctcttcaccctgagcgccctggtgggcgccagcgaggtgcggctggacaccctgaccatcctgggcagcgctgagaccagcacagtgggcatccagggcctggtgctggccctggtgaagtctgtgacagagaagatgcagccctgctgcaaggccccagacatccccacccctgtgctgagcctgtccatgctgagcatcacctaccacagcagcatccgcagcctggaggtgcagtgtggggccggcctgaccctgctgtggagccccccagaccacatgtacctgtaccagcacgtgctggccaccctgcagtgccgggacctgctgcgggccaccgtcttccctgagaccgtgcccagcctggccctggagaccagcggcaccaccagcgagctggagggccgggcccctgagcccctgccccccaagaggctgctgaacctgaccctggaggtgtccacagccaagctgacagcctttgtggccgaggacaagttcatcaccctggccgctgagagcgtgtccctgagccgccacggcggcagcctgcaggcctactgcccagagctggccgccggctttgatggcaacagcatcttcaacttcaaggaggtggaggtgcagctgctgcctgaggtggagttcccctaccagtatgacttcagcaggaccctggatgaagctgtgggcgtgcagaagtggctgaagggcctgcaccagggcacccgggcctgggccagccccagccctgtgcccctgcccccagacctgctgctgaaggtggagcacttctcctgggtgttcctggatgatgtgtttgaggtgaagctgcatgacaactatgagctgatgaaggatgagagcaaggagagcgccaagaggctgcagctgctggatgccaaggtggccgccctgaggaagcagcacggggagctgctgcctgccaggaagattgaggagctgtatgccagcctggagaggaagaacatcgagatctacatccagaggagccggcggctgtatggcaacacccccatgaggcgggccctgctgacctggagcctggccggcctggagctggtggccctggctgatgccagcttccacggccctgagcacgtggtggagcaggtgcaggagctggaccccggcagccccttccccccagagggcctggacctggtgatccagtggtgcaggatgctgaagtgcaatgtgaagagcttcctggtgcgcatccgggactacccccgctacctgtttgagatccgggactggaggctgatgggccgcctggtgggcacagagcagagcggccagccctgcagcagaagacggcagatcctgcacctgggcctgccctggggcaatgtggccgtggagaggaacatgccacccctgaagttctaccatgacttccacagcgagatcttccagtacacagtggtgtggggcccctgctgggaccctgcctggaccctcatcggccagtgtgtggacctgctgaccaagcccagcgctgaccccagcccccccctgccctggtgggacaagagccggctgctcttccatggagactggcacatggacatcgagcaggccaacctgcaccagctggccacagaggacccctacaacaccacagagaacatgcactgggagtggagccacctgtccttccactggaagccaggccagtttgtgttcaagggggacctggacatcaacgtgaggacagccagcaaatatgatgactgctgcttcctgcacctgcctgacctgtgcatgaccctggacctgcagtggctgtgccacggcaacccccatgaccaccacagcgtgaccctgcgggcccctgagttcctgcctgaggtgcccctgggccagctgcatgacagctaccgggccttccgctctgagaacctgaacctgagcatcaagatggacctgaccaggcacagcggcaccatcagccagccccgcatcctgctgtacagcagcaccctgcgctggatgcagaacttctgggccacctggacctctgtgacccggcccatctgccggggcaagctgttcaacaacctgaagcccagcaagaagaagctgggccagcactacaagcagctgagctacacagccctcttcccccagctgcaggtgcactactgggccagctttgcccagcagaggggcatccagatcgagtgcagccagggccacgtgttcacccggggcacccagaggctcatcccccaggccggcaccgtgatgagaagactcatcagtgactggagcgtgacccagatggtgtctgacctgagccaggtgacagtgcacctgatggccagccccacagaggagaatgctgaccactgcctggaccccctggtgaccaagacccacctgctgagcctgagcagcctgacctaccagaggcacagcaacagaacagctgaggaggagctgagcgccagagatggagaccccaccttccacacccaccagctgcacctggtggacctgcgcatctcctggaccaccaccaacagagacatcgccttcggcctgtatgatggctacaagaaggctgctgtgctgaagaggaacctgagcacagaggccctgaagggcctgaagattgacccccagatgcctgccaagaagcccaagaggggcgtgcccaccagcgccagcgccccaccccgggtgaacacccccagcttcagcggccagcctgacaagggcagcagcggcggggcctacatgctgcagaagctgattgaggagacagacagatttgtggtgttcacagaggaggagagcggcatgtctgaccagctgtgtggcattgctgcctgccagacagatgacatctacaacagaaactgcctgattgagctggtgaactgccagatggtgctgcggggagctgagacagagggctgtgtgattgtgtctgctgccaaggcccagctgctgcagtgccagcaccacccagcctggtatggagacaccctgaagcagaagacctcctggacctgcctgctggatggcatgcagtactttgccaccacagagagcagccccacagagcaggacggccggcagctgtggctggaggtgaagaacatcgaggagcaccggcagaggagcctggacagcgtgcaggagctgatggagagcggccaggccgtgggcggcatggtgaccaccaccacagactggaaccagcctgctgaggcccagcaggcccagcaggtgcagaggatcatcagccgctgcaactgcaggatgtactacatctcctacagccatgacatcgaccctgagctggccacccagatcaagcccccagaggtgctggagaaccaggagaaggaggacctgctgaagaagcaggagggcgctgtggacaccttcaccctcatccaccacgagctggagatcagcaccaacccagcccagtatgccatgatcctggacatcgtgaacaacctgctgctgcacgtggagcccaagaggaaggagcacagcgagaagaagcagagggtgcgcttccagctggagatcagcagcaaccctgaggagcagaggagcagcatcctgcacctgcaggaggccgtgcggcagcacgtggcccagatccggcagctggagaagcagatgtacagcatcatgaagagcctgcaggatgacagcaagaatgaaaacctgctggacctgaaccagaagctgcagctgcagctgaaccaggagaaggccaacctgcagctggagagcgaggagctgaacatcctgatccgctgcttcaaggacttccagctgcagagggccaacaagatggagctgaggaagcagcaggaggatgtgtctgtggtgagaagaacagagttctactttgcccaggcccgctggaggctgacagaagaagatggccagctgggcattgctgagctggagctgcagcgcttcctgtacagcaaggtgaacaagagtgatgacacagctgagcacctgctggagctgggctggttcaccatgaacaacctgctgcccaatgctgtgtacaaggtggtgctgcggccccagagcagctgccagagcggccggcagctggccctgcggctcttcagcaaggtgcggccccctgtgggcggcatctctgtgaaggagcactttgaggtgaatgtggtgcccctgaccatccagctgacccaccagttcttccacaggatgatgggcttcttcttccctggccgctctgtggaggatgatgaggtgggagatgaggaggacaagagcaagctggtgaccaccggcatccctgtggtgaagccccggcagctgattgccacagatgatgctgtgcccctgggccctggaaaaggagtggcccagggcctgaccaggagcagtggagtgcggcgctccttcaggaagagccctgagcaccctgtggatgacatcgacaagatgaaggagagagctgccatgaacaacagcttcatctacatcaagatcccccaggtgcccctgtgtgtgtcctacaagggggagaagaacagcgtggactggggagacctgaacctggtgctgccctgcctggagtaccacaacaacacctggacctggctggactttgccatggctgtgaagagggacagcaggaaggccctggtggcccaggtgatcaaggagaagctgcggctgaagagcgccactggaagtgaggtgcggggcaagctggagaccaagagtgacctgaacatgcagcagcaggaggaggaggagaaggcccggctgctgattggcctgtctgtgggggacaagaaccctgggaagaagagcatctttggaagaaggaagtag

SEQ ID NO: 181519 - DNA, 6708 bp, Artificial Sequence
  derived and/or modified sequence
atgcccctcttcttcagcgccctgctggtgctgctgctggtggccctgagcgccctcttcctgggccgctggctggtggtgcggctggccaccaagtggtgccagaggaagctgcaggccgagctgaagattggcagcttccgcttcttctggatccagaatgtgtccctgaagttccagcagcaccagcagacagtggagattgacaacctgtggatcagcagcaagctgctgagccatgacctgccccactacgtggccctgtgcttcggggaggtgcgcatcagaacagacctgcagaaggtgtctgacctgagcgcccccttcagccagagcgctggggtggaccagaaggagctgtccttcagccccagcctgctgaagatcttctgccagctgttcagcatccacgtggatgccatcaacatcatggtgctgaaggtggacaccagcgagagcctgtggcacatccagatcagccgcagccgcttcctgctggacagtgatggcaagaggctcatctgtgaggtgtccctgtgcaagatcaacagcaaggtgctgaagagcggccagctggaggacacctgcctggtggagctgagcctggccctggacctgtgcctgaaggtgggcatcagcagccgccacctgacagccatcaccgtggatgtgtggaccctgcatgctgagctgcacgagggcctcttccagagccagctgctgtgccagggccccagcctggccagcaagcctgtgccctgcagcgaggtgacagagaacctggtggagcccaccctgcccggcctcttcctgctgcagcagctgcctgaccaggtgaaggtgaagatggagaacacctctgtggtgctgtccatgaacagccagaagaggcacctgacctggaccctgaagctgctgcagttcctgtaccacagagatgaggaccagctgcccctgcgctccttcaccgccaacagcgacatggcccagatgagcacagagctgctgctggaggatggcctgctgctgagccagagccggcagagaattgtgtgcctgaacagcctgaaggcctctgtgcaggtgaccaccatcgacctgagcgccagcctggtgctgaacacctgcatcatccactaccgccaccaggagttcagccactggctgcacctgctggccctggagacccagggcagcagcagccctgtgctgaagcagaggaagaagaggaccttcccccagatcctggcccccatcatcttcagcaccagcatcagcaatgtgaacatcagcatccagctgggggacaccccaccatttgccctgggcttcaacagcatcagcctggactaccagcacctgcggccccagagcatccaccagaggggcgtgctgactgtggaccacctgtgctggagggtgggcagtgacagccacatccagagggccccccacccccccaacatgcacgtgtggggcgaggccctggtgctggacagcttcaccctgcagggcagctacaaccagcccctgggcctgagcagcacccagagcgacaccctcttcctggactgcaccatccggggcctgcaggtggaggccagtgacacctgtgcccagtgcctgagccgcatcctgagcctgatgggcccccagagcggcaagtctgctgtgagccgccacagcagctttggagagagcgtgtccctgctgtggaaggtggacctgaaggtggaggacatgaacctcttcaccctgagcgccctggtgggcgccagcgaggtgcggctggacaccctgaccatcctgggcagcgctgagaccagcacagtgggcatccagggcctggtgctggccctggtgaagtctgtgacagagaagatgcagccctgctgcaaggccccagacatccccacccctgtgctgagcctgtccatgctgagcatcacctaccacagcagcatccgcagcctggaggtgcagtgtggggccggcctgaccctgctgtggagccccccagaccacatgtacctgtaccagcacgtgctggccaccctgcagtgccgggacctgctgcgggccaccgtcttccctgagaccgtgcccagcctggccctggagaccagcggcaccaccagcgagctggagggccgggcccctgagcccctgccccccaagaggctgctgaacctgaccctggaggtgtccacagccaagctgacagcctttgtggccgaggacaagttcatcaccctggccgctgagagcgtgtccctgagccgccacggcggcagcctgcaggcctactgcccagagctggccgccggctttgatggcaacagcatcttcaacttcaaggaggtggaggtgcagctgctgcctgagctggaggagatgatcctgcacaggaaccccttccctgccctgcagaccctgaggaacagagtgtggctgctgagctttggatctgtgtctgtggagttcccctaccagtatgacttcagcaggaccctggatgaagctgtgggcgtgcagaagtggctgaagggcctgcaccagggcacccgggcctgggccagccccagccctgtgcccctgcccccagacctgctgctgaaggtggagcacttctcctgggtgttcctggatgatgtgtttgaggtgaagctgcatgacaactatgagctgatgaaggatgagagcaaggagagcgccaagaggctgcagctgctggatgccaaggtggccgccctgaggaagcagcacggggagctgctgcctgccaggaagattgaggagctgtatgccagcctggagaggaagaacatcgagatctacatccagaggagccggcggctgtatggcaacacccccatgaggcgggccctgctgacctggagcctggccggcctggagctggtggccctggctgatgccagcttccacggccctgagcacgtggtggagcaggtgcaggagctggaccccggcagccccttccccccagagggcctggacctggtgatccagtggtgcaggatgctgaagtgcaatgtgaagagcttcctggtgcgcatccgggactacccccgctacctgtttgagatccgggactggaggctgatgggccgcctggtgggcacagagcagagcggccagccctgcagcagaagacggcagatcctgcacctgggcctgccctggggcaatgtggccgtggagaggaacatgccacccctgaagttctaccatgacttccacagcgagatcttccagtacacagtggtgtggggcccctgctgggaccctgcctggaccctcatcggccagtgtgtggacctgctgaccaagcccagcgctgaccccagcccccccctgccctggtgggacaagagccggctgctcttccatggagactggcacatggacatcgagcaggccaacctgcaccagctggccacagaggacccctacaacaccacagagaacatgcactgggagtggagccacctgtccttccactggaagccaggccagtttgtgttcaagggggacctggacatcaacgtgaggacagccagcaaatatgatgactgctgcttcctgcacctgcctgacctgtgcatgaccctggacctgcagtggctgtgccacggcaacccccatgaccaccacagcgtgaccctgcgggcccctgagttcctgcctgaggtgcccctgggccagctgcatgacagctaccgggccttccgctctgagaacctgaacctgagcatcaagatggacctgaccaggcacagcggcaccatcagccagccccgcatcctgctgtacagcagcaccctgcgctggatgcagaacttctgggccacctggacctctgtgacccggcccatctgccggggcaagctgttcaacaacctgaagcccagcaagaagaagctgggccagcactacaagcagctgagctacacagccctcttcccccagctgcaggtgcactactgggccagctttgcccagcagaggggcatccagatcgagtgcagccagggccacgtgttcacccggggcacccagaggctcatcccccaggccggcaccgtgatgagaagactcatcagtgactggagcgtgacccagatggtgtctgacctgagccaggtgacagtgcacctgatggccagccccacagaggagaatgctgaccactgcctggaccccctggtgaccaagacccacctgctgagcctgagcagcctgacctaccagaggcacagcaacagaacagctgaggaggagctgagcgccagagatggagaccccaccttccacacccaccagctgcacctggtggacctgcgcatctcctggaccaccaccaacagagacatcgccttcggcctgtatgatggctacaagaaggctgctgtgctgaagaggaacctgagcacagaggccctgaagggcctgaagattgacccccagatgcctgccaagaagcccaagaggggcgtgcccaccagcgccagcgccccaccccgggtgaacacccccagcttcagcggccagcctgacaagggcagcagcggcggggcctacatgctgcagaagctgattgaggagacagacagatttgtggtgttcacagaggaggagagcggcatgtctgaccagctgtgtggcattgctgcctgccagacagatgacatctacaacagaaactgcctgattgagctggtgaactgccagatggtgctgcggggagctgagacagagggctgtgtgattgtgtctgctgccaaggcccagctgctgcagtgccagcaccacccagcctggtatggagacaccctgaagcagaagacctcctggacctgcctgctggatggcatgcagtactttgccaccacagagagcagccccacagagcaggacggccggcagctgtggctggaggtgaagaacatcgaggagcaccggcagaggagcctggacagcgtgcaggagctgatggagagcggccaggccgtgggcggcatggtgaccaccaccacagactggaaccagcctgctgaggcccagcaggcccagcaggtgcagaggatcatcagccgctgcaactgcaggatgtactacatctcctacagccatgacatcgaccctgagctggccacccagatcaagcccccagaggtgctggagaaccaggagaaggaggacctgctgaagaagcaggagggcgctgtggacaccttcaccctcatccaccacgagctggagatcagcaccaacccagcccagtatgccatgatcctggacatcgtgaacaacctgctgctgcacgtggagcccaagaggaaggagcacagcgagaagaagcagagggtgcgcttccagctggagatcagcagcaaccctgaggagcagaggagcagcatcctgcacctgcaggaggccgtgcggcagcacgtggcccagatccggcagctggagaagcagatgtacagcatcatgaagagcctgcaggatgacagcaagaatgaaaacctgctggacctgaaccagaagctgcagctgcagctgaaccaggagaaggccaacctgcagctggagagcgaggagctgaacatcctgatccgctgcttcaaggacttccagctgcagagggccaacaagatggagctgaggaagcagcaggaggatgtgtctgtggtgagaagaacagagttctactttgcccaggcccgctggaggctgacagaagaagatggccagctgggcattgctgagctggagctgcagcgcttcctgtacagcaaggtgaacaagagtgatgacacagctgagcacctgctggagctgggctggttcaccatgaacaacctgctgcccaatgctgtgtacaaggccatcctgcggccccagagcagctgccagagcggccggcagctggccctgcggctcttcagcaaggtgcggccccctgtgggcggcatctctgtgaaggagcactttgaggtgaatgtggtgcccctgaccatccagctgacccaccagttcttccacaggatgatgggcttcttcttccctggccgctctgtggaggatgatgaggtgggagatgaggaggacaagagcaagctggtgaccaccggcatccctgtggtgaagccccggcagctgattgccacagatgatgctgtgcccctgggccctggaaaaggagtggcccagggcctgaccaggagcagtggagtgcggcgctccttcaggaagagccctgagcaccctgtggatgacatcgacaagatgaaggagagagctgccatgaacaacagcttcatctacatcaagatcccccaggtgcccctgtgtgtgtcctacaagggggagaagaacagcgtggactggggagacctgaacctggtgctgccctgcctggagtaccacaacaacacctggacctggctggactttgccatggctgtgaagagggacagcaggaaggccctggtggcccaggtgatcaaggagaagctgcggctgaagagcgccactggaagtgaggtgcggggcaagctggagaccaagagtgacctgaacatgcagcagcaggaggaggaggagaaggcccggctgctgattggcctgtctgtgggggacaagaaccctgggaagaagagcatctttggaagaaggaagtag

SEQ ID NO: 181520 - DNA, 6279 bp, Artificial Sequence
  derived and/or modified sequence
atggtgctgaaggtggacaccagcgagagcctgtggcacatccagatcagccgcagccgcttcctgctggacagtgatggcaagaggctcatctgtgaggtgtccctgtgcaagatcaacagcaaggtgctgaagagcggccagctggaggacacctgcctggtggagctgagcctggccctggacctgtgcctgaaggtgggcatcagcagccgccacctgacagccatcaccgtggatgtgtggaccctgcacgccgagctgcacgagggcctcttccagagccagctgctgtgccagggccccagcctggccagcaagcctgtgccctgcagcgaggtgacagagaacctggtggagcccaccctgcccggcctcttcctgctgcagcagctgcctgaccaggtgaaggtgaagatggagaacacctctgtggtgctgtccatgaacagccagaagaggcacctgacctggaccctgaagctgctgcagttcctgtaccacagagatgaggaccagctgcccctgcggagcttcaccgccaacagcgacatggcccagatgagcacagagctgctgctggaggatggcctgctgctgagccagagccggcagagaattgtgtgcctgaacagcctgaaggcctctgtgcaggtgaccaccatcgacctgagcgccagcctggtgctgaacacctgcatcatccactaccgccaccaggagttcagccactggctgcacctgctggccctggagacccagggcagcagcagccctgtgctgaagcagaggaagaagaggaccttcccccagatcctggcccccatcatcttcagcaccagcatcagcaatgtgaacatcagcatccagctgggggacaccccaccatttgccctgggcttcaacagcatcagcctggactaccagcacctgcggccccagagcatccaccagaggggcgtgctgactgtggaccacctgtgctggagggtgggcagtgacagccacatccagagggccccccacccccccaacatgcacgtgtggggcgaggccctggtgctggacagcttcaccctgcagggcagctacaaccagcccctgggcctgagcagcacccagagcgacaccctcttcctggactgcaccatccggggcctgcaggtggaggccagtgacacctgtgcccagtgcctgagccgcatcctgagcctgatgggcccccagagcggcaagtctgctgtgagccgccacagcagctttggagagagcgtgtccctgctgtggaaggtggacctgaaggtggaggacatgaacctcttcaccctgagcgccctggtgggcgccagcgaggtgcggctggacaccctgaccatcctgggcagcgctgagaccagcacagtgggcatccagggcctggtgctggccctggtgaagtctgtgacagagaagatgcagccctgctgcaaggccccagacatccccacccctgtgctgagcctgtccatgctgagcatcacctaccacagcagcatccgcagcctggaggtgcagtgtggggccggcctgaccctgctgtggagccccccagaccacatgtacctgtaccagcacgtgctggccaccctgcagtgccgggacctgctgcgggccaccgtcttccctgagaccgtgcccagcctggccctggagaccagcggcaccaccagcgagctggagggccgggcccctgagcccctgccccccaagaggctgctgaacctgaccctggaggtgtccacagccaagctgacagcctttgtggccgaggacaagttcatcaccctggccgctgagagcgtgtccctgagcagacatggaggcagcctgcaggcctactgcccagagctggccgccggctttgatggcaacagcatcttcaacttcaaggaggtggaggtgcagctgctgcctgagctggaggagatgatcctgcacaggaaccccttccctgccctgcagaccctgaggaacagagtgtggctgctgagctttggatctgtgtctgtggagttcccctaccagtatgacttcagcaggaccctggatgaggccgtgggcgtgcagaagtggctgaagggcctgcaccagggcacccgggcctgggccagccccagccctgtgcccctgcccccagacctgctgctgaaggtggagcacttctcctgggtgttcctggatgatgtgtttgaggtgaagctgcatgacaactatgagctgatgaaggatgagagcaaggagagcgccaagaggctgcagctgctggatgccaaggtggccgccctgaggaagcagcacggggagctgctgcctgccaggaagattgaggagctgtatgccagcctggagaggaagaacatcgagatctacatccagaggagccggcggctgtatggcaacacccccatgagaagagccctgctgacctggagcctggccggcctggagctggtggccctggctgatgccagcttccacggccctgagcacgtggtggagcaggtgcaggagctggaccccggcagccccttccccccagagggcctggacctggtgatccagtggtgcaggatgctgaagtgcaatgtgaagagcttcctggtgcgcatccgggactacccccgctacctgtttgagatccgggactggaggctgatgggccgcctggtgggcacagagcagagcggccagccctgcagcagaagacggcagatcctgcacctgggcctgccctggggcaatgtggccgtggagaggaacatgccacccctgaagttctaccatgacttccacagcgagatcttccagtacacagtggtgtggggcccctgctgggaccctgcctggaccctgattggccagtgtgtggacctgctgaccaagcccagcgctgaccccagcccccccctgccctggtgggacaagagccggctgctcttccacggggactggcacatggacatcgagcaggccaacctgcaccagctggccacagaggacccctacaacaccacagagaacatgcactgggagtggagccacctgtccttccactggaagccaggccagtttgtgttcaagggggacctggacatcaacgtgaggacagccagcaaatatgatgactgctgcttcctgcacctgcctgacctgtgcatgaccctggacctgcagtggctgtgccacggcaacccccatgaccaccacagcgtgaccctgcgggcccctgagttcctgcctgaggtgcccctgggccagctgcatgacagctaccgggccttccgctctgagaacctgaacctgagcatcaagatggacctgaccaggcacagcggcaccatcagccagccccgcatcctgctgtacagcagcaccctgcgctggatgcagaacttctgggccacctggacctctgtgacccggcccatctgccggggcaagctgttcaacaacctgaagcccagcaagaagaagctgggccagcactacaagcagctgagctacacagccctcttcccccagctgcaggtgcactactgggccagctttgcccagcagaggggcatccagattgaatgttcccagggccacgtgttcacccggggcacccagaggctcatcccccaggccggcaccgtgatgaggaggctcatcagtgactggagcgtgacccagatggtgtctgacctgagccaggtgacagtgcacctgatggccagccccacagaagaaaatgctgaccactgcctggaccccctggtgaccaagacccacctgctgagcctgagcagcctgacctaccagaggcacagcaacagaacagctgaggaggagctgagcgccagagatggagaccccaccttccacacccaccagctgcacctggtggacctgcgcatctcctggaccaccaccaacagagacatcgccttcggcctgtatgatggctacaagaaggctgctgtgctgaagaggaacctgagcacagaggccctgaagggcctgaagattgacccccagatgcctgccaagaagcccaagaggggcgtgcccaccagcgccagcgccccaccccgggtgaacacccccagcttcagcggccagcctgacaagggcagcagtggaggagcctacatgctgcagaagctgattgaggagacagacagatttgtggtgttcacagaggaggagagcggcatgtctgaccagctgtgtggcattgctgcctgccagacagatgacatctacaacagaaactgcctgattgagctggtgaactgccagatggtgctgcggggagctgagacagagggctgcgtcatcgtgtctgctgccaaggcccagctgctgcagtgccagcaccacccagcctggtacggggacaccctgaagcagaagacctcctggacctgcctgctggatggcatgcagtactttgccaccacagagagcagccccacagagcaggacggccggcagctgtggctggaggtgaagaacatcgaggagcaccggcagaggagcctggacagcgtgcaggagctgatggagagcggccaggccgtgggcggcatggtgaccaccaccacagactggaaccagcctgctgaggcccagcaggcccagcaggtgcagaggatcatcagccgctgcaactgcaggatgtactacatctcctacagccatgacattgatcctgagctggccacccagatcaagcccccagaggtgctggagaaccaggagaaggaggacctgctgaagaagcaggagggcgctgtggacaccttcaccctcatccaccacgagctggagatcagcaccaacccagcccagtatgccatgatcctggacatcgtgaacaacctgctgctgcacgtggagcccaagaggaaggagcacagcgagaagaagcagagggtgcgcttccagctggagatcagcagcaaccctgaggagcagaggagcagcatcctgcacctgcaggaggccgtgcggcagcacgtggcccagatccggcagctggagaagcagatgtacagcatcatgaagagcctgcaggatgacagcaagaatgaaaacctgctggacctgaaccagaagctgcagctgcagctgaaccaggagaaggccaacctgcagctggagagcgaggagctgaacatcctgatccgctgcttcaaggacttccagctgcagagggccaacaagatggagctgaggaagcagcaggaggatgtgtctgtggtgcggaggacagagttctactttgcccaggcccgctggaggctgacagaggaggatggccagctgggcattgctgagctggagctgcagcgcttcctgtacagcaaggtgaacaagagtgatgacacagctgagcacctgctggagctgggctggttcaccatgaacaacctgctgcccaatgctgtgtacaaggtggtgctgcggccccagagcagctgccagagcggccggcagctggccctgcggctcttcagcaaggtgcggccccctgtgggcggcatctctgtgaaggagcactttgaggtgaatgtggtgcccctgaccatccagctgacccaccagttcttccacaggatgatgggcttcttcttccctggccgctctgtggaggatgatgaggtgggagatgaggaggacaagagcaagctggtgaccaccggcatccctgtggtgaagccccggcagctgattgccacagatgatgctgtgcccctgggccctgggaagggcgtggcccagggcctgaccaggagcagcggcgtgagaagaagcttcaggaagagccctgagcaccctgtggatgacatcgacaagatgaaggagcgggccgccatgaacaacagcttcatctacatcaagatcccccaggtgcccctgtgtgtgtcctacaagggggagaagaacagcgtggactggggagacctgaacctggtgctgccctgcctggagtaccacaacaacacctggacctggctggactttgccatggctgtgaagagggacagcaggaaggccctggtggcccaggtgatcaaggagaagctgcggctgaagagcgccaccggcagcgaggtgcggggcaagctggagaccaagagtgacctgaacatgcagcagcaggaggaggaggagaaggcccggctgctgattggcctgtctgtgggggacaagaaccctgggaagaagagcatcttcggccgcaggaagtag

SEQ ID NO: 181521 - DNA, 6708 bp, Artificial Sequence
  derived and/or modified sequence
atgcccctgttcttcagcgccctgctggtgctgctgctggtggccctgtcagctctgtttctgggacgatggttagttgtgcgactcgccactaagtggtgccagcggaagctgcaggccgaactgaagatcggatcttttcgctttttctggatccagaacgtgtctttgaagtttcagcaacatcagcagaccgttgagatcgacaatctgtggatcagttccaagctcctctctcatgacctgccccactatgtggcgctttgcttcggcgaagtgcgtattcgaacagatcttcaaaaagtgtccgacctctcagccccttttagtcaatctgctggggtggaccagaaggaactctctttttcccctagcttgctgaaaatcttctgccagctgttctctattcacgtcgacgccattaatataatggttctcaaagtggacacatctgagagtctctggcatatccaaatctcgagaagcagatttctgctcgacagcgatgggaaacgcttgatttgtgaggtgtctctatgtaagattaattccaaggtgctcaagtccggccagctggaagacacatgcttggtagaactatctctggcactggacctgtgcctgaaagttggcattagcagcagacatctgactgcgattacggtcgacgtgtggactctgcacgcagaactgcacgagggtctcttccagtcacagttgctctgccaaggccctagcctggccagtaagccggtgccttgctctgaggtgacagagaacttggtggaacctaccctgcccgggctgttcctgctgcagcagctccctgaccaggttaaggtaaaaatggagaacacaagtgtggtgctctctatgaactcccagaagcgacatctcacatggacattaaagctgctccagtttctgtaccacagggacgaagatcagctgcctcttagaagctttactgctaactcagatatggcccagatgtcaaccgagctcctcctcgaggacggtctgctgctttctcaatcacgacagcgaatcgtctgtttgaatagtctgaaggcgagcgttcaagtcaccactatcgatctttcagctagtctggtgctaaatacctgcatcatccactataggcatcaggagttttcacactggctgcacttactcgccctggagacccaggggtccagtagccccgtgttgaagcaaagaaagaagagaacattcccccaaattctcgcccctatcatattttccacgtccatctccaatgttaatatcagcattcagctgggggatacgccaccttttgccttgggatttaactcaatatcacttgattaccagcacctccggccacaaagcattcaccagcgaggcgtcttaactgtggatcatctgtgctggcgggtgggatccgacagtcatatacagcgcgcccctcacccaccaaacatgcacgtatggggcgaggctttagtgttagattcattcaccctgcaaggttcttacaaccagccactgggcctttctagcactcagtccgatacacttttcctcgattgcactattcgaggccttcaggtggaggcaagcgatacatgtgctcagtgtctgagtcgaatccttagcctcatgggaccgcagtccggcaaatcagcagtgagcagacactcatcattcggtgaaagcgtcagtctgctgtggaaggtagatttgaaagtcgaagacatgaacctgttcactctgtcagctctggtcggcgcatccgaggtgaggttggatacactgaccattcttggatctgccgaaaccagcactgtgggcatccaagggttagtccttgcccttgtcaagagtgttactgagaaaatgcagccgtgttgcaaggctccggatattccaacaccagtcctctctctgtccatgctcagcatcacatatcattcaagcataagaagcctggaagtacagtgcggagctggacttacactgttgtggtcgcctccagatcacatgtatctgtaccagcatgtgctcgctaccttgcagtgtcgcgatctcctgcgcgctactgttttccctgaaaccgtccccagcttagctctagagacgagcggtactacatcggaactggagggccgggcaccagagcctttaccaccaaagaggcttcttaacctcaccctagaggtgagcacggcgaagctgactgctttcgttgcagaagataagttcatcaccctcgctgctgagagtgtaagtcttagccggcatggaggttctctacaagcctactgcccggagctggcggctggatttgatggcaacagtatattcaattttaaagaagtagaggttcagctcttgcctgagctggaggagatgatcctgcatcgcaatcccttccccgcactgcagaccctaaggaatcgagtctggctcctgagcttcgggtccgtgtcagtggagttcccatatcagtacgatttctcccggactctggacgaggcagtgggggtgcaaaaatggttgaagggtctccatcagggcactcgtgcctgggctagccctagccctgtccctctgccacccgacctgctgcttaaggtggagcacttctcctgggtcttcctcgacgacgtattcgaagtaaagctccacgataactacgagttaatgaaagacgagtctaaggaatctgcaaagcgtttgcagctgttggatgccaaagtcgctgccctgcgcaagcagcatggggagctgctaccagctagaaagatagaggagttgtacgcttctcttgaacggaagaacattgagatatacatccagcggtccagaaggctttatggcaatacacccatgcggcgtgctttgctgacctggtctctggctggcctggagctggtggctctggccgacgcaagctttcacggcccagagcacgttgttgaacaggtgcaagagctcgatcccgggtcccctttccccccggagggattggacctggtgatccaatggtgccgtatgttaaagtgtaacgtgaagtctttccttgtgcgcatccgcgattacccaaggtaccttttcgagatcagggattggagactcatgggccgcctggttgggaccgagcagtccggacagccatgttctcgccgccgccagatccttcaccttggcctgccttggggcaacgtagccgttgaaagaaacatgcccccccttaaattctatcacgattttcactctgagatttttcagtatactgtggtatgggggccctgttgggacccagcctggacactgatcggtcaatgcgtcgatttactgaccaagcccagcgctgatcctagcccccccctaccgtggtgggataagtcccgcctgctctttcatggagactggcatatggacatagaacaggctaatctgcatcagcttgctactgaggacccttacaatacaacagagaatatgcactgggaatggagtcatttgtcctttcactggaaacctggccagtttgtgtttaagggagacctggacattaatgtgcgcacggcctccaagtacgacgattgctgcttcctacacctgcccgacctgtgcatgacccttgatctgcagtggttgtgtcatggcaatcctcatgaccatcacagtgtgactctccgtgcacctgaattcctgcccgaagtgccactgggtcagctccatgacagttaccgcgccttccgttccgagaacctgaatcttagcattaagatggacctgactcgtcactcaggcacaatctctcagccccgaatcctcctttactcatccacactacgctggatgcagaacttttgggctacctggacctcagtgacccggcccatctgccgaggaaagctctttaacaacctgaagccctcgaagaaaaaactgggacaacattataaacagttatcttacactgccctgtttcctcagctacaggtgcattattgggcatccttcgcccaacagaggggcatccaaattgagtgcagccaaggccacgtatttacccgcggcactcagcgcctgataccacaggctgggacggtcatgaggcgtcttattagtgattggtcggtgactcaaatggtgagtgatctttcccaggtgacagtgcacctcatggcatctcccactgaggagaatgccgaccattgtttagaccccctagtcacaaaaacgcatctgcttagtttatcctccttgacttatcagcggcatagcaataggacagctgaggaggaactgtcagcccgggatggcgacccaacctttcatactcaccagctacacctggtggatctcaggatctcgtggacaacgactaatcgggatattgcattcgggctttatgatggctacaagaaggcggcggttctgaagcgtaatctcagcacggaagccctaaagggactgaagattgatccacagatgcccgctaagaaacctaagaggggcgtgccaacctcagcttccgcccccccacgtgtcaatacaccctcctttagtggtcagccagacaagggtagctctgggggggcatatatgttacagaagctcatcgaggagactgatcggtttgtggtctttacagaggaggaaagtgggatgtcagaccagctgtgcggcattgccgcctgtcaaactgatgacatatacaacaggaactgtctcatcgagctggtgaactgccagatggtactcagaggcgctgagaccgagggatgcgtcatcgtctctgctgccaaagcccagctgctccaatgtcagcaccacccagcctggtacggggatacactcaagcagaaaaccagctggacttgtctgctagatggtatgcaatattttgcgacaaccgagtcctctcctactgaacaagacgggagacagctctggctggaggtcaagaacattgaggagcaccggcagaggtcactcgacagtgtgcaggagctgatggagtctggccaggcagtcgggggcatggtaaccactactaccgattggaatcagcctgcagaagctcagcaggcccagcaggtgcagagaatcatcagtcgatgcaattgcagaatgtactacataagctactcacacgacattgaccctgagttggccactcagatcaaaccacctgaagttctcgagaaccaggagaaggaagatctcctgaaaaaacaggagggggcggtggataccttcaccctgattcaccatgaactcgaaatctccaccaaccccgctcagtatgccatgatactggatatagtcaataaccttctgctgcatgtcgaaccaaagcgtaaggagcatagtgaaaaaaagcagagagtgcgcttccagcttgagatcagctcaaatcccgaggagcagcggagctccattttgcatctacaggaagccgtgagacagcatgtcgcccaaatcagacaattggagaagcaaatgtatagcattatgaaatccctgcaggacgacagcaagaatgaaaaccttctggacctgaaccaaaagctccagctccagttgaatcaggaaaaggccaatctgcagttagaatccgaggagttgaatatcctcattagatgctttaaagatttccagttgcagcgggcaaacaagatggagctccgtaagcaacaggaggacgtcagcgttgttcgcagaactgagttttactttgcccaagcccggtggcgactcactgaagaggacggccagctgggcatagctgaactggaactacaacggtttttatattctaaagtgaacaaatctgacgacaccgctgagcacttgctggagttggggtggtttaccatgaacaatctgctaccaaatgccgtgtataaggtcgtactccgcccacagagttcctgtcagtcaggacgccaactagctctgagactattctccaaggtgaggccacccgtgggaggtatctccgtcaaggaacatttcgaggtgaatgtcgttcccctgactatacagcttacacaccagttctttcaccgtatgatgggattctttttccccggccgctcagtggaggacgacgaggttggagacgaggaagataaaagcaagctggtcaccaccggaattcccgtggtgaagcctcgccagctgatagccacggatgacgccgtccccctggggcctggcaaaggggttgcccagggtctgacccgctcatccggcgtgcgcaggtcttttcgaaaatctccagagcacccagtcgacgacatagataaaatgaaggaacgggccgcaatgaacaatagctttatctatataaaaataccccaagtccccttgtgcgtatcatacaagggggaaaaaaactccgtggattggggagatctgaacctggtattaccctgtctggagtatcacaacaacacgtggacttggcttgattttgcaatggctgtgaaaagagactctcgaaaagcactggttgcgcaggtgattaaagagaagttaaggctcaaaagtgccaccggatctgaagttcgcgggaagctggagaccaagtcggacctgaacatgcagcagcaagaggaagaggaaaaggctaggttgctgattggactcagcgtgggagataagaaccctgggaaaaaatcgatttttgggcggcgtaaatag

SEQ ID NO: 181522 - DNA, 6618 bp, Artificial Sequence
  derived and/or modified sequence
atgcccctgttcttcagcgccctgctggtgctgctgctggtggccctgagtgccctgtttctcgggcggtggttggtcgtaaggcttgcaaccaagtggtgccagaggaagttgcaggcggagcttaagatcgggtccttcagattcttttggatccagaacgtctcattgaaatttcagcagcaccagcagaccgttgagattgacaacctgtggatctcttctaaattgctgagtcacgacctgccacactatgtggctctctgtttcggagaagtgcggattcgcactgaccttcagaaggtttcagacctcagtgctcccttttcgcagagcgcaggggtggatcagaaggagctgtcattctccccaagcctccttaagatcttttgtcagctcttttccatacacgtggatgccattaatataatggtgctgaaggtcgacaccagcgaatctctctggcacattcagatcagcagatccaggttcctgttggattctgatggcaagcggctgatttgtgaggtgagtctttgtaagattaacagtaaggtcttgaaaagcggacagctggaggatacctgtctcgtcgaactcagtctggctctcgatctgtgtctgaaggtagggatcagcagccgacacttgacagcgatcacagtggacgtgtggaccctgcatgctgagttgcatgaaggtttattccagtcccagttattgtgccaggggcctagcttagcatcaaaacccgttccatgtagcgaagtgaccgagaacctggtggaaccaacactgccggggctcttcctgctgcagcagttaccagaccaggtaaaagtgaaaatggagaacaccagcgtggttttaagtatgaacagccaaaaacgccatctcacctggactcttaaacttttacagtttctataccaccgagatgaagaccagctacccctcaggagtttcaccgcaaactcagatatggctcaaatgtccaccgagctcctcctagaagacggccttttattatctcaaagccgacagcggattgtgtgtctgaactctcttaaagctagtgtgcaggtgactaccatcgatctgagtgcctctcttgtgttgaatacgtgcattatccattaccgccaccaagagttctcccactggctccatttgctggcgttggaaactcaaggcagtagctctccggtccttaagcaaaggaagaagcgcacattccctcagattcttgccccaattattttcagcacttccatcagcaacgtgaatatctcaatccaactgggcgatactcctccattcgcactggggttcaattctatctcattagactaccagcatctcaggccacagagtatccatcaaaggggggtgctcacagtggaccacctgtgttggcgcgtgggttcagatagccatatacaacgcgctccacaccctccgaacatgcatgtttggggcgaggcactggtcctggattccttcacattgcaaggttcctataatcagccccttggcctctcttctacccagagcgacaccttgttcctagattgcaccatccgcggccttcaagtggaggcttcggacacctgcgcacaatgcctatcaaggattctgagcctgatgggcccgcagtcaggcaaatctgccgtttctcgtcatagcagcttcggagagtccgtgagcctgctttggaaggtggacttaaaagtggaggatatgaacttgttcaccctgtccgctctggttggtgcatctgaggtcagactcgacaccctgaccatactcggtagtgccgaaacctccacagtaggaattcagggcctagtactggcactcgtgaaaagcgtcaccgagaagatgcagccatgctgtaaagccccagatatcccaactccagtcctcagcttgagtatgctttcaattacttatcactcaagcattcgcagcttagaggtccagtgtggtgccgggctgactctgttgtggagccctccagaccacatgtatctgtatcaacacgtgctcgcaactttgcaatgtcgggacctcttaagagccacagtgttcccagagaccgtgcccagcctagccctcgagacctctgggactacatctgagctcgagggcagggcccccgaacctctcccaccgaagcgtcttctgaatctgacactggaggtctctaccgcaaaactgaccgcctttgtggccgaggacaaattcatcacactggcggctgagtctgttagcctgagtagacatggcggttcactacaggcatactgccccgagcttgcagcggggttcgatggcaactccatctttaattttaaagaggtcgaggtgcaattgctgcctgaggtggagtttccatatcagtacgacttctctagaacactggacgaagcagtaggggtacagaagtggcttaaaggcctgcatcagggaacaagggcctgggcatcccctagccccgtcccactgccccccgacctgttactgaaggtggagcattttagttgggtttttctggacgatgtttttgaggtcaaattacatgacaactatgaactgatgaaggatgagagcaaagagagcgccaaacggcttcagctgctcgacgccaaggtggccgcgctgagaaagcagcacggagaactgttacccgccaggaaaatagaggagttgtacgcaagcctagagagaaagaatatcgagatatatatccaaaggagtcgccgactgtacggtaacacccctatgcggagggcgctgctgacttggagtctggcaggccttgaactggtagcactagcagacgccagttttcatgggccagaacatgtggtcgaacaagtccaagaactagatcctggcagcccttttcctcccgaggggctggacctcgtgatccaatggtgtcgcatgcttaaatgtaacgtgaaaagttttctggttaggatccgggactatcctcgctacctgtttgagatcagggactggcgcctgatgggaagattagtggggacagagcagagcgggcagccttgtagtcggcggcgtcaaatcctgcacctgggactaccatggggcaatgtggcagtggaaaggaacatgccgcctttgaaattctatcacgacttccatagtgaaatcttccagtacacagtggtgtggggaccttgttgggacccagcctggacgctaatcggtcaatgcgtggatctgcttactaaaccgtccgccgacccctcccctcccctgccctggtgggacaaatcgcgcttactgtttcacggagactggcacatggacatcgagcaggcgaatctgcaccagctagccacagaagatccttacaacaccacggagaatatgcactgggaatggtcccatctcagctttcactggaagccaggacagttcgtgttcaaaggagatctggacatcaacgtccgaactgcttctaagtacgacgactgctgttttcttcacctccccgacctgtgcatgacccttgatctgcagtggctctgtcatgggaatccccacgaccatcattcagtgaccctgcgcgctcccgagttccttccagaggtcccactgggtcagctgcatgattcttaccgggccttccgtagtgagaatcttaatttgtctattaagatggatctcacacgccacagcggtaccatttcacagccgagaattctgctttattccagcacgctcagatggatgcaaaacttttgggccacttggaccagcgttacccgaccaatttgcagaggtaagctcttcaacaatttaaaaccctcaaagaaaaagctgggacaacattataaacagctgtcctacacagccctcttccctcagctgcaggtccattactgggcaagtttcgcccagcaacgcggcatccagattgagtgctcgcaagggcacgtgttcaccagaggaactcagcgcctgatcccacaagcagggaccgtgatgcgtagactgatcagcgattggagcgtcacccagatggtctccgatctgtcgcaggtgaccgtacaccttatggctagcccgaccgaggaaaatgccgatcactgtctagaccctctggtcaccaagacgcacctcctgtcactaagctcgctgacctaccaacgacactccaatcggaccgccgaggaggagctatccgcgagggacggggaccccacattccatacacatcagctgcacctggtagaccttcgcattagttggacaacaaccaatcgagatatcgccttcggtctgtacgacggttataagaaagctgctgtgctgaaaagaaatttgtccaccgaggccctgaaggggcttaagatcgacccccagatgcccgctaaaaagcctaagcgaggcgtgccaacctccgctagcgcccctccgagggtgaataccccctcctttagtgggcagcctgacaagggaagttcaggaggcgcgtacatgctccagaagcttattgaagagaccgacagattcgtagtcttcaccgaggaggaaagcggaatgtctgaccagctgtgtggcatcgccgcttgccagactgatgacatctataaccggaattgtttaattgagcttgtgaactgccaaatggtcttacggggtgcagaaaccgagggatgcgtcatcgtgagcgcggccaaggcccagctcttgcagtgtcagcaccacccagcttggtacggcgacactttgaagcagaaaacctcctggacttgcctgctcgatggcatgcaatatttcgccacaacggagagttcccccacggaacaggatggacgtcagttgtggctggaggtcaaaaacattgaagagcaccgccagcggtctctggattctgttcaagaactaatggagtcggggcaggcagtaggcgggatggttaccaccacaactgactggaatcagcccgctgaggcacagcaggctcagcaagtccagcggattatatcacgctgtaattgcaggatgtattatatatcatattctcacgacatagaccctgaacttgcaacacagatcaaaccccccgaggtgctagaaaatcaggaaaaagaagatctgttgaagaagcaggagggggccgtagatacgttcacattgattcaccacgaactcgagatctcaacgaaccccgcgcagtacgcaatgatcttggatatcgtgaataatctccttctgcatgtggagcctaaacggaaggaacactccgaaaagaagcagcgcgtgagatttcaattggagatttcttctaaccctgaagaacagagatccagtatcctccacctgcaagaggctgtccggcagcatgtggcccagataaggcagcttgaaaaacagatgtatagcattatgaagtcacttcaagacgacagcaaaaacgagaacttacttgatctgaatcagaagctacagctccagcttaaccaggaaaaggcaaacctccagttggaaagcgaggagctcaatatactaattcgctgcttcaaggattttcagcttcaaagagctaacaaaatggaacttcgtaaacaacaggaagatgtctcggtggttagaagaaccgagttctattttgcccaggccagatggcgtctcaccgaggaagatggtcagttagggattgctgaactggaactgcagagattcctctactccaaggtcaataaatccgatgacactgctgaacatttgctggaactggggtggtttactatgaataatctgcttcccaacgctgtctataaagtcgtgctgcggcctcagtcatcttgccagtctggacgacagcttgccctgagattgttctcaaaagtccggccaccagtggggggtatttcagttaaggaacactttgaagtaaacgtggtgcctctcacgatccagctgacacaccaattctttcaccggatgatgggcttcttcttcccggggcgtagcgtcgaggacgatgaagttggcgatgaggaagacaaatctaagctggtcactactggcatcccagttgttaaacccagacagttgattgcgaccgatgacgcggtgcccctagggcctggaaaaggcgtcgcgcagggactgacccgtagctccggggttagacgatcatttcgcaagagtcccgagcacccggtagacgacatagacaaaatgaaggaacgcgctgctatgaataacagctttatctacatcaaaatcccacaggtacccctgtgtgtgtcatacaagggggagaaaaatagcgttgattggggagaccttaacctggtcctgccgtgccttgaataccataacaacacctggacgtggttagactttgccatggccgtcaaacgcgacagccgcaaagccctcgtcgcccaggtgatcaaggaaaaacttcgcttgaagtcagcaacggggtccgaggtgcgggggaagctagagacaaaaagcgacctcaacatgcaacagcaggaagaggaggaaaaggctcggctgctcattggacttagcgtgggagacaaaaatccggggaagaaatccatctttggtcggcgcaagtag

SEQ ID NO: 181523 - DNA, 6708 bp, Artificial Sequence
  derived and/or modified sequence
atgcccctgttcttcagcgccctgctggtgctgctgctggtggccctgagcgcgttgtttttgggacgatggttagtcgttaggcttgctactaagtggtgtcagcggaaattgcaggccgagctaaaaatcggctctttcaggttcttctggatacagaacgtctccctgaagtttcagcagcatcaacagactgtggaaatcgacaatttgtggatcagcagtaaactccttagccatgacctcccacattatgtcgccttgtgtttcggggaagtcagaattagaactgatctgcagaaggtgtcggatctctcagcacctttttctcaatcagcaggtgtggatcagaaagagctctcattttcccctagcttgctgaagatcttttgtcaactgttctccattcatgtagacgccataaatatcatggtactgaaagtggacactagcgagtcattgtggcacatccagatctcccgctcaagatttctgctggatagcgacgggaagaggctgatctgtgaagtgagcctctgtaagattaacagtaaggtgctcaaaagtggtcagttggaggacacctgtctagtggaactaagtctggcccttgacctgtgcctcaaggtaggaatttcttcacgccacctcaccgcaataaccgtggacgtctggaccctccacgctgagcttcacgagggtctgtttcaatcacagctgctatgccagggcccatcgcttgctagcaagcccgtgccatgttccgaggtaactgaaaacctggttgagcccacccttcccggcctgtttctgctgcagcagttacctgatcaagtgaaggtgaaaatggagaacactagtgtagtgctctctatgaatagccagaaacgccacctgacttggacactgaagctgttacagtttttgtaccatagggatgaggatcagctccctttaagatcattcactgctaactccgacatggcacaaatgtcaactgagctgctgctggaagacggtttgttacttagtcagagtaggcagcggatcgtatgcctgaacagtctgaaggcgtccgtgcaagtgaccaccattgatctctccgcaagcctggtcttaaacacttgcattattcattacaggcatcaggaattttcacattggctgcacctgctagcccttgagacccaggggagctcttcaccggtgctgaaacagcgcaagaaaagaacgttcccacagattcttgcccctatcattttttctacatcaatctctaacgtaaacatctcgatccaattgggcgacactccccctttcgcattgggttttaattccatcagcctcgactatcagcatttacggccgcagtcaatccatcagcggggggtacttaccgtcgatcacttgtgctggagggtgggtagtgattcccatatccaacgggctccacacccccctaacatgcatgtgtggggggaggcccttgtgctcgattcctttacacttcaaggctcatataatcagccactgggcctgagctcaacccagagtgacacacttttcctcgattgcactatcagaggcctgcaggtggaagcgagtgacacatgcgcgcagtgtctttccagaattctgtctctcatgggaccccaaagtggcaaatccgcagtaagccgccattctagttttggggaatccgtttccctgctctggaaagttgacctcaaagtggaggatatgaacctatttaccctttcagctctggttggcgcctcagaggtccgtttagacactctaacaattcttgggagcgccgagactagcacggttggtattcagggcttggtcctggccctggtgaaatctgttaccgaaaagatgcaaccctgttgcaaagcacctgacattccgaccccagtcctttccctgtcaatgttatcaattacataccacagttctattcggtctctggaggtgcagtgtggtgctgggctgacactgctgtggtctccccccgaccacatgtacctctatcaacacgtattggcaacactccagtgtagggatcttctgcgcgccacagtctttcctgaaactgtaccttccctggccctggagacctccgggactaccagcgaactcgaaggacgggcccccgaacctttgccccccaagcgcctgttgaatctgacccttgaagtgagcactgcgaaactgaccgcgtttgttgccgaggacaaattcattacattagcagctgagagtgtttcattaagtcgtcacggcggaagcctgcaggcctattgtcccgaactggctgcaggttttgatggaaatagcatttttaatttcaaggaagtggaggtgcagctgctaccagaactagaggagatgatacttcacagaaatccattccccgccctccaaaccctccggaatcgagtatggcttctctcattcggcagtgtgtcggtcgaatttccataccaatacgacttttctagaacactggatgaggcggttggggtacagaaatggctgaagggcttgcatcaagggactcgcgcctgggctagtccatcgcccgtgcctctgcctcctgaccttctccttaaggtggaacatttcagctgggttttcttagatgacgttttcgaggtcaagttacatgacaactatgagttgatgaaggatgagtctaaggagagtgccaagagattgcagctcctggacgcaaaggtcgccgctctgcgcaaacagcatggggaactgctgcctgcgaggaaaatagaagaactgtacgcttcactagagcggaaaaacatcgaaatttatattcagaggagccgaaggttgtatgggaataccccaatgagacgggccctgctgacatggtccctcgctggcctggagctagtagcactggcagatgcgagcttccacgggcctgagcacgtggttgaacaggtccaggagttggacccgggcagtccgttccccccggagggcctggatctcgtgatacaatggtgtcgcatgcttaaatgtaatgtcaagtcatttttggtaagaatcagagactaccctaggtatctcttcgagatcagagactggcgactgatgggccggctggtcggcactgagcagtccggacagccttgctcaagaaggagacagatactgcacctgggactaccctggggcaatgtggccgttgaacgcaatatgccaccccttaagttttaccatgacttccactctgaaattttccagtataccgtggtatggggtccatgctgggacccagcatggaccctgatcggccaatgtgtggacctactcactaagcccagcgcggatccctcaccaccattaccatggtgggacaaaagtagactcttatttcatggcgattggcatatggacattgagcaagctaatctgcatcaattagcaactgaagacccatataacacaacagagaacatgcattgggaatggagccatttgagcttccactggaaacctggacagttcgttttcaagggcgacctggatatcaatgtgagaacggctagcaagtacgatgactgctgtttcctccacctgcctgatctgtgtatgactctggatctgcaatggctctgtcatggaaacccccacgaccaccattccgttacactccgagccccagagttcttacctgaagtgcccttgggccaactgcacgattcctatagagctttcagaagtgagaatctgaatctctccattaaaatggacctgactaggcactccggcacaatctcccagccgcgcatactgttatacagttctacactgagatggatgcagaatttttgggcgacgtggacttcagtgaccagacccatctgtcgcggtaagttgtttaacaacctcaaacccagtaaaaagaagctgggtcaacattacaagcagctgtcatatacagccctgtttccacagctgcaggtgcattattgggccagctttgcacaacagaggggtattcaaattgaatgctcccaaggccacgtcttcactagaggcacccagcgactaatcccacaggccggcactgtgatgcggcggcttatttctgactggagcgtcacacaaatggtgagcgatctgtcccaggttacagtgcatctcatggcttctcctaccgaggaaaacgccgaccattgcttggatccccttgtgactaaaacccacttgttatctctttcatccctcacttaccagagacactcaaatcggactgctgaagaggagctcagcgcacgagatggagatcccacctttcacacccaccagttgcacctggtggatctgcgcatctcctggaccaccacgaatcgcgatattgcctttggcctctacgatggctataagaaggccgctgtgctcaagagaaacttgagtactgaagccctgaagggattgaagatcgacccccaaatgccagctaagaagcctaagcgcggcgtgcctacgtctgctagcgcgccacctagggtcaacactccttcattttccggacagcccgacaaaggatccagcggaggagcatatatgctgcagaagctgatagaggagactgaccgtttcgtcgtgttcacggaggaagagtcagggatgagcgatcagctgtgcggcattgcggcgtgccagactgatgatatttataacagaaattgcctgattgagctggtcaattgccagatggtacttagaggcgcagagaccgagggctgtgttatcgtgtccgccgccaaagcacagctccttcaatgccagcaccacccagcctggtacggtgacaccctgaaacagaaaactagctggacgtgcctgttggatggaatgcagtactttgctacgacagagtcctccccgacggagcaggacggtcggcagctgtggttagaagtcaagaacatcgaggagcacaggcagagatccctggatagtgtccaagagctgatggagtctggacaggcggtcggtggcatggtaaccaccaccacggattggaaccagcccgccgaagcacagcaggcccagcaggtgcaacgcatcatttccaggtgtaactgcaggatgtactacatctcgtacagtcatgatatcgatcccgaactcgccactcaaattaagcccccagaagtactggaaaaccaggaaaaggaggatctgctgaagaagcaggagggggccgtggatacctttaccctgatccatcatgaattggagatttctactaaccccgctcagtacgccatgatactggacatcgttaataacctgttactacacgttgagccgaagagaaaggagcactccgagaaaaagcagagggttaggttccagctggagatcagtagtaacccagaagagcagaggtcatcaattttacatctccaagaggcagtccgccagcacgtcgctcagatccgccagttagagaagcagatgtactcgataatgaagtcactccaggatgatagtaagaatgagaatcttttggatctaaaccagaaactccagctccagctcaaccaggagaaagctaatctccaacttgagtccgaggagttgaacatcctgattaggtgtttcaaggactttcagctgcagcgggccaataagatggaactaagaaaacagcaggaggatgtgtccgtggtgaggcggacagaattttacttcgctcaggctcggtggcgactaactgaggaggacgggcagctggggattgcagaactggaactccagagattcctgtacagtaaagtgaacaagtctgacgacacggctgaacaccttctggagctcggctggttcaccatgaacaacttgcttcccaatgccgtgtataaggccatcttacgaccacagagttcctgtcagtctggtcgccagttagctctgaggttgttttccaaggtgcgaccacccgtaggaggtatctccgtgaaggagcacttcgaggtaaacgtggtaccactaaccatccagttgacacaccagttcttccacagaatgatgggattcttcttcccggggcgaagcgttgaggatgatgaggtgggcgacgaagaagataagtccaaactggttacaactggcatccccgtggtgaaacctcgccaattaatagcaacagatgatgccgttcctctgggacctggcaagggtgtagcacagggtctgacccggagttctggtgtccggcgaagctttagaaagtctccggagcatcctgtggatgatatagacaagatgaaagagagagcggctatgaataattcctttatctacatcaaaataccccaagtgccattgtgtgttagttataagggtgagaaaaactccgtggattggggggacttaaatctggtcctgccctgtcttgaataccataataatacctggacctggctagattttgccatggctgtgaaacgcgacagtagaaaagccctggtagcccaggtcatcaaagagaagcttagactcaaatccgccacgggcagcgaggtacggggcaaattagagacaaagtccgatctaaacatgcaacagcaggaggaggaagaaaaagctcgcctcctcatcggattgagtgtgggcgataaaaatccaggaaagaagtctatctttggcagacgcaagtag

SEQ ID NO: 181524 - DNA, 6279 bp, Artificial Sequence
  derived and/or modified sequence
atggtgctgaaggtggacaccagcgagagcctgtggcacatccagatcagccgatcccggttcctgctcgactcggacgggaagcggctgatttgcgaggtatcattatgcaagatcaactctaaagtcctaaaaagcggacaacttgaggacacatgtcttgtggagctgagtttggcgctcgatctctgcctgaaggtgggaatctccagccgacatctgacagccattaccgttgatgtttggaccctacacgccgaattacatgaagggttgttccagagccaactcttatgccaaggtccatctctggccagcaagcctgttccctgctcggaggtgacagagaacctagtggaaccgacattgcccggccttttcctattgcagcagcttcccgaccaagtgaaggtgaagatggaaaataccagtgtcgtcctgtccatgaactcccagaagcgccatctcacttggactctgaaactgctgcaattcctctaccatcgggacgaggatcagcttcccctacgctcctttactgcgaattccgatatggcacaaatgtccacagaactgttactcgaagacgggctgctcctgagccaatcccggcagcggatcgtctgtttaaattctttgaaagcttctgttcaggtgactaccatagacctctctgcttcactggtgctgaatacgtgcatcatccactatagacatcaggagttcagccactggttgcatctcctcgcactcgagacccaggggagttctagccccgttctgaagcagaggaagaagcggacattccctcagattctcgctccaatcatcttttcaaccagtatctcaaatgtcaatatcagcattcagcttggcgacaccccgcccttcgcactcggctttaattctatttcactcgattatcagcatctgcggccccagtcaatccaccagcggggagtgctgacggtggaccacttgtgttggagggttggcagtgacagccatattcagagggcccctcaccctcccaacatgcacgtgtggggcgaagcactggtcctggactcattcacgctgcagggaagctataatcagcctctaggcctcagctcaacgcagtctgacacattgtttctcgactgcactattagaggccttcaagtcgaggccagtgatacttgcgcacagtgtctctcaaggatactctcactgatgggaccccagtctggaaaatctgcagtgtcacgccactcttcattcggcgaaagcgtgtcgctactgtggaaggtcgacctcaaagtcgaggacatgaacttgtttaccctcagcgctctcgtcggcgcatcagaggttagactcgacaccctgactatccttggctcagcagaaacctccactgttggtatccaaggccttgtcctcgctctggtaaaatctgtcaccgaaaaaatgcagccctgctgcaaagcacccgacatcccaacgcccgtgctgtccctaagcatgttatccattacataccactcttccattcgatccctggaggtccagtgcggagccggcctaacgcttttgtggtcaccaccagatcacatgtacctttatcagcatgtgctagctactttacagtgtcgcgatctcctgcgtgccaccgtgttccctgagacagtgccatctctggccctcgaaacctccgggaccacgagtgaactcgagggtcgggctcctgagcctttgcccccaaaaagactccttaacttgaccttggaagtgagcactgccaagttgacagccttcgtcgccgaggacaaattcataactctcgcggctgagtctgttagcctgtccaggcacgggggaagcctgcaggcatactgtcccgagctggctgcaggtttcgacggcaattccatttttaacttcaaggaagtggaagttcaactgctgcccgagctcgaggaaatgatcttgcataggaacccgtttcccgccttacaaaccttgagaaacagggtgtggttactctctttcggctccgtctctgtggaattcccataccagtacgatttttctcgtacactcgacgaggcagtgggagtgcagaagtggctgaagggcctccatcaaggaacaagggcttgggcctccccttccccagtgcccttgcctcccgatctgctcctgaaagtggagcatttctcctgggtatttttggacgacgtgtttgaggtgaagctccatgacaactatgagctgatgaaggatgaaagcaaggagtctgctaaaaggctccagctgcttgatgccaaggtggccgctctgcgaaaacagcacggcgagctgttgcccgcacgtaagattgaagagctgtacgcttcccttgagcgtaaaaacattgaaatatacatccagcggtccagaagactttacggaaacaccccaatgcgccgagcgctcctgacctggtccctggctggtttggaactggtggccctggcggacgcgtcgttccacgggccagagcacgtggtggaacaagtacaggaactcgacccaggctctccttttccccccgagggactcgacctcgttatccagtggtgtcgcatgttgaaatgcaatgttaagagcttccttgtgaggatacgagattaccctcgctacctgttcgagattagagattggagattgatggggagactcgttgggaccgagcagtccggccagccctgctctagacgacggcaaatcctgcaccttggcctgccgtggggcaatgtcgctgtcgaacgcaatatgcctcccctgaaattctatcacgattttcatagcgagatttttcaatacaccgtagtgtgggggccttgttgggatcctgcgtggacacttattgggcagtgtgtggacctactgactaagccgagcgcagacccatccccacctctgccttggtgggacaaaagtaggctgttatttcacggtgactggcacatggatatcgagcaggcaaacttgcatcagctggccacagaggatccatataacactactgagaacatgcactgggaatggagccatttgagcttccactggaagccaggtcagtttgtatttaaaggggatctggatatcaatgtgcggacagctagcaagtacgacgactgctgctttttgcatctccccgatctgtgcatgactctggatttgcaatggttatgccatggtaacccccacgaccatcactctgttactctaagagcccccgagttcctccctgaagtccctctggggcagttgcatgactcatatcgagcatttagaagcgaaaacctgaacctgtctatcaagatggacttgacaaggcatagcgggacaatctcacagccaagaattctcttgtatagcagtacgctccgttggatgcagaatttctgggccacctggacttccgtgacccgccccatttgtcgcggcaaactattcaacaatctgaagccatctaaaaagaagttggggcagcactataagcagctatcttatacagccttgtttccacagttgcaggtgcactactgggctagctttgctcagcagcgaggaatccagatcgaatgtagtcagggccatgtgtttacccggggtacgcagcgcctgatcccgcaagctggtaccgtaatgcgccgtctaatttctgactggtccgtcacacagatggtctccgacctcagtcaagtcaccgtccacctcatggcaagtcctaccgaggagaacgctgaccactgccttgatccacttgtgacgaagacgcatttgctaagcttatcatctctgacatatcagagacattccaaccgaaccgcagaggaggagctgagtgccagagacggagatccgacatttcatacccaccaactgcacctggtagacttaaggatcagctggaccaccactaaccgcgatatcgctttcggcttatacgacggctacaagaaggcagctgtgctcaaacgcaacttgtctacagaggccctgaaaggcctcaaaattgatcctcagatgcctgccaaaaaaccgaaaaggggagttccgacgtcggccagcgccccgcccagagtgaacactcccagtttctccggccagccagataaggggtcaagcggcggcgcatacatgctacagaagctgatcgaagaaactgacagatttgtggtctttacagaagaggagtctggcatgtcagaccagctctgcggcatcgcagcttgtcagaccgatgacatttacaacaggaactgcctcatagagctcgtcaattgtcagatggttttaagaggggctgagacagaggggtgtgttatcgtttcggcggcaaaggctcagcttctccaatgccagcatcaccctgcctggtatggggacacactgaagcagaaaacatcatggacatgtctccttgacgggatgcagtacttcgctaccactgaaagttcaccgaccgagcaggatgggcgacagctctggctggaagtgaaaaatattgaggaacaccgacaacgaagcctggattccgtccaggagttgatggagtccggccaggccgttggaggaatggtcaccaccactacggattggaatcagccagctgaagctcagcaggcccaacaggttcagcggattatttctcggtgcaactgtagaatgtactatatcagttattcccacgacatcgacccagaacttgctactcagataaagcccccagaagtccttgagaaccaagaaaaggaagatctccttaaaaaacaggagggagccgtcgatacttttacattgatccaccatgagctagagatttccacgaacccagctcagtacgcgatgatcctggacattgtgaataaccttctgctgcacgtggagcccaaacgtaaggaacactctgagaagaagcagagggtgagattccagctcgaaatctcctccaaccctgaggaacagaggtcttcaatcctgcacctgcaggaggccgtgagacagcatgtggctcagattcggcagctcgagaagcagatgtattccattatgaaaagccttcaagacgattcaaagaatgaaaatctgctggatctgaaccagaagctgcaattacaactgaatcaagagaaagcaaacttgcagctcgaaagcgaagagctaaatattctgatccgctgcttcaaagactttcaactgcagcgagctaataagatggagctgcgcaagcagcaagaggatgtgagcgtggtgcgacgaacggagttctacttcgcgcaggccaggtggagattaaccgaggaagacggccagctcggaatcgctgaattagagctgcagagattcctgtacagcaaggtcaacaagtctgacgacactgccgagcatttgctcgaattgggatggttcactatgaataatctgcttccaaatgccgtatacaaggtagtgctgcgtcctcaatcctcctgtcagtcaggccggcagctggccctgagattatttagtaaagtccggcctcctgttggcgggatcagcgtgaaggagcactttgaggtaaacgttgtgccgctgaccatccagctgacccatcagtttttccaccggatgatggggttcttcttcccggggagaagcgttgaggatgatgaagttggagatgaggaagataaatcaaaactggtgacgacaggcatacccgtcgttaagccgcggcagctcatcgctactgatgacgctgtgccactgggcccgggtaaaggggtagcccaggggcttacacggtcctcaggcgttagaagatcctttcggaagagtcctgagcaccccgtggatgatatcgataaaatgaaggagcgggctgcgatgaataattcattcatttatataaagataccccaggtgccattgtgcgtctcttataaaggtgagaagaatagcgttgactggggtgacttaaacctggtattgccttgtctcgagtatcacaataacacgtggacatggcttgatttcgctatggctgtgaagagggattcccgaaaagctctggtggcacaggtgatcaaggagaagcttcggctgaagtctgcaacagggtctgaagttcgcggcaagctggaaactaagagcgatctgaatatgcagcagcaagaggaggaggagaaagctcgactcttaatcggactatctgtcggagataaaaatcccgggaagaaatccattttcggccgcaggaaatag

SEQ ID NO: 181525 - DNA, 6707 bp, Artificial Sequence
  derived and/or modified sequence
atgcctctgttcttctccgccctcctcgtgttacttctggtggccctctccgcacttttcttaggccgatggcttgtggtgagactggccaccaaatggtgtcagcgcaagttacaggcagagctgaagataggctcctttagattcttttggatccaaaatgtgagcctgaagttccagcagcatcagcagacagtggaaatcgataacctttggataagctctaagctactaagccacgacttgccacactacgtcgccctctgcttcggcgaggtgcggataaggacggatcttcaaaaagtctcagacctgtctgcaccctttagccagtctgccggagttgatcaaaaagagctgagtttttcacctagcctcctcaaaatattctgccagttattttcaatccatgtagatgctatcaacataatggtcctgaaagtcgacacaagtgaatctctttggcacattcagattagccggtccagatttctgctggattccgatgggaaaagactcatctgcgaggtttctctgtgtaaaatcaattcaaaggtgttgaagtccggccagctggaggacacttgtctagtggaactgagcctggcactcgatctttgcctgaaggttggcatttcttcccgccacctgaccgccattaccgtggatgtgtggacactgcacgctgagctgcacgaggggcttttccagagccaactgctctgtcaaggtccctcactggcctctaaacctgtcccctgtagcgaggtgacagagaaccttgtcgagcccaccctgccgggactttttctgctccagcagctcccagaccaggtcaaggtgaagatggagaacacctctgtggtgctgtctatgaattcacagaaaaggcatctgacctggactctcaaactgctgcaattcctgtaccatcgagatgaagaccaactgccactccgttcctttactgcaaacagcgacatggctcaaatgtctacagagctcttactcgaagacgggctactgctgagccagagcaggcagcggatcgtgtgcctcaacagtctgaaagcctccgttcaggtgacgaccattgatctgtctgcctccctggtcttaaatacctgtattatccactacagacaccaggagtttagccattggttgcacctactagcactggagacccaaggatcttcaagcccagtgctgaaacagcgaaaaaaacggaccttcccccagatcttagcacctattatcttcagtacatctattagcaacgttaacattagcatccagctaggtgacaccccaccttttgccctgggctttaatagcatctcactggactaccagcaccttagaccgcagtctatccaccagcggggagtgctaaccgtggaccacctttgttggcgcgtaggatctgatagccatatccaacgtgcccctcacccacccaatatgcacgtgtggggagaggccttggtgcttgatagctttaccctgcaggggagctacaaccaaccattgggcctgtccagtacgcagtctgacaccctgtttctcgattgtacaattcggggactccaagttgaagcttctgatacgtgcgcccagtgtctcagtagaatcctatcacttatgggccctcaaagtgggaaaagtgccgtgagtcgtcactcttcatttggcgagtccgtctccctcctctggaaggtggacctgaaggttgaggacatgaacctgttcaccctgagcgccctagtgggagccagcgaagtccgtttggatactcttaccatcctgggtagtgccgagacatctaccgtgggcattcaaggactcgtcctggctctggtgaagtcagtcaccgaaaagatgcagccctgctgtaaggccccagatattcctaccccagtgctcagtctgagtatgctatccatcacctatcactcatccatacgcagcttggaggtccaatgcggagcgggtctgaccctgttatggagtccacccgatcacatgtacttatatcaacacgtgctggccacgttgcaatgccgggatttgctgcgggcaacagtttttcctgaaactgtgcctagcctagccttggaaacctccggcacgacatcagaattagagggacgggcacctgaacctctaccccctaagaggttgctcaatcttaccctagaggtctccaccgccaaactgacagcttttgtggccgaggacaagtttattacactggccgcagagagcgtttccctgtcaaggcatggtggaagtcttcaggcttattgtccggaactggcggctgggtttgacgggaattccatcttcaatttcaaagaagttgaggtgcaattattgcctgagctggaggagatgatcctgcatcgtaatcccttccctgcactgcagactcttcgcaatcgcgtgtggttgctctcatttggctccgtgtccgtggagttcccctatcagtacgacttcagccgtactctcgatgaggcagttggggtgcagaaatggctcaaaggcttgcaccagggcaccagagcctgggcatctccttcccccgtgcctctgcctccggacctgttgttgaaggtggagcacttctcatgggtgtttttggatgacgtgttcgaggtgaagctgcatgacaactatgaattaatgaaggatgagtccaaagaaagcgctaaaagactacagctgttggacgcaaaagtcgctgccctgaggaagcaacacggggagctccttcccgcacgcaagatcgaggagctgtatgcttctctcgaaaggaagaacattgagatttatattcagcgaagccggaggctgtacgggaacactccgatgcggagagcgctgctcacttggtccctggccggtctggagctcgtggctctcgccgacgcatcattccatggcccagaacacgtagtggaacaagttcaggagctagaccccggatctcccttccctcctgaaggactggatctggtgatccagtggtgtcgaatgttgaaatgcaatgtgaagtcctttctcgttcgcattcgcgattatccacggtacctgtttgaaatccgggattggaggctgatggggagactcgttggcacggagcaaagtgggcagccttgttcaaggcggcgtcagatactccaccttggattaccatggggcaacgtagctgtggagaggaacatgccgcctcttaaattctaccatgacttccattcagaaatctttcagtacacagtcgtgtggggaccctgctgggacccagcatggaccctgattggccagtgtgtggacttactcaccaaaccttcagccgacccctccccccctctgccatggtgggataaaagtcgcctgctctttcacggtgattggcatatggacattgagcaagccaacctccaccaactcgctaccgaagacccctacaataccaccgagaacatgcattgggaatggtctcatctgtcatttcactggaagccagggcagtttgtgttcaagggtgatctggatattaacgtgcgcacagcaagcaagtacgacgactgttgctttctccacttgccggacctctgtatgacactcgatctccagtggctgtgccatggtaatcctcacgaccaccattctgtgacccttagagccccagagttcctccctgaggtccccttaggccaactgcatgacagctatcgtgcttttcgctcggagaatctcaacctgtctataaaaatggacctcacaaggcacagtggcactatttcccaacctagaatattactgtattcgtcgaccttacgatggatgcagaatttctgggcaacctggacatcagtgacaagacctatctgccggggtaagctctttaataacttgaagccttctaagaagaaactgggtcagcattataaacaattatcctacactgcactgtttccccagctgcaggtacactactgggccagttttgcccagcagaggggcatccagattgaatgttcacaaggacatgtgttcacccgtggaactcaaaggcttataccacaggccggaaccgttatgcggcgactgattagcgactggtcagtgactcaaatggtgagcgacctgtctcaggtaaccgttcatctgatggctagcccaaccgaagagaatgccgaccattgtctggatcccttagtgacaaagacgcatctgcttagtttgtcttctttgacctatcagagacattcaaataggacagccgaagaggaactttccgcgagggatggtgatccgacctttcacacccaccagttgcatctggtcgatctccggatctcctggacaacaacaaacagggatatcgcgttcggcctgtacgatggctacaagaaagcagctgtactgaagaggaacctctcaaccgaggccctcaagggactgaaaattgatccccagatgcccgctaagaagccaaaacgcggtgtgcccacgagcgcctccgcccctcctagggttaacactccaagcttcagcggccagcctgacaaagggtctagcgggggagcttacatgctgcagaagctgatcgaagagacagatagatttgtcgttttcaccgaagaagagagtggtatgtctgaccagttgtgcggcattgccgcttgtcagactgacgatatatataataggaattgcctgatcgagctggtcaactgccaaatggtactccgaggggcagagacggagggatgcgtcattgttagcgccgcaaaagcacaacttctgcagtgccagcaccacccagcctggtacggggataccctgaaacaaaagacctcctggacatgtctcctcgacggaatgcagtactttgccaccacagaatcatccccgacagagcaggatgggcgacagctgtggctagaggtcaagaatattgaggaacacagacagcgtagcctggatagtgtgcaggaactgatggaaagtggtcaagcagtcggaggaatggttacgaccacaacagattggaatcagcctgcagaggcacagcaggctcagcaggttcagagaatcatctcacggtgcaactgtaggatgtattacatcagctattctcatgacattgacccagaactggcaacccagataaagccaccggaggtgctagaaaatcaggagaaagaggacctgctaaaaaaacaggagggagccgttgatacctttacgcttatccatcacgaattagaaatatcaaccaatcctgcacaatacgccatgatcctggatatcgtcaataatcttctgttgcacgtcgagcccaaaaggaaagaacactccgagaaaaagcagagagtgcggtttcagcttgaaattagctccaatcccgaggagcagcggtccagcattctgcacttgcaggaagctgtgaggcaacacgtcgcccagatccgacagttggagaagcagatgtattcgattatgaaaagtctccaggatgattctaagaatgagaacctgcttgatttaaatcagaaactacagttgcagctgaaccaggagaaggccaatttacagctggagtccgaagagctcaatatcctcattaggtgttttaaggacttccagctgcagcgggctaacaaaatggagttacgaaaacagcaggaggatgtgagtgtcgtcaggcgaaccgagttctatttcgcccaggctcgttggcgcctaacggaggaagatggccagttaggcattgccgaactagaactgcagaggtttctttattctaaagtgaacaagtctgacgacacagcagagcacttactcgaattggggtggtttacaatgaacaaccttctgcccaacgccgtttataaggtggtgctccggcctcagtcttcgtgtcagtcgggccgacagttggccttgaggctgttctccaaagtgaggccccctgtcggaggtattagcgtcaaggagcactttgaggttaatgttgttcccctgacaattcagctgacacaccagttttttcacaggatgatgggtttcttcttccctgggaggtcagtggaggacgatgaggtgggggacgaagaagacaaaagcaagctggttacgactggaattcccgtggtcaaaccacggcaactgatcgcgactgacgatgccgtaccacttggtccgggtaagggggtggcccaggggcttactcgttcttctggtgttaggcgcagcttccgtaagtcacccgaacatccggtggacgatatcgacaagatgaaggagcgtgccgctatgaacaattctttcatctacattaagattccacaagtgcccctctgtgtgagctataagggagaaaagaactccgtggactggggggatctgaacctggttttaccctgtctggagtatcacaataacacttggacctggctggatttcgccatggccgtaaaaagggacagcagaaaagcgctggttgcacaagtgatcaaagaaaaactgcggttgaagtctgcaacaggatccgaagttaggggcaagctggagacaaaatcagatctgaacatgcagcagcaggaggaggaggagaaggcccgtctgctgattggtttgtccgtgggcgataaaaacccaggaaagaaatccatttttgggagacggaaata

SEQ ID NO: 181526 - DNA, 6617 bp, Artificial Sequence
  derived and/or modified sequence
atgcctctgttcttcagtgcactgttagtgctcctgcttgtggccctgagcgctttgtttctgggacgctggctggtcgttaggctggctaccaaatggtgtcaacgaaaactccaagccgagctcaagatcggttcctttaggttcttctggatccagaacgtttctctcaaatttcagcagcatcagcaaactgtggagatcgataacctgtggatcagctcgaaactgctaagccacgacctccctcattacgtggcactctgcttcggagaggtgaggatacgcacagacctccagaaggtgagcgacctgagcgcgccattctcccagagtgcaggagtggaccagaaggaactatcgttctccccctctctgctcaagatcttctgtcagctgtttagcattcatgtcgatgctatcaatattatggtgttgaaagttgatacctccgagtcgctttggcacattcagatttctagatcccggttcttactcgattcagatgggaagcggctaatttgtgaggtctccctgtgcaaaataaactcaaaagtcttgaagtctggccagctggaagatacgtgtctggtcgagcttagcttagccctcgacctctgtctgaaggtcggaatttccagccggcatctgacagcaattacggtagatgtatggacattgcatgccgaactccatgagggactcttccaatctcaattactgtgccagggcccatcacttgcttctaagccagttccctgttcagaagtcactgaaaatctggtagagccaacactgccgggattgttcctcctccagcagctgccagatcaggttaaggtcaagatggagaacaccagcgtcgtgctgagtatgaactcccagaaacgacacctaacttggacactaaagcttctgcagttcctgtatcaccgcgatgaagaccagctccctttgagatcctttactgccaactctgatatggcccagatgagtactgagttgcttctggaagacggcctacttctctcgcagtcccgacagcgtatagtgtgtctgaactctttgaaagccagcgttcaggtgacaaccatcgacctgtcggcctccctggtactgaacacgtgcattatacattatagacaccaagaattctcccactggctccatctcctcgccctggaaacacaggggagctcttcaccggtcctaaaacagagaaaaaagaggacctttccacaaatccttgcccctattatctttagtacgtctatatccaacgtgaacatctctatacaactcggtgatactcctccatttgcccttggcttcaatagtataagcttggattatcagcatctgcgaccccagagtatccatcagcggggagtgcttaccgtggaccatttatgctggagggtggggtccgacagtcacatccaacgggctcctcaccctcccaacatgcatgtgtggggtgaagcattggtcctagatagttttactctccagggatcgtacaatcagcccctgggactctcctctacccagagtgacaccctattcctcgactgtaccatcaggggcctccaagtcgaggccagcgacacttgcgctcagtgcctcagtagaatcctgtcccttatggggccacagagcggcaaaagcgcagtgagtaggcactccagttttggcgagagtgtaagcctcctgtggaaggtcgacttgaaggtggaggatatgaatttgttcactttaagcgccctcgtgggtgcctctgaggttcgcctggacaccctgactatcttaggttccgccgagactagcactgttggcatccaaggcctggtgttggcgcttgttaaaagcgtgacggagaagatgcagccatgctgcaaggccccagatatcccaacgccggtgctcagccttagcatgcttagcatcacttaccacagcagtatccgctccctggaagtgcagtgcggagcaggactcacactgttgtggtcaccacccgatcacatgtacctataccaacatgtgctggcgacgctgcagtgcagagacctattgagggcgaccgtcttcccagaaactgtaccttccttggcgctggagacctcagggactacatctgagctggaaggaagagccccagagccccttcccccaaaacggcttctcaacctgacattggaagtctctactgccaaattaaccgctttcgtcgccgaagataagttcatcaccttagctgcagagtctgtctctctgtctaggcacggcggttcgctacaggcttattgtcccgagttggcagctgggtttgacgggaattccatattcaattttaaggaggtcgaagtgcagctgctgccagaagtagaattcccctatcagtacgattttagtcgcaccctagacgaagccgtgggtgttcagaagtggttgaaggggctgcatcaaggtactagggcctgggcaagtccatctcccgtcccactgccccctgatctcctgcttaaagtggaacatttttcatgggtttttctggacgatgtgttcgaggtaaagctgcacgacaactatgagctgatgaaggacgagagcaaggagtcggccaagcgattacaactcctggatgcgaaggtggccgctcttagaaagcagcatggcgaactcctgcccgctaggaaaatagaagaactgtatgccagcctcgaaagaaagaatatcgaaatctacatccagcggtcccggagattgtacgggaataccccgatgcggcgagctctgctgacctggagcctggctggcctggaattagttgctctcgcagacgcatctttccacggacccgagcacgtcgtcgaacaggttcaagagctggatccgggatcaccattccccccagaaggcttggaccttgttatccaatggtgccgcatgttaaagtgtaacgttaaatcctttctggtaaggataagggattatccccgttacctgttcgaaattagagattggagactcatgggtcgtctcgtgggaaccgagcagagtggccaaccttgttcccgcaggcgtcagattttgcatctggggcttccttggggtaacgtggccgttgagaggaacatgcctcccctgaagttctaccatgatttccatagtgaaatctttcagtacacggtggtgtggggtccatgctgggatccggcttggaccctaattgggcagtgtgtggaccttctgaccaaaccaagcgcggacccaagtccccctttgccctggtgggacaaatcacgcttacttttccacggtgattggcacatggacatcgaacaagctaatctgcaccagctggccaccgaggatccttataacaccacagaaaatatgcactgggagtggagccatctatctttccactggaaacccggacaattcgtctttaagggcgatttagatattaacgtgaggacagcttccaaatacgacgattgctgttttttgcacctgccggatctgtgcatgacgctcgaccttcagtggctgtgccacgggaatccccacgatcaccactccgtgactctgcgggcacccgaatttttaccagaagtgcccctcgggcagctgcacgattcttatagggccttcaggtcggagaacctcaatctcagtatcaagatggaccttacccggcattcagggacaatatctcaaccacgcatcctgttatatagctctacgctgaggtggatgcagaacttttgggctacatggaccagcgttacacggcctatctgccgaggcaagctgtttaataacctcaaacctagcaagaaaaagttaggtcagcactataaacagctcagttacaccgccctgtttcctcagctacaggtgcattactgggccagtttcgcacagcaaagagggatacagatagagtgctcccagggtcacgtgtttacacggggaacccagcggctgataccacaagcaggaacagtgatgcggagattgatatctgattggtcagtgacccagatggtgtccgatttaagccaagtaacagtacatctcatggcttccccgactgaagaaaacgcagaccactgtttagacccactcgtgaccaagacccatctgctctctctctcctcattgacttaccagcgccatagcaaccgtaccgctgaggaggaacttagcgccagagatggtgacccaacattccacacgcatcagctgcacctggtcgacctgagaatatcctggacaaccacaaatcgggatatagcgttcgggctttacgacgggtataaaaaggcagcggtgctgaagagaaatctcagtactgaagctcttaagggactcaaaatcgacccacagatgccggcaaagaagccgaagcgcggtgtccccacgagtgcatcggccccacctcgggttaatacacccagtttctccgggcagcccgacaaaggcagttccgggggagcctacatgctgcaaaaactgatcgaagagaccgacagatttgtggtgttcactgaagaagagtccggaatgagcgaccagctttgcggcatcgccgcttgccagacggatgatatttataatagaaactgtctgatcgagctggtaaactgtcagatggtgttacgcggagcagaaactgagggttgtgtaattgtgtctgccgctaaggcccagttgctgcagtgtcaacaccatccagcttggtacggtgataccctcaagcagaagacctcttggacctgccttctcgacggtatgcagtactttgctaccactgagagttctcccactgagcaggacggccgacagctgtggctagaagtaaaaaacatcgaggaacacaggcagagatctcttgatagtgtccaagagctcatggagtcgggacaggctgttgggggaatggtgacgactaccactgactggaaccagcccgcagaagcccagcaggcccagcaggtgcagcgaataatcagccgttgcaattgccgaatgtactacatctcctatagccacgatatcgaccctgaacttgctactcaaatcaaaccacccgaggtgttagagaaccaggaaaaggaggacctgctcaagaaacaggaaggggctgtggacacattcactctgatccaccatgagctcgaaatctccaccaatccagcccagtacgctatgatactagatatcgttaacaatctcttgcttcatgtcgaacctaagaggaaagagcacagcgagaaaaagcaaagggtgcggttccagctcgagatttcctctaaccccgaggagcagaggtcctccattctgcacctgcaggaggccgtcaggcagcatgttgcccagattcgccagttggagaagcagatgtacagtattatgaaaagcttgcaggatgatagcaagaatgagaacctattggatcttaaccagaagcttcagctgcagttgaatcaagagaaggccaatttacagctcgagagcgaggagctgaacattttgattagatgcttcaaagactttcagttgcagagggccaacaaaatggagctgcgtaagcagcaggaagacgtctccgtggtgcgtcgaaccgagttctactttgcccaggcccgatggaggctcactgaggaggatggacagcttggaatcgcagagctggaactgcaacgttttttgtactctaaggtgaacaagtcagatgatacagccgagcatctgctggaactcgggtggtttaccatgaataacctgcttcccaatgccgtctataaagtggtgctgcgaccccaaagttcctgtcagtcggggcgacaactagctcttaggttattttcaaaagtccgccctcccgtgggcggtattagcgtcaaagagcacttcgaggttaatgtagtgcctctcactattcagctgacccatcaattttttcacaggatgatgggattctttttccccggaaggtctgtggaggacgatgaggtcggagacgaagaggataagtccaagcttgtgactacgggtattcctgtcgttaagcccaggcagcttattgccacggatgacgccgtgcctctagggccagggaaaggcgtggcacaagggctgacccgtagttccggagtgcgaagaagctttcgaaaaagtccagagcaccctgtggacgacatcgataagatgaaggaaagagctgctatgaataacagctttatctatatcaagattccgcaggtgccactgtgcgtctcatacaagggtgagaagaatagcgtagactggggggacctgaatctggtcctcccatgccttgagtaccacaacaatacgtggacttggctggacttcgccatggcagtgaagcgcgatagccgaaaggccctggtcgcacaggtgatcaaggaaaaactaaggctgaagagcgccacagggagtgaagtgagaggcaagcttgaaaccaagtccgaccttaacatgcagcagcaggaggaagaggagaaagcacgactgcttattggcctgagtgtcggggataagaatccaggcaaaaaaagtatattcggaaggcgcaaata

SEQ ID NO: 181527 - DNA, 6707 bp, Artificial Sequence
  derived and/or modified sequence
atgcccctattcttttccgctttactggtcctgctattggtggctctctccgcattgttcctggggaggtggttggttgtccggctcgcaacaaagtggtgtcaacggaaactacaggcggaactgaagattggatcttttaggttcttctggatccagaatgtcagccttaaatttcaacagcaccaacagaccgtagaaattgataacctctggatatcctcaaagctcctttctcatgacctgccgcactacgtggccctctgttttggcgaggtacgcatacgcacagacctacagaaagtttccgatctgtcagccccattttctcagtctgcaggcgttgaccagaaggagctgagtttcagccctagccttctgaaaatcttttgccagttgttttccattcatgtagatgcaattaatatcatggtgttgaaggtcgacacatcagagagtctgtggcacatccagatttctcgcagcagatttttattagatagcgatgggaagcggctgatttgcgaggtgtctctgtgtaaaataaattctaaagtgcttaagtctggccagctcgaggacacctgcctggtcgagctgtctctcgctctcgatctgtgtctgaaggtgggcatttcaagcagacacctgacagccattactgtagatgtatggacactccatgctgagctgcacgagggactattccagtcccagctcttgtgccaggggccatccctggcaagtaaacctgtgccgtgctctgaagtgacagagaatctggtggaaccgactttgccgggtctatttttgctccagcaactgcccgaccaggtaaaggtgaagatggagaatacatctgttgtgttatctatgaactcccagaaacggcacctgacttggacgctgaaacttctccaattcctgtaccacagagatgaagaccagctacccctacgatcatttaccgccaactcagacatggcacagatgtccaccgaattgctactggaggacggcctgttactgtcgcagagccgacagagaatagtctgcttgaattcccttaaggccagtgtgcaagttacaaccatagacttgagtgcaagcttagtcttgaatacctgcattattcattataggcaccaggagttcagtcactggctccatctgctggccctggaaacacagggatctagttctccggtgctcaagcagagaaagaagaggacatttccacaaatcctggctccaatcattttttcaacatctattagcaacgtaaacatctccatccagctcggtgacacacctccttttgctctgggtttcaacagtatatcgctggactatcagcatttgagacctcagtccatccaccagcgaggagtgctcaccgtggatcacctatgctggcgagtcgggagcgattcccacatccagagggccccacacccgcctaacatgcacgtgtggggcgaggcattagtgctggattccttcacactgcagggcagttacaaccagcccctagggttgtcaagcacccaaagcgataccttgttcttagactgcacaattcgcggactccaagtggaagcatctgatacttgcgcgcagtgtctgagcaggattctgtccctgatgggaccccagtccggcaagtcagcggtgtctaggcactcaagctttggagagagtgtttccttgctctggaaagtcgatttgaaggtcgaagacatgaatctgtttactctttctgcactggtgggcgcaagcgaggttagacttgataccctgaccatcctggggtccgccgaaacatccaccgttggaattcaaggattagtgctggccctggtcaagagcgtgacagaaaaaatgcagccctgttgtaaagcccctgatatacctacacctgtattgagcttgtctatgctttccattacctaccatagctctatccgcagcctggaagttcagtgtggggcagggcttaccctactgtggagtcccccagatcatatgtacctgtaccagcacgtattggcgacgctccagtgtcgggatcttttgagagcgaccgtcttcccggagaccgtgccaagcctggcactggaaacctctggcactacaagcgaactggagggcagagcaccggagccattgccgcctaaacggttactgaatctcactcttgaagttagcacggctaagctgacagcctttgtggccgaagataagtttataaccctggcagcagaaagtgtgtccctctcccgccatggtggatctctccaggcatattgccccgaactcgccgcagggttcgatggaaacagtattttcaattttaaggaggtggaggtccagctgctgcccgaactagaagagatgatcctgcatagaaaccctttccctgctctgcaaacattacggaaccgcgtgtggctgttgtcttttggcagtgtgagcgtcgaatttccttaccagtacgatttctccaggacactcgacgaggccgtgggagttcagaagtggcttaagggactgcatcaaggaacacgcgcatgggcttctccaagcccggtccccttgccacctgacctgctgcttaaggtggaacattttagttgggtctttttggacgatgtgtttgaagtcaagctgcacgacaactatgagctgatgaaagacgagtcaaaagagagtgccaaacgattgcaactccttgatgccaaggtggccgctctgcgaaaacagcacggcgagttattaccagctagaaaaatcgaggagctctacgctagcttagagaggaaaaatattgagatttacattcagaggtcccgccgactttacggcaatacccctatgaggagggccctgctgacttggtctttggccggactggagctagtggctttagcagatgcctcattccatgggcctgaacacgtcgttgagcaggtgcaggaactagatcctggcagcccattcccgcctgagggattggatctcgtgatccaatggtgcaggatgctaaagtgcaatgtgaagtcttttcttgtcaggattagagattaccctcggtaccttttcgagataagggactggagactcatgggtcgccttgtgggcaccgaacagtcaggccagccttgctctcgaaggcgccagattctgcatctcggtctgccctggggcaacgttgccgtcgaaagaaatatgccacctctgaaattctatcacgactttcacagtgaaattttccagtacactgtcgtatgggggccatgttgggaccctgcttggaccttaataggccagtgcgttgatctacttacgaagccttctgccgatccgagccccccattgccttggtgggataagtccagactcctcttccacggtgactggcacatggacatcgaacaggcaaatttacatcaactggctactgaggatccttacaacaccacagaaaacatgcattgggaatggagccatttgagcttccattggaagccagggcagtttgtgtttaagggagacctggatataaacgtgagaactgccagtaagtacgatgattgctgctttctgcatttgcctgatctgtgcatgacgctggatctccagtggctctgccacgggaaccctcatgaccaccacagcgtcactcttcgggctccagaatttctgcccgaggtacctcttgggcagctgcatgactcatatcgagcctttaggtcggagaatctgaacctatcgatcaaaatggacctgactcgacactcaggtactatctctcagcccagaatcttactatactcttcaaccttgaggtggatgcagaacttctgggccacctggacctccgttacgaggcccatctgtcgcggaaaactgtttaacaatctcaagccaagtaagaaaaaattgggccagcattacaagcagctgagctacaccgcgcttttcccccaattgcaggtgcactattgggcttcattcgcacagcagaggggcatccagatagaatgctcccagggccacgtgttcacacgaggaacccagcgtctcattccgcaggcgggaacagtgatgcggaggctcatctcagattggtctgtgacgcagatggtgagcgacttatctcaggtgactgtgcacctgatggcaagcccaaccgaggagaacgcggaccattgcttagaccctcttgtgactaaaacccacctcctaagcctttcgtctctcacctaccagcggcactccaatcgaacagctgaagaagagctaagcgctagagacggggacccaacttttcacacgcatcagttgcacttggtcgatttgaggattagttggacaacaactaatcgagacatcgcctttgggctgtatgatggatataaaaaagcggcagtgctcaagcggaacctttcaaccgaagctctcaagggcctgaagattgatcctcagatgccagccaaaaagcccaagcgcggtgtacctacctcagccagtgcccctccacgcgtcaatacaccctcatttagtggccagcctgataagggctcatccgggggagcttatatgctgcagaaactcattgaggagaccgacagattcgtggtctttaccgaagaagagagcggaatgtcggatcagctttgtgggatcgccgcttgtcagactgacgatatctataatcggaattgtctcatcgagctggtcaactgtcagatggtgctgcgcggagccgaaaccgagggctgcgtcattgtttctgctgctaaggcacaactcctccagtgccagcaccaccccgcttggtacggtgacacactgaaacagaagacgtcctggacttgccttcttgacggaatgcagtactttgctacaaccgaatcatcacccacggagcaggacggtcgccagctgtggctcgaggtgaaaaatatagaagaacacaggcagcgcagcctggattcggtgcaggagttaatggagagcggtcaagccgtagggggtatggtgaccactacaacagattggaaccagcccgctgaagcacaacaggcacagcaggtccagcgtatcattagccgctgcaattgccgtatgtattacataagctactcccatgatattgatccagagcttgccacacaaattaaacccccagaagtgcttgaaaatcaagagaaagaagacttacttaagaagcaggagggggctgtggatacgttcactttaattcatcacgaactggagatttcaaccaatcctgcccagtatgcaatgatcctggacattgtgaataatctcctcttacatgtggaacccaagcgcaaagagcactccgagaaaaaacaaagagtgcgctttcagctcgagatctcttctaatcctgaagagcaaaggagttcgattctgcacctgcaggaagcagtgcggcagcatgttgcacagatccgccagctggagaagcagatgtatagtataatgaagtccctgcaggatgatagcaaaaacgagaatctgttggacctgaatcaaaaacttcagttgcagttaaaccaggagaaagcaaacttgcagctggaatctgaagagctgaacatccttattagatgttttaaggacttccagctgcagcgcgcaaataaaatggagctccgcaagcagcaggaagatgtctcagtagttaggaggactgaattctacttcgcacaggcgagatggcggctgactgaggaggatggacagctgggcattgccgagctagaattacagcgattcctatactccaaagtgaataagagcgacgataccgccgagcacctcctggagctgggctggttcaccatgaacaacctcttgcctaatgcagtgtataaggccatattgcgaccccaatcctcctgccagtctgggagacagctggcactacggctcttttcgaaagttcgtccaccagtggggggaatttctgttaaagagcatttcgaggtgaacgtcgtgcccctcactattcagttgacgcatcagttcttccacagaatgatggggttcttttttcccggtcgtagcgtcgaagatgacgaggtgggagacgaggaggacaaatcaaagctagtgaccacgggtatccccgtagtaaaaccacggcagttgattgcaacagatgacgcagtcccactcggaccagggaaaggcgttgcacaggggctgactcggtcctcaggtgtgcgccgttctttccgcaagtcacctgagcatcccgttgacgatatcgataaaatgaaggaacgcgcagccatgaataattctttcatctacatcaagatacctcaggtgccactgtgcgttagttacaagggggagaaaaactccgtcgactggggcgatcttaatctcgtgctgccttgcttagagtaccacaataatacatggacctggcttgacttcgccatggcagtgaaacgggacagtcggaaggccctagtggcccaggttataaaagagaaactgcggctgaaaagcgcaacaggaagcgaggttcggggaaaactagagactaaatctgatttgaacatgcagcaacaggaggaagaagaaaaggcaaggttgcttataggattaagcgttggagataagaacccgggaaagaaatcaatctttgggcgacgaaaata

SEQ ID NO: 181528 - DNA, 6279 bp, Artificial Sequence
  derived and/or modified sequence
atggttctgaaggttgacaccagcgagtccctgtggcacatccagatctccagatcccggtttctgttggactccgatgggaagcgcctcatttgcgaggtaagcttatgcaaaattaactccaaagtgcttaaaagcggacagctggaggacacgtgtctggttgaacttagtctcgctttggatctgtgcctcaaggtcgggattagttcgagacacttgaccgccatcacagtagatgtgtggaccctccatgccgagctccatgaaggcctcttccagtctcagttgctctgtcaagggccatccctggcttccaagcccgtaccttgctctgaggtgacagaaaaccttgtcgaacctactctgcccggtctctttttgttacagcagctgcccgatcaagtgaaggtcaagatggagaatacatctgttgtactgtccatgaatagtcaaaagagacaccttacctggactttgaagctgctacagtttctctatcacagagatgaggatcagctcccactccgttcctttacggccaattcagacatggcacaaatgtcgactgagctcctgctcgaggacggccttttgctaagtcagtcccgacagcgcattgtgtgtcttaacagcctgaaagcctccgtgcaggtgaccactatcgacttatccgccagtttggttcttaacacatgcattatacactatcggcatcaagaatttagccattggctgcatctcctggcccttgaaacacagggcagctcctcacccgtgctcaaacaacggaagaagcgtacatttccccaaatcctggcgccaattattttctcaacaagtatctccaacgttaacatttcgattcagctaggggacaccccaccctttgctttgggattcaattctatttctcttgactaccagcatttgagaccccagtcaatccatcagcggggagtgctaacagtggatcatctgtgttggcgagtgggctccgattcacacatccaaagagccccacatccccctaatatgcatgtgtggggggaagctctcgttttggactcctttaccctacaggggtcctataaccagcccctgggactgagttcaacccaatccgatactctgtttctggattgcacaattcgcggattgcaggtagaggcaagtgacacgtgcgctcagtgtctctcccgcatccttagcctgatgggccctcaatccggcaagtctgcggtctccagacacagtagcttcggtgagtccgtgagtctgctctggaaagtcgacctgaaagtcgaggatatgaacctgtttacactgtctgcgcttgtgggggcttctgaagttcgactcgacaccttgacaattctgggctcagccgagacctctacagtgggcatccaaggccttgttttagcactcgtgaagtctgtgactgaaaaaatgcaaccgtgttgtaaggccccagacattcctacgccagtgctctctctgtctatgctgagcatcacataccactcctcaattcggagcctagaggtccagtgcggggctgggctcacattactgtggagccccccagaccatatgtacctgtaccaacacgtccttgccaccctgcagtgcagggatctcctcagggctacagtgtttcccgagaccgtcccatccctggctctggaaacttcaggcacaacatcagaactggagggacgggcacctgagcctctgccgccaaagaggctgctaaacctgacacttgaggtttccactgccaaactcaccgccttcgtggcagaagataagtttattacactagctgcggaatcagtctcactgtcacgccatggagggtccctgcaggcatactgtcccgagctggcagcagggttcgatggcaattccattttcaattttaaagaggtggaagtgcagttattgccagaattggaggaaatgatcttacatagaaaccccttcccagctttgcagacactgcggaacagagtctggctactcagctttggctctgtctctgttgaattcccgtatcaatatgacttcagtcggactctggatgaggcagtgggagtgcagaagtggctgaaaggactgcaccagggaacccgggcttgggcttctccttcaccagtgcctctgccaccagacctattgctcaaagttgagcacttttcttgggtttttttagatgatgtgtttgaggtaaaattgcatgacaattacgaactaatgaaagacgagagcaaagaatccgccaagcgactgcagctgctggatgctaaagtggccgctttgcgaaagcagcatggggagctgctgcccgctcgcaagatagaagagctatacgcctctctggagcgaaagaacatcgaaatctacattcaacggtctcggagactatacggaaacacccccatgagacgcgctctactgacgtggtcgttggcaggactggaattggttgcgttggccgacgcctccttccacggtcccgagcatgtagtggagcaagtccaggagttagatcctggtagtccattcccccctgaaggacttgatttagttatccagtggtgcaggatgctgaaatgcaacgtgaagtctttccttgtccgcattcgtgactatccgagatacctgttcgaaatccgggactggcggcttatgggacggctggtgggcaccgaacagagtggccagccttgtagtcgtcggagacagattctacacctcgggttgccttggggtaatgtggctgtggagagaaacatgcctccactcaaattctatcacgatttccactcggagatctttcagtacactgtagtgtgggggccatgttgggatcccgcttggacactgatcggtcagtgtgtcgacttgttgaccaagccatccgccgacccatccccgcctctgccgtggtgggataaaagcagactgctctttcacggggactggcatatggatatcgagcaggccaatctacaccagctagccacagaagacccctacaatactaccgagaatatgcactgggagtggtctcacctgtctttccattggaagccgggacagtttgtcttcaaaggagatctcgatatcaacgtgcggacggcaagcaagtacgatgattgttgttttctgcacctacctgatttatgtatgacgcttgacttacagtggttatgtcatggtaatccccatgaccaccactccgttactctgcgggcacctgagtttctgcccgaagtgcccctagggcaattgcacgatagctacagggcttttcgctcggaaaacctgaacttgagcatcaaaatggacctaacacggcatagcggcacaatcagtcaaccacgcattctgttgtactcaagcacactgaggtggatgcaaaatttctgggcgacctggactagcgtgactaggcccatatgccgtggcaagctgttcaacaaccttaagccttctaaaaaaaagcttggccagcattataagcagctgtcatacactgctctgttcccacagctccaggtgcactattgggcgtctttcgcacagcagcgtggtatccagatcgaatgttcgcaaggccacgtattcactagaggcactcaacgcctgattcctcaggctggtaccgtaatgcgcaggctgatatccgactggtccgtaacacaaatggtgtctgatctgtcgcaggtgaccgtgcatctgatggcctcacctacagaggaaaacgcagaccactgccttgatccccttgtaaccaaaacacacttactgagcctgtcatcccttacatatcagcggcacagtaatcgcaccgctgaggaggagttgtccgcacgggacggcgaccccacattccacacacaccaactgcaccttgtggacttgagaattagctggacgacgactaatcgcgatatcgcctttggactgtatgatgggtacaagaaggccgcagtgcttaagcgtaacctgagtactgaagctctcaagggtctgaagattgacccacagatgcctgctaaaaagccgaagcgaggggtgcccaccagcgcttcagctccacctagagtcaacacgccaagctttagtggccagccagacaagggaagctccggtggcgcttatatgcttcagaagctcatcgaggaaactgatcgatttgtggtttttacagaggaagagtctgggatgtccgaccagctgtgtggtatcgcggcttgccagactgacgacatttacaatcgtaactgcttgatcgagttagttaattgccagatggttctccggggagcagaaactgaaggctgcgtgattgtctctgcagcaaaagcacagctgttgcaatgtcagcaccacccagcatggtacggagacaccctcaaacagaagactagctggacatgcctactggatggcatgcaatacttcgctacgacagagtcttcacccaccgagcaagatggcagacagttatggctggaggtgaaaaacatagaggagcacaggcagcgtagcctggattcggttcaagaattgatggaaagtggtcaggctgtgggcggtatggtgacaaccactacagactggaaccagcccgcagaagcacagcaggctcaacaagttcaaagaattatctcacggtgcaattgcaggatgtattacatctcatacagtcacgacattgatcctgaactggccactcaaattaagcctcctgaagtcctggagaaccaagagaaggaggatctcctgaaaaagcaggaaggcgcagttgatacgttcacactgatccaccatgagctcgagatatccactaatcccgcacagtacgccatgatccttgatattgttaataatctgctgcttcatgttgaaccgaaaagaaaggagcactctgaaaaaaagcagcgcgtcagattccagctggaaatctcttcaaaccccgaggagcagcgcagcagtatacttcacctgcaggaagccgttcgccagcacgttgcccagatacgtcaactcgagaaacagatgtacagcatcatgaagtcgctccaggatgacagcaagaatgagaatctgttggatctgaaccagaagctgcagctgcagctgaaccaggagaaggccaatctgcaactggagtccgaagaactaaacatcctgatcaggtgctttaaggattttcaactgcagcgggcaaacaaaatggagctcaggaaacaacaggaagatgtgagcgttgtccggaggacagagttctacttcgcgcaggccaggtggagattgactgaagaggacggccagctggggattgccgagctcgagctccagcgcttcttgtactctaaagtgaataaaagcgacgacacagccgaacacttgttagaactcggatggtttacgatgaacaatttacttccaaacgccgtatataaagtggtgctacgaccacagagcagttgtcagtccggtcgtcagctcgcccttagactgttcagtaaagtgcggcctccagttggtggaatatccgtgaaggagcacttcgaagtgaacgtcgttccacttacaatccagctaactcaccaattcttccacaggatgatgggcttcttctttccaggaagatcagtggaggacgatgaggtcggcgacgaggaagataaatctaaactcgtgactacaggtattcctgttgtgaagcctaggcagttgatagccacggatgacgcagttcctcttggtcccggtaagggggtggcacaggggctgacacgaagctcaggcgtgcgacggtcattccggaagtcacctgaacacccagtggacgatattgacaaaatgaaagaacgtgcagccatgaacaactcgtttatctacattaaaattccccaggttcctctttgtgtgtcctataagggggagaagaattctgtggactggggcgacctgaaccttgttttaccctgtttggaatatcataataacacttggacgtggctcgatttcgccatggcggtcaagcgagactctagaaaagccttagtggctcaagtcatcaaagaaaagcttaggctgaagtcagctacgggttcggaggtgcgcggtaagttggagacaaagtccgacttgaatatgcagcagcaagaggaggaggaaaaagcacgcttgctcattgggctatcggtcggcgataaaaaccctggcaaaaaatccatattcggcaggcggaagtag

SEQ ID NO: 181529 - DNA, 7430 bp, Artificial Sequence
  derived and/or modified sequence
cgcgcgcagctggtcggcccgcggcggtgctgcgcggatccggcgtcggggcccggcatggcgggggccggggccaagccgggccggacccggacctaaatgcctctgttcttctccgcgctgttggtcttgctgctagttgcgcttagcgccctctttctaggccggtggcttgtggtccggttggccaccaagtggtgtcagcggaagctgcaggcggagctaaagattggctccttccgctttttttggatccagaatgtcagtcttaagtttcagcaacaccagcaaacagtggaaattgataacctgtggatttccagcaaactccttagccatgatcttccacactatgtggcattgtgctttggagaagtgcgtatcagaacggacctacagaaagtttctgacctgtctgccccattctcccagagcgctggggtggatcaaaaggaactgtccttcagcccatccttattgaagatcttctgccaactattctccattcatgtagatgctataaacatcatggttctcaaggtggatacctctgagtccttatggcatattcagatcagtagaagcagatttcttttggatagtgatgggaaaaggctaatctgtgaggtgagcttatgtaagatcaacagcaaagttctaaagagtggtcagctggaggacacctgcctagtggagctttcactggccctggacctgtgtctaaaggtgggcattagcagtcggcatctcactgctatcactgtggatgtgtggacactccatgctgaactgcatgagggcctcttccagagccaactgctgtgccagggcccaagcctagcatctaagcctgttccctgttcagaggtgacagaaaacttagttgagccaactctgcctggcctattccttctccagcagctgccagaccaggtcaaggttaagatggagaacacaagcgtggtattgtccatgaatagtcaaaagaggcacctgacttggactctgaagctgctgcagttcctgtaccaccgtgatgaggatcagctgccccttcgaagcttcacagcaaactctgatatggcacagatgagcactgaactgctgctggaagatgggttgttgttgtcccagagtcgccaacgcattgtctgcctcaactccctcaaggctagtgtgcaggtgaccaccattgacctctcagcctccctagttctgaacacttgcatcattcactaccggcaccaggaattctctcactggctgcacctgctagcactggaaacccaagggtctagttcacctgttctaaagcaaaggaaaaaaagaaccttcccccaaatcctggctcccatcatctttagcacctccatctccaatgtcaacatttccattcaacttggagatacaccaccttttgccttgggattcaattctatctctctggattaccagcacctcaggccacaaagcatccatcagcggggcgtcctaactgtggaccacctctgctggcgtgtgggcagtgactcccacattcagcgggcgccacacccacccaatatgcatgtttggggtgaggcacttgttctggactccttcacactacagggtagctataaccagcctctgggcctgtccagcacccagtcagataccctttttcttgattgtaccattcgaggacttcaggtggaagcatcagatacctgtgcccaatgtctgtctcgtatcttatccctgatgggtccacaatctgggaagtcagctgtctctaggcactcttcatttggggaatctgtgtcattactgtggaaggtggacttgaaggtcgaagacatgaacttgtttaccctttctgccttggttggtgcttcagaggtacgactggacaccctaactatcctgggcagtgcagagacgtccactgtggggattcaaggacttgtgttagcgctggtgaaatcagtcacggagaagatgcaaccctgttgcaaggcccctgacatccctaccccagtgctcagcctttccatgctctccatcacctatcacagcagcatccgctctctggaggttcagtgtggtgcagggctgaccttactttggagccccccagatcacatgtacctgtaccagcatgtcctggccactctacagtgccgagacctactaagagccactgtgtttcctgagactgtaccatcccttgcactagagacttcaggaactacttctgagctagaaggccgtgcccctgagccattacccccaaagcggctgctaaacctaaccctggaggtgagcacagccaagctcacagcttttgtagctgaggacaagttcattaccctggctgcagagagtgtgtcactgagccggcatggaggttccctgcaggcatactgtccagagctggctgctggctttgatggcaatagtatcttcaacttcaaggaggtggaggtgcagctgctacctgagctggaagagatgatcctccaccggaaccccttccctgcgctgcagaccctccggaaccgtgtttggctcctctctttcggctcagtctcggtggagtttccttatcagtatgacttttctcgaactctagatgaggctgtgggagttcagaagtggctgaagggactacatcaagggactcgtgcttgggcctctccaagccctgtcccactcccacctgatctactcttaaaggttgagcacttctcatgggttttcttggatgatgtttttgaggtgaaacttcatgataactacgagctgatgaaggatgaaagtaaggagagtgccaaaagactacagctactggatgctaaagtggccgcccttcggaagcagcatggggagttgttgcctgcccgcaaaattgaggagctctatgcctctttggaacgcaaaaacattgaaatctacatccagcgttcccgtcgtctctatggcaacacacccatgcgccgggcactgcttacttggagcttagcagggctagaactggtagctctggcagatgcctccttccatggtcctgagcatgtggtagaacaggttcaagagcttgatccaggcagcccttttccccctgagggattagatcttgtcattcagtggtgtcgaatgctcaagtgcaatgtcaagagctttctggttcggatcagggactatccacggtacctgtttgagatccgtgactggcggctaatgggtcgacttgtgggcaccgagcagagtggtcagccttgctcccgtcggcgtcagatcttgcacttggggcttccgtggggtaacgtggcagtggagaggaacatgcccccactcaaattctaccatgactttcactcggaaatattccagtacacagtggtgtggggcccatgctgggatccagcctggacactaattggccagtgtgtggacctcttgaccaagccctcagctgaccccagcccacctttgccctggtgggacaagagccgtcttctgttccatggagactggcacatggacattgaacaggcgaacctgcaccagctggccactgaggatccatacaacacaactgaaaatatgcactgggagtggagccacctgtcttttcattggaaacctggtcagtttgtgttcaagggtgacttggatatcaacgtgagaacagcctctaagtatgacgactgctgcttccttcacctgcctgacctctgcatgacactggacctgcagtggctgtgccatgggaacccccatgatcaccatagtgtcactctgcgggccccagagttcctgcctgaggtgcccttgggccagcttcatgactcctaccgggcctttcgctcggagaacctcaatctctccatcaagatggatctgactcggcacagtggaacaatatcccagccccgaattctgctatatagtagtaccctgcgctggatgcaaaacttctgggcaacttggacaagtgtcacaaggcctatctgcaggggaaagctcttcaataacctgaaacccagcaagaagaaacttggtcagcactacaagcaactttcctatacagccctctttccccagctgcaggtacattattgggcctcatttgcccagcaacggggcatccagattgagtgcagtcagggccatgtcttcactcgggggactcagcggcttatacctcaagcaggcacagtgatgcggcgccttatctctgattggagtgttacccagatggtgagtgacctaagtcaggtgaccgttcacctgatggcctcacccactgaagagaatgctgatcactgtcttgatcccttggtaacaaagacccacctgctgagcttgtcctccctcacctaccaacggcatagcaatcgcacagctgaggaggagctctctgctcgtgatggggatcctacctttcatacacatcagctgcacttagtagatttacggatttcctggacaactaccaatcgagacattgcctttgggttatatgatgggtacaaaaaggcagctgtactcaaacgtaatctttctactgaggccctgaaggggttaaagattgatccacagatgccagccaaaaagccaaagcggggtgtcccaactagtgcctcagccccacctcgtgttaacactcccagcttcagtggacaacctgataaggggtcatcaggaggtgcttacatgttgcagaagctaattgaagagacagataggtttgtagtgttcacagaagaggaatcaggcatgagtgaccagttgtgtggcattgctgcctgccagacggatgacatatacaaccgaaactgccttattgaattggtcaactgtcagatggttcttcgtggagcagagacagaaggctgtgtcattgtgtcagctgccaaagcccaactgctgcagtgccagcaccatccagcctggtatggtgatacattgaagcaaaagacatcctggacttgcctcttggatggcatgcagtactttgccaccactgaaagcagccccacagagcaggatggccgacagctctggttagaggtgaagaatatcgaggagcaccggcagcgtagtctggactctgtgcaggagctgatggagagtgggcaggcagtgggcggcatggttaccacaaccacagattggaaccagccagctgaggcacagcaagcccagcaagtccagcggatcatttcgcgttgcaactgccgaatgtactatattagttacagccatgacattgatcctgaactagcaactcagattaagccacctgaagttcttgagaaccaggaaaaggaagatctcctaaagaagcaggaaggggctgtggataccttcacccttatccaccatgagctggaaatttccaccaacccagctcagtatgccatgatcctggacattgtcaacaacctgctgctccatgtagaacctaagcggaaggaacatagtgagaagaagcaacgggtcaggttccagcttgagatctctagcaatccagaggagcaacgcagcagcatactgcatttgcaggaggctgtgcggcagcatgtggcccaaatacgacagctggagaagcagatgtattctatcatgaagtctttgcaggatgacagcaagaatgagaatctgcttgacctgaaccagaagcttcagttgcagctaaaccaggagaaggccaacctgcagctggaaagtgaagaactgaatatcctcatcaggtgttttaaggatttccaactgcagcgggctaacaagatggagctgcgaaagcagcaagaagatgtgagtgtggtccgtcgcactgagttttactttgctcaggcacggtggcgcctgacagaggaagatggacagctgggaattgctgaattagaactgcagaggttcctctacagcaaggtgaataagtctgatgacacagcagaacatcttctggagttgggctggtttaccatgaacaacctcctccccaatgctgtctataaggtagtactgcggccccagagctcctgccagtctgggcgacagctagctctccgcctcttcagcaaagttcggccccctgttgggggtatctctgttaaggagcattttgaggtaaatgtggtgcctctcaccatccagctgacacaccagttcttccacagaatgatgggctttttctttcctggccgaagtgtggaagatgatgaagttggtgatgaagaggataagtccaaactggtgactactggaataccagtggtgaagcctcggcagctgattgcaacagatgatgcagtaccactgggccctgggaagggtgtggcacagggtttgactcggagttctggggtcagaaggtcatttcgcaaatcgccagagcaccctgtggatgacattgacaagatgaaagagcgagctgccatgaacaactccttcatctacataaagattccacaggttccactgtgtgtcagctacaagggtgagaagaacagtgtggactggggtgaccttaacctggtgctgccctgtctggagtaccacaacaacacatggacatggctagactttgccatggctgtcaaaagggacagccgcaaagccctggttgcccaggtaatcaaagagaagctaaggctgaagtctgcaacaggctctgaggtccggggaaagctagaaactaaatcggacctgaacatgcaacagcaggaagaggaggagaaagcccggctcctcattggtttaagtgtgggcgacaagaaccctggcaagaagtccatctttggcaggcgcaaatgatttggcgattcgagtggctgcagtacaggatctgactctggctcaggctccagggacttgtggggtgggaggggcttcccgttatccacgaggatttgtgggtgtcagagcccataggcatcactcttcagcacctggtctgttcgctgcagggcatggtggacagtaatgctgagttctgtctcacactgatcaggctcagggccagagaggcaacaagagagcaagacccagggaatgggcccagggcaggaccctattcccttggggtcaagtgaaagggtagggggatagtcctgatcaagtgtgataaatttttatagacatatataaatatatatatattatatatatatttctaagtgtaactgtccttcctctgtgccaggaaacgggagggggctgatcctctgatcctcactccactgtcatgtttgaaagaggtattggtgttctggagtgggggtcaacccctccccagtctctgtgctaagttcacttgggaggatggcagtaggagccagggctggccatgggtcccctacccttccccgtaggatataccctggagaatggcaaaatgatttaaagagaaaaaaaaagatattttaaatttgatgctc

SEQ ID NO: 181530 - DNA, 6708 bp, Artificial Sequence
  derived and/or modified sequence
atgccattgtttttcagcgccttgcttgtactcctgcttgtggcactatcggcactctttctcgggagatggctagtggtgcgcctcgcaaccaaatggtgtcagcgtaaacttcaggcggaacttaagatcggatcgttccgttttttttggatccagaatgtatctttgaagttccaacagcatcagcagaccgttgaaattgacaatctctggatctcatcaaagctgctgagccacgacctgccccactatgtggctctatgtttcggtgaggttcggatccgcaccgatctacagaaagtgagcgatctgtctgctcctttcagccagagtgctggggtggatcagaaggaactcagtttcagcccctccttactcaaaatattctgtcagctatttagtattcacgtagatgctattaacatcatggttctgaaagtcgatacatccgagtctctgtggcatatccaaatttcaagaagccgctttctgttagactccgacggcaagaggcttatctgcgaggtctcactgtgtaagatcaacagcaaagttttgaaatcaggacagctggaagatacctgcctggtggagctatcactggctctcgatctgtgtcttaaggttggtatctctagtaggcatctaaccgctatcacagtagacgtatggactctgcatgccgagttgcatgaagggttatttcagtctcaactcctttgccagggaccatctctggctagcaaaccagtaccgtgcagcgaggtgacagaaaatctggttgagcccacactgcccgggctatttctactccagcagctccccgaccaagtgaaagtgaaaatggaaaatacaagtgtggtcctgagcatgaattcgcagaaaaggcatctaacctggacccttaaactactccagtttttgtatcacagggacgaggatcagctgccactcagatcctttaccgcaaatagtgacatggcacagatgagcacagagttgctgctggaagatggcctgctgctctcccagtcaagacagcgtattgtgtgccttaattctctgaaggccagcgtgcaggtcactactatcgacctgagtgccagcctggtcctaaatacctgcataatccactacagacaccaggaattctctcactggctgcacctgctcgccctggaaacgcaaggtagctcctcacccgtgctgaagcagagaaagaagcgcaccttcccccaaatcctggcaccaataattttcagcaccagcatctctaacgtgaatatcagcattcagctgggggacactccaccttttgcgctgggtttcaattcaatctcactcgactaccagcacctgagaccccagagtattcaccaaaggggcgtgctaaccgtggatcacttgtgttggagggttgggtcagactctcacatccaaagggcaccccaccctcccaatatgcacgtttggggcgaggcgctggtgctcgactcttttactctgcagggatcctataatcaacccctgggcctcagctcgactcagtccgacactctgttcttggattgcaccatccgcggtttgcaggtcgaggcgagcgatacctgtgctcagtgcctgtccagaatcctgtcccttatgggtcctcagagtggaaaaagtgccgtgtcccgccacagttcctttggggaaagtgtgagcttactgtggaaggtagacctcaaggtggaggacatgaacctcttcacgctgtcagctctggtgggtgcgtcagaggtgaggctggacactctaacaatacttggctcggctgagacttccaccgtcgggatccaaggcttggttctagccctggtcaagagcgttacagaaaaaatgcagccatgctgcaaggctccggatattccaactcccgtgctgagcctaagcatgttaagcattacctaccattcgtccatacggagtctcgaggtacagtgtggcgccgggcttacattactgtggtcaccccctgatcacatgtacctctaccaacacgtgttggcgaccctacagtgtcgcgacctgcttcgcgcaacagtcttcccagagaccgtgccctcgctggctctggagacgagcggcaccacatccgagttggaaggccgagcacccgagccgctcccccctaagcgactgttaaatttaacattagaagtgagtacagctaaactcaccgctttcgtggctgaagataaatttatcacgctcgctgccgaaagcgtatcactaagcagacatggcggttctctgcaggcctattgtcctgagctggcagccggcttcgacggaaactctatctttaatttcaaagaagttgaagtacaactactgccagagctggaagagatgattcttcaccggaatccctttccagcactgcaaacattgcgcaatcgagtgtggcttttatcatttgggagcgtttctgttgagttcccatatcagtacgatttctctcgtaccttagatgaggctgtgggcgtgcagaaatggcttaaagggttgcatcaaggaaccagggcctgggcttccccatcgccagtgccactacctccggacctgctgcttaaagtggaacactttagttgggttttccttgatgatgtgttcgaagtcaagttacatgataattacgaactgatgaaggacgagtcgaaggagtcagccaaaaggcttcagctcctggatgctaaggtcgctgctctccggaagcagcatggggagcttttgcctgcacgcaagatcgaagagctatatgcctcccttgagagaaagaatatcgaaatctatatccagcggtctagacgcttgtatggtaacactccgatgagaagggcattgctgacttggagcctcgcgggccttgagctcgtggcccttgctgacgcctcattccacggcccggagcatgtggtggagcaagttcaagaattggaccctgggtcacctttccctccggaagggctggacttagtcattcagtggtgtaggatgctaaagtgcaatgtaaaaagcttcctggtgcgaatccgggactatcctcggtacttatttgaaattagagattggagactgatgggccgacttgtcggaacagagcagagcggccagccctgctcccgcagaagacagatccttcatctgggccttccctggggcaacgtcgcagtggagcgaaatatgccaccgctcaaattttaccacgactttcacagcgaaatctttcaatacacagtcgtgtggggcccctgctgggatcccgcttggacattgattgggcagtgcgtcgacctgctcacaaagcccagcgcagacccaagtccacccctgccctggtgggacaagagccggctgttatttcacggcgactggcacatggatattgagcaggccaacttacatcaactggccaccgaggacccatacaatacaacagagaacatgcattgggagtggtcccatttgagcttccattggaaacctggtcaattcgtttttaaaggggatctggatattaacgtgagaaccgcatcaaagtatgacgactgctgcttcctgcacctgcctgacctctgtatgacactcgatcttcaatggctttgtcatgggaatccccatgaccatcatagcgtcactcttcgagctcctgaattcctccccgaagtacctttagggcagcttcacgatagttaccgtgcctttcgatccgaaaacctaaatctgtccatcaaaatggacctgaccaggcatagcgggactattagccaaccccgaatcctcctttattcgagcacactgagatggatgcagaacttctgggccacttggacatcggtcacccgtcctatctgtcggggcaagctctttaacaatttgaaacccagcaaaaagaagctggggcagcattataagcagctgtcctacaccgcgctgttcccccaactgcaggtgcactattgggccagcttcgcacagcagcgaggaatccagatcgagtgcagtcagggacacgttttcacccgaggtacacagcgcctcatccctcaggcaggcacggtgatgaggagactgattagtgattggtcggtcacccagatggtgtctgacctttcccaagtgacagttcacttaatggcttctcctacagaggagaacgcggaccactgtctcgatccactggtgacaaagacccacctgctctcactctcgtcacttacctaccaaaggcactcaaacaggaccgccgaggaagagcttagcgcgagggacggggacccaactttccatacccaccagctccacctcgtcgacttaagaatctcttggacaacaacgaacagggacatcgcatttgggctgtatgatggatacaagaaggccgccgtgctcaagcgtaacctgtcgactgaggccctgaagggcttaaagatcgacccgcagatgcccgccaaaaagcctaagcgaggagtgcccaccagtgctagtgcccccccccgcgtaaacacaccgagtttttctggacagccggacaagggaagcagcggcggtgcctacatgttacagaagttgatagaggagactgaccggtttgtcgtctttaccgaagaggaaagcggcatgtctgaccagttatgtggtattgctgcttgccagactgatgatatatataatcgcaattgcctgattgagctcgttaactgccagatggtgctcagaggagctgaaaccgagggctgtgtcatcgttagcgctgcaaaagcgcagttactacagtgtcaacatcatcctgcttggtacggagataccctgaagcagaagacaagctggacctgcttactggatggaatgcaatatttcgctactaccgaaagctccccaactgaacaggacggacggcagctttggctggaggtaaagaacatcgaggagcaccgacaacggtcgttagattccgtgcaggaactgatggagagcggccaggcggtcggtggcatggtcactaccacaactgattggaaccaacccgcagaggcacagcaggcccaacaggttcagaggattatttctagatgcaattgcaggatgtactacattagctatagccacgacatcgatccagagcttgcaacccagatcaaaccccccgaggttttggagaatcaagaaaaagaggaccttttgaagaagcaggagggcgccgtggatacttttaccctcatccatcatgaattagagattagcaccaaccctgcccagtacgccatgattctcgatattgtcaataacctgttgcttcacgtcgagcctaaacggaaggagcattctgaaaagaagcaacgcgtgcgcttccagctggaaatctcttccaacccggaagagcaacggagctccattctgcatcttcaggaagctgtcagacaacacgtggcccagataagacagctggagaaacagatgtatagcatcatgaaatcactgcaggatgacagtaagaatgaaaacctgctggaccttaaccagaaactgcagttgcagctcaatcaagagaaggcaaacctccaactggagtctgaggaacttaacattttgattaggtgcttcaaggattttcagttgcaaagagccaacaaaatggagctgagaaagcagcaagaagatgtgtccgtggtaaggagaaccgaattttacttcgcacaggcccgttggcggctaacggaggaagacggccagttgggcattgcagaactggaattacagcgatttctgtacagcaaagtgaacaagtccgacgacaccgcggaacacctgctggaattgggatggttcaccatgaacaatttactgccaaacgccgtttataaagttgtacttagaccacagagctcttgccaatcggggaggcagttagcgctacggctgttttcgaaagtgcgcccacccgttgggggcatttccgtgaaggagcattttgaggtcaacgtcgtgccacttacgatccaactaactcaccaattttttcacagaatgatgggtttcttttttcccggtcgcagtgtagaagatgatgaggtgggggacgaggaggataaaagcaaacttgtgacgacggggattcctgttgtgaagccacgtcagctaatcgctacggatgatgcagttcccctgggccctggcaaaggggtggctcaaggcctaacccggagcagcggcgtgaggcggagcttcaggaagagccccgagcatcccgttgacgacattgataaaatgaaagagcgcgccgccatgaacaattcatttatttacatcaagataccacaggtccctctgtgtgtttcttacaaaggcgagaagaattcagtagattggggagatctgaatctggtcttgccctgcctcgagtaccacaataatacctggacctggctagattttgcaatggcagtaaaacgcgactcgcgcaaagctctggttgcgcaggtcataaaagagaagctgcgacttaagagtgccacagggtcagaggttagaggtaaacttgaaacaaaaagtgacttgaatatgcaacagcaggaggaggaggagaaggcccgcttgctgatcggactgagcgttggtgataagaatcctggtaagaaatctatcttcgggcgtaggaagtag

SEQ ID NO: 181531 - DNA, 6618 bp, Artificial Sequence
  derived and/or modified sequence
atgcccctctttttctcagcgctcttggtccttttgctcgtcgctctctccgcactgtttctgggcagatggctggtcgtgagactcgctaccaaatggtgccagcggaaactgcaagctgagctgaaaatcggaagcttcagatttttttggattcaaaatgtgagcctgaagttccagcaacaccaacagaccgtggagatagataacctgtggatctcttctaaattgctctcacacgatttacctcattacgtggcactgtgttttggcgaagtgagaatcaggacagacttacagaaagtttcggacctatctgcccccttttcccagtcagccggcgtagatcagaaggagctgtctttttctccttcacttttaaagatcttctgtcagctgttctcgatccacgtagacgctatcaacataatggtcttgaaggtggacacatccgaaagcttgtggcatattcagatcagccggtctaggtttctcctggactccgatggaaagcggctgatctgcgaagtgagcctgtgtaagattaactccaaggttcttaagtctggccaactggaagacacgtgcttggtggagctgtcgcttgcactggatttgtgtttgaaagtagggatatcaagccgccacctcactgctattacagttgacgtgtggacccttcatgcagaactccacgaaggattgttccagagccagctgctttgtcaagggcctagcctcgcctcgaaacccgttccgtgttccgaggtcaccgaaaacctcgtggagccgacactccccggtttattcctgctgcagcagttgccggaccaagttaaggttaagatggagaacacatcagtggtgctgagcatgaactcccagaagcgccatctcacctggactctcaaactgctgcagttcctctatcatcgcgacgaagatcaacttcctctgaggtcttttacagctaattcagacatggcccagatgtcaaccgagctactgttggaggacgggcttctgctgtcccagtcaaggcagagaattgtttgcctgaatagcctgaaggcaagtgtccaagttaccacgatcgacttatctgccagcctcgtactgaacacctgcattatccattatcgacaccaagaatttagccattggctgcacctcctagccctcgaaacacaaggctcctccagtcctgtgctgaaacagagaaaaaagcgcaccttcccacaaattctcgcacccattatcttttccacatcaatctccaatgtgaacattagcattcagctgggcgacacccccccattcgctttgggattcaacagtatcagcttggattaccaacacctgcgtccgcagagtattcatcagagaggggttctaacagtggaccacctctgctggcgggtaggttctgatagtcacattcagagggcgcctcatcctccaaatatgcacgtatggggggaagcactggtgctggattcattcaccctgcaaggatcgtataaccaaccccttggcctgtcttctacccagagtgatacactcttcctcgattgcactattagggggctgcaagtggaagcgtcagatacatgcgcccagtgcctttctaggattctaagtctaatgggacctcagagcggtaagagtgctgtcagccgccattcctcattcggggagtccgtgagtctcctgtggaaagttgatctgaaagtagaggatatgaacctttttactctctctgctctggtaggcgccagcgaggttcggctggacaccctgactattctcgggagcgccgagaccagtaccgtaggtattcaaggtcttgtcctggctctggttaagtccgtgactgagaaaatgcaaccatgttgtaaggcaccggacattccaacacccgtactatcgttgagtatgctttctattacgtaccattcctccatacgcagcctcgaggtgcagtgtggagcaggcctcacgttactctggtcccccccagaccacatgtacttgtaccaacacgttctggcaaccctccaatgccgggacctgctgcgagccactgtcttcccagagaccgtgccatcacttgctctagaaaccagcgggaccaccagcgagctagaggggcgagcgcccgagccactcccacccaagagactgctcaacctgacactggaggtctccaccgccaagttaacagcattcgtggccgaagacaagttcatcaccctcgccgctgaatccgtgtccttaagtcgacatggcggtagcctgcaggcatactgccctgaactcgccgccggattcgatggtaattccattttcaacttcaaagaggtcgaggtgcagctgctcccagaggtggagtttccttaccaatacgacttcagtaggacgctagacgaggcagtcggcgtacagaaatggttaaagggcttgcatcagggtactagggcctgggcctctcccagccctgttcctctgcctcctgacctgttgcttaaagtggagcacttctcttgggtgtttcttgacgacgtgtttgaggtgaaacttcacgataattatgagctgatgaaagacgagagcaaagagagcgctaaaaggttgcaactgctggacgctaaggtggctgcactgagaaaacaacatggagagctcctgccggctaggaagatcgaggaactgtacgctagtttggaacgcaagaacatcgagatctatatccagagatcccgtaggttatatggcaacacaccgatgcgtcgcgccctcctcacctggagtctagctggcctggagttagtagcactggccgacgccagcttccacgggcccgagcacgtcgtggaacaggtgcaggaattagaccctgggtccccattcccccccgagggactagatttagttatccaatggtgccgcatgcttaagtgcaatgtcaaatctttccttgtccgaattcgagactacccccgctacctgtttgagattcgtgactggcgactgatgggtaggctggtcggcaccgaacagagcggccaaccatgcagtaggagaaggcaaatccttcacctgggacttccatgggggaacgtggctgtggagcgtaatatgcctcccctgaagttctaccatgactttcactctgaaatttttcagtacacagtcgtgtggggaccttgctgggaccccgcgtggaccctcattggacagtgcgttgatctcctgaccaagccctccgccgacccatccccgccactgccctggtgggataaaagtcgcctgctcttccacggagactggcatatggacattgaacaggccaatttgcaccagcttgcaactgaggatccctataacactaccgagaacatgcactgggaatggtcacacctgtcattccattggaagcccggccagtttgtttttaagggggacttagacatcaacgtgcgcacagcctctaagtatgacgactgttgctttctgcaccttcccgatctgtgtatgacgctggacctgcaatggctatgtcacgggaatccccatgatcatcactccgtgacgctcagagcaccagagtttctgcccgaggtgcctttgggccagctgcacgattcatacagagcatttaggtccgaaaaccttaacttgtctatcaaaatggatctgacacgacatagtgggacaatctctcagccccggatcctactttactccagcaccctcaggtggatgcagaatttctgggctacctggacaagtgtgaccaggcccatatgtcgcgggaagctattcaataaccttaaaccctccaagaagaagctagggcaacactacaagcagctgtcgtatacagccctttttccgcaactgcaggtacattactgggcttcctttgcacaacagagaggcattcagattgaatgcagccaggggcacgtatttaccagagggactcagcgcttaatacctcaggcaggaaccgtgatgcgacgcctaattagtgactggtcagtgacacagatggtgtcggacctgagtcaagttaccgtgcatttgatggctagccctacagaagagaatgccgatcattgcctggacccattagtaactaaaacccacttgctctccttgtcttccctgacttatcagcggcacagtaataggaccgccgaagaggagcttagcgcacgtgacggcgatcctaccttccacacacaccagctgcacctcgtggatctccggatctcgtggacaactactaatagggatatcgccttcggtctgtacgatggatacaaaaaagctgctgtgctgaagcgaaacctatcgacagaggccctcaagggactgaaaattgatccccagatgccggcaaagaaaccaaagcgcggggtgccgacatccgccagtgctccccctcgagttaacaccccatctttcagtggccaacctgacaaggggtcttcaggcggggcatacatgctgcagaagctcatcgaagagactgatagattcgtcgtgttcacagaggaggagagcggcatgtcagatcagctgtgcgggattgccgcttgtcagaccgacgatatttataacaggaactgcctgattgagttggtgaattgtcagatggtcctgaggggtgccgagacagaagggtgtgtcattgtatctgccgccaaggcccaactactgcagtgccagcaccatccagcctggtatggagacacactgaagcagaagacatcttggacatgcctccttgatggaatgcagtattttgcaacaactgagtcatctcccaccgaacaggatggaaggcaactgtggctagaggtaaaaaacattgaggaacatcgccagcgatctctggacagtgttcaggagctgatggaaagcggacaagcagttggcgggatggttaccaccacgactgactggaatcaaccagcggaggctcagcaagcacaacaggtgcagcgcatcatcagccgctgtaattgccggatgtattacatttcctacagccacgacatcgatcctgagttggctacacagatcaaaccccccgaggtcctggagaatcaggaaaaggaagatttgctgaaaaaacaagaaggcgccgtcgacacattcacgttgatccatcacgagctcgagatcagtaccaatccagcccagtacgctatgatcttggatatcgttaataacctgctgttgcatgttgaacccaagagaaaggagcactccgaaaagaaacagcgcgtacgctttcagcttgaaattagttccaaccctgaggagcagaggagtagcatccttcacctccaggaggctgtcagacagcatgtcgcgcagatacggcagctcgaaaaacaaatgtactctataatgaagagtctgcaggatgactctaaaaacgaaaacctgctggatctgaaccagaaattgcagctccagctcaaccaggagaaggcgaatctgcagcttgagagtgaggaacttaacatacttattagatgttttaaggatttccagcttcagcgggctaataaaatggaactacgcaaacaacaggaggatgtgagtgtggtcagacggacagagttttattttgctcaagccagatggcggctgaccgaagaagacggccaactaggcatcgcagagttggagcttcagagattcctgtatagtaaagtaaataaaagcgacgacactgctgagcatctacttgagctgggatggtttacaatgaataacctgctccctaacgcagtgtacaaggtggtattgcggcctcagagcagctgccagagcggcaggcagcttgcgctacggctgttttctaaagtccgccctcctgtagggggcatctcggtgaaagaacattttgaggtgaacgttgtacctctaacaattcagctaacgcatcagtttttccataggatgatgggtttcttttttcccgggagatccgtggaagatgatgaggttggcgacgaagaggataagagcaagctggtgacaactggaattccagtagttaaacctaggcagctgatcgccaccgatgacgcagtacccttaggaccagggaagggtgtggcacagggtctgacccggtccagcggggtgcgccgttctttccgaaaatctccagaacacccagtggacgacattgacaagatgaaagagcgggctgccatgaacaactcttttatttacattaaaataccccaggtgcctctttgtgtcagttacaagggtgagaaaaattcggttgattggggagacctcaaccttgtacttccatgcctggagtatcacaacaatacatggacatggttggatttcgccatggctgtcaagagggatagtaggaaggccttagttgcacaggtgattaaagagaagttaaggttgaagtcagcaaccggctccgaggtgaggggaaagctggagaccaagagtgatctgaacatgcagcaacaagaagaggaagagaaggcccgattgttaattggattgagcgttggcgataaaaatccaggaaagaagagcatctttggccggcgcaaatag

SEQ ID NO: 181532 - DNA, 6708 bp, Artificial Sequence
  derived and/or modified sequence
atgccactgtttttttccgctctgctggtactattgctcgtcgctcttagcgccctgttcctcggccggtggctcgtagtgcggctggcaaccaaatggtgtcaacggaaactgcaggcagaacttaaaattggtagcttccgcttcttctggattcaaaacgtttcactcaagtttcaacagcaccagcaaaccgtagagatcgacaacctatggatttccagtaagctcttgagtcatgatctgcctcactacgtggccctgtgcttcggcgaggtgagaatccgtaccgatcttcagaaagtctctgacttgtctgctcccttcagccagtcagctggcgtggaccaaaaagagttgtccttttcaccaagtcttctgaagattttctgccagctcttctctatccatgtggatgcgatcaacattatggtactgaaagtggacaccagcgaaagtttatggcacattcagatttctcgttccagatttctactggattcggacggtaagaggctaatctgcgaagtcagcttgtgcaaaataaatagcaaggtactaaagtcaggccagttggaagacacttgcctggtcgagctgtccctcgctctggacctatgcctgaaagtgggcatttcttcccggcatctgactgccatcacagtagacgtgtggaccctgcacgctgaattacatgagggtctttttcaaagccagttgttatgtcaagggccctcactggccagcaaaccagtcccatgttctgaagtcacagaaaatctcgtcgaaccgaccctgcccggtctgtttcttctgcagcagcttccagaccaggtgaaagttaaaatggagaatacaagcgtagtgctctccatgaattcacaaaaacggcacctcacatggaccctcaagttgctgcagttcctgtatcaccgcgacgaagaccaattaccgcttcgcagcttcacagccaattctgatatggcccaaatgagcactgagctgctgctcgaagatggcttgctcctttctcagtcccggcagcgtattgtgtgtctgaactctttaaaagcttccgtacaggtgaccacgattgacttgtcagcatctctggttttgaacacttgcattattcactaccggcaccaggaattctcacactggttacatctgcttgcgctggagacccaaggcagttcatctcccgtgcttaagcaaagaaagaaaagaacatttcctcagatactggctccaattattttcagcacaagcattagtaatgtaaatattagtattcagctcggcgatacacccccatttgctctgggtttcaacagtatatcactggattatcaacacctccggccacaaagtattcaccagcgcggcgtgttaaccgtggatcatctctgttggagggtcgggagtgactcccacatacagcgggctcctcaccccccaaacatgcacgtgtggggcgaagctctggtgctggattcattcactctccagggaagctacaatcaacctcttggcctctctagtacgcaatctgataccctatttctggattgtactatacgggggcttcaagtcgaagccagtgatacttgtgcccagtgcctcagccgcatactgtctctgatgggtccccaatctgggaaatccgccgtgtcacgtcacagttcttttggtgaaagtgtcagtctgctttggaaagtggacttgaaagtcgaggatatgaacctcttcactctgtcggccctagtgggtgcctctgaggtgagactggacactctaacgatacttgggagcgccgaaacttcaacggtaggaatccaaggcctggtgctcgccctggtgaaatctgtgactgagaagatgcagccctgctgtaaagcccctgacatcccaacacctgtgctctcacttagcatgttgtcaatcacataccattcaagcatcagatctcttgaagtgcagtgtggcgccggactcaccctgctgtggtccccacccgaccacatgtacctctaccagcacgttctcgcaacgctccagtgcagggatctactgcgagccacagtgtttcccgaaacggtgccctcgctcgctctcgaaaccagcggcaccacgtccgaactggagggccgagcacctgagcctctgccacccaaacgcctgctaaacttaacgctggaagtgagcactgccaaactaacggcttttgttgccgaagacaagttcattacattagcagccgagtctgtgagcctgagcagacacgggggatctctgcaggcctactgtccagagctggccgcaggctttgacggcaatagcatatttaacttcaaggaggtggaggtccagttattacctgagctcgaggagatgattttgcatcgcaatccctttcctgccctgcagaccctcaggaaccgggtctggctgctgagttttggatcagtatcagtagaattcccttaccagtacgacttttccaggactcttgacgaagccgtcggagttcagaagtggctgaaaggtctccaccagggaacgcgtgcttgggccagcccttcacccgttccgctccctcctgacctgctcctgaaggtcgagcatttcagctgggtctttcttgacgacgttttcgaagtgaagcttcatgataactacgaacttatgaaggacgagagcaaggagtccgccaaacggctgcagctgcttgatgccaaggtcgctgctctccggaaacagcacggggaactacttccagcacgaaagatcgaagagctctacgcctctctagaaaggaaaaacatagagatttatatccagaggtctcgcaggctgtacgggaacactcctatgcgccgagccctgctgacctggagtcttgccggtctggaactcgtggccctagcagacgcctcctttcacggcccagaacatgtggtcgagcaggtacaggagctggatcccggcagtccctttcctccagagggtttggacctggtcatccagtggtgtcggatgttaaagtgcaatgtaaagtcatttcttgtgcgaattagagattacccgcggtatctcttcgaaataagggattggagactgatgggaaggctcgttggcacagagcaatccggacagccatgttcaaggcgtcggcaaattctgcacttggggttgccttgggggaatgtggctgtcgagcgaaacatgccaccacttaagttctatcacgactttcactcagaaatatttcaatatacggtggtgtgggggccatgctgggatcccgcctggactctgatcggccaatgtgtcgacctgctaacaaaaccctctgccgatcctagcccaccactcccatggtgggacaaaagtagacttcttttccacggcgactggcacatggatattgaacaggctaatctccaccagctggccaccgaggatccatataacaccaccgagaacatgcattgggagtggtctcatttgtccttccactggaagcccggacagtttgtgttcaagggagatcttgatattaatgtccgtacggccagcaaatacgacgactgctgctttctgcatctccctgatttgtgtatgacgctggatctgcagtggctctgtcacggaaatcctcacgaccaccacagcgtcacgctgcgtgcacctgagtttctgccagaggttcctcttgggcagttacatgacagctaccgcgcattcaggtctgagaacctgaacctatcaatcaaaatggaccttacacgccattccggaaccatctcccagcctcggattctcctttatagttcaactttgcgatggatgcagaatttttgggccacctggacctctgttactcgaccgatctgtcgggggaagttgttcaacaatctcaaacccagcaagaaaaaacttggccagcactacaaacagctctcatacactgccctgtttccccagttacaggttcattactgggcaagcttcgcccagcagcgtgggattcagatcgagtgttctcagggacacgtcttcactaggggaacccaacgtctcatccctcaagccgggactgttatgagaaggcttatttccgattggtccgtgactcaaatggtcagcgatctgtcccaggtgaccgtgcacctaatggcgagccctacggaggaaaacgccgaccactgcctggatcctctggttacaaaaactcatctcctgagcctgtctagtctgacttaccagcggcacagtaataggacggccgaggaagaactgtccgctagagatggtgaccccacttttcacactcaccaattacacctcgttgacctaaggatctcctggactacgaccaacagagatatagcatttgggctttatgacggctataaaaaagccgccgtgctgaaacgcaacctgagcacagaagccttgaaaggactcaagatagatcctcagatgcccgcaaagaagcctaaaagaggcgtgccgacgagtgcatctgctccccccagagttaacaccccctccttttccggccagcccgataaaggttcatccggcggagcatatatgctgcagaaactcattgaggaaactgatcgctttgtcgtgttcactgaggaggagtccggcatgagtgatcagctgtgtggaatcgccgcctgccagaccgacgacatctataatcgaaactgccttattgagctggtgaattgccaaatggtgctgcgcggagcagagaccgagggctgcgttattgtctctgctgccaaggcccagcttcttcagtgccagcaccacccagcttggtacggagatactctcaaacagaagacttcatggacttgtctgcttgacggtatgcagtatttcgctaccaccgagagcagtcctacagagcaggatggaagacagttgtggctcgaagtaaagaatatcgaggagcaccgtcagaggagcctagattcagtccaggaactgatggaatccggacaggcagtaggaggtatggtgacaaccacgactgattggaatcagcctgcggaggctcagcaggcgcaacaggtacagcggatcatttctcggtgcaactgccggatgtactacatatcttattcgcatgatatcgaccctgaacttgcgactcagatcaagcctccggaagtgctggaaaaccaggaaaaggaagacctgttgaaaaagcaggaaggagcggtggatactttcacactgatccatcacgagctggaaatctccaccaacccagcccagtatgctatgattctggatatcgtcaacaacctcctacttcatgtggaacctaagagaaaagaacactctgaaaagaagcaaagagtgcgatttcagctcgaaatcagttcaaaccccgaagaacaaagatcctcaattctgcatctgcaggaggccgtgcgccagcacgtggcccagatccgccagctcgagaaacaaatgtatagtatcatgaagtctttgcaggacgattcaaagaatgaaaatttgctggacctgaatcagaaactacaactccagctgaaccaggagaaagcaaacctgcaattagaatcggaggaactgaacattctgatcaggtgcttcaaagactttcagctgcagcgcgccaataagatggagctaagaaaacaacaggaggacgtaagcgtggttcgacggactgaattctattttgctcaggcgaggtggcgactcacagaagaagacggacaattggggatagctgagctcgagctgcagagatttttgtacagcaaggttaacaagagcgatgacaccgcagagcatttactcgagttggggtggtttactatgaataatttactgcccaatgccgtctataaggctatcttgcggccacaatcgtcttgccagtccggccgccagctcgcactcaggctattctccaaagtccgaccccccgtggggggcatcagcgttaaggagcattttgaggtgaatgtagtacccctgaccatccaacttacacatcagttctttcaccgtatgatgggcttcttctttccaggacgatcagtggaggatgatgaggtgggcgacgaagaggataagtcaaaattagtgacaactggtatcccagtggtgaaaccccgacagctgatagccaccgacgatgccgtgcccttgggccctggaaagggggtggcgcagggtctaaccagatcctctggcgtgcgtcgctccttccgcaagtcacccgagcacccagtggatgatatcgacaagatgaaggagcgcgcagcaatgaataactccttcatctacataaagatcccccaggtccccctctgcgtctcttataagggtgagaagaattcagttgattggggagatttgaatctcgtcctcccgtgcctggaataccacaataatacgtggacctggctggatttcgccatggctgtaaaaagagatagcaggaaggcactggtggcccaggtcatcaaggaaaagctgcgcctaaaaagcgctaccggcagcgaggtgcgtggtaagttggaaaccaaaagtgatctgaacatgcagcaacaagaggaagaagaaaaagccagactgctcattggcctgagcgtgggcgataagaacccaggtaaaaagagcatcttcggtcgcaggaaatag

SEQ ID NO: 181533 - DNA, 6279 bp, Artificial Sequence
  derived and/or modified sequence
atggtcctaaaagtggacacctccgaatcactctggcatatacagatttcgcgaagcagatttttgctcgactcagatggaaaacgcctcatttgtgaagttagtctttgcaagatcaactccaaggtgcttaaatccggacagttagaagacacgtgcctcgttgagctgtctctcgccctggacctgtgcctgaaggtgggtatcagctcccgtcatcttacagccatcaccgttgatgtgtggaccctccacgctgaactgcacgagggccttttccagtctcagctattgtgtcagggccccagcctggcctcgaaaccagttccatgctcggaagtaacagaaaacctagttgagcccaccctgccgggcctgttcctgttgcaacagctcccagaccaggtaaaggtgaaaatggagaacacatccgtcgttctgtcaatgaattcccagaaaaggcatctaacatggaccttaaaactgctgcagttcttataccatcgggacgaggaccagcttccattgcggtctttcacggccaacagcgacatggctcagatgtctactgaattactcctcgaagacgggctcctcctgtcccaatctcggcaacgtattgtctgcctaaactctttaaaggcctccgtgcaggtaaccactattgatctgagcgcctctctggtcctgaatacctgcataatccactatagacatcaagaattcagtcactggctccacctactggctttggagacacaggggtccagctccccagtgttaaagcagaggaagaaacgtacctttccccaaatcctggctccaattatctttagcaccagcatcagcaacgtgaatatctctatccagctcggagacacgcccccttttgcattgggcttcaacagtatctccctagactaccagcatctccgtcctcaatccattcaccaacggggagtcctaacggtggaccatctgtgctggcgggtgggaagcgacagtcacatccagcgtgccccgcatcccccaaacatgcacgtctggggggaggcactcgtcctcgatagttttactctccaaggttcctacaaccaaccacttgggcttagttccactcagagcgacacactatttctggactgcacaattcggggattgcaggtcgaggcgtccgatacttgtgctcagtgtcttagccggattctttcattaatgggacctcagtctgggaagtctgcagtatcccgccattcatcttttggcgaatcggtgagtctcctgtggaaagtagatttgaaagtggaagacatgaacctcttcactttatccgccctggtgggtgccagcgaggtgagacttgatactctaaccattctggggtcagctgagacctctactgttggaattcagggattggtcctcgccctcgtgaaatcagttaccgagaagatgcagccctgttgcaaggctccagacattccgacacctgtgttgtcccttagcatgttgagcatcacttaccattcctcaataaggtctttagaggtccagtgcggggccgggctgacattactgtggtcccctccagaccatatgtacctgtatcaacatgttctggctactttacagtgtagggatctcctaagagccacagtgtttcctgaaaccgtcccgagcctcgccctggaaacctctggcactacaagcgaactagaaggtagagcaccagaaccactaccacctaagagattattgaatttaaccctggaggtctcaaccgctaaactcactgcgttcgtggctgaggataagtttattacacttgccgccgaatcagttagcctgtctagacatggagggagtctgcaagcatactgcccagaactggctgcagggtttgacggcaattcaatcttcaattttaaagaggtcgaagtccagttacttcccgaactggaagagatgattcttcacagaaacccatttccagcccttcagacactgcggaacagagtgtggctactgtcttttggaagcgtatctgtggagttcccataccagtacgactttagccggacactggatgaggctgtaggtgtgcagaagtggcttaagggattgcaccaggggaccagagcttgggctagtcctagtccagtacccttgccaccggacctgctcctaaaggtagaacacttcagttgggtgttcctggatgatgtgtttgaggttaaattgcacgacaactacgaactgatgaaagacgagagcaaggagtccgccaagaggctgcaactgctggatgcaaaagtcgccgcacttcggaaacagcacggcgagctactgcccgctcggaagatcgaagaactgtacgcgtccctggaaaggaaaaacatcgaaatatatattcagcggagtagaagactgtacgggaacactcctatgcgccgggcccttcttacatggagtctggcaggcttggaattggttgctctcgccgacgctagtttccacggtccagaacacgtggtggaacaggtgcaagaattggatcccggctcccccttccctcccgaagggctagacctggtaatccagtggtgtcggatgctgaagtgcaacgtgaagagcttcctcgtgcgaatccgggactacccgagatatctgttcgaaatccgggactggaggctgatggggcggcttgttggcactgagcagtccggacagccctgcagcagacggcgacagattctgcatctgggccttccctggggcaatgtcgcggtcgagcgcaatatgcctcccctcaaattttatcacgatttccactccgaaatcttccagtacactgttgtgtggggtccctgttgggaccccgcctggactttaatcggacagtgtgtagacctgctcactaagcccagtgcagacccttcacccccccttccgtggtgggataagtcacgactgctgttccacggcgactggcacatggacatcgagcaggccaatcttcaccagctcgccactgaggatccatacaatacaactgagaatatgcactgggagtggagtcatctttcattccattggaaacccgggcaattcgttttcaaaggtgatctggacatcaatgtgcgaaccgccagtaagtacgacgactgttgcttcctacatctaccggacctgtgcatgacccttgacctccagtggctctgtcatggaaatcctcacgaccaccattctgtgactttgcgggcccccgaattcctccctgaagttccattgggtcaacttcacgacagctaccgcgcgttccggtctgaaaatttaaacctcagcattaagatggacctgacacggcactccggtaccatatctcagccacgaatattgctttacagctccacattacggtggatgcagaacttctgggcaacgtggacctccgttacacggcccatatgtcgtggcaaactctttaataatctgaaacccagcaagaagaaactgggccagcattacaaacaactgtcctacacagctctatttccccaactgcaagtacattattgggcctcctttgcacagcagagagggattcagatcgagtgtagtcagggccatgtgtttactagaggaacccaaagacttatccctcaggcgggcaccgtcatgcggaggttgattagcgactggtccgtgacgcagatggtctccgatctgagtcaggtgactgtgcatctaatggcttctcccacagaagagaacgccgatcactgcttagacccgctcgtaaccaaaacacatctgctgtcattatcctcactaacttatcagagacacagtaataggactgccgaggaagaactttccgccagggacggcgacccgaccttccacacccatcaacttcacctggtggatttgcgaatctcctggaccaccactaaccgtgacatcgctttcggcctgtacgatgggtacaaaaaagcagccgtgctgaagagaaatctttccaccgaagccctcaaaggactgaaaattgacccccagatgcctgccaagaaacccaagagaggtgtgccaacaagcgcctctgcaccgcctcgtgtgaatacgcctagcttcagtggacagccagacaagggaagcagcggcggagcatatatgttgcaaaaactgattgaggagactgaccgttttgtagtgtttaccgaggaggagtccgggatgtcagatcagttatgtgggatcgccgcctgtcaaacggacgacatctataaccgaaattgtttgattgagctggtcaattgtcagatggtgctgaggggggcagagactgaaggttgtgttattgtctccgcggccaaggctcagttgctacagtgccaacatcacccagcctggtacggggacactctgaaacagaaaacctcatggacttgtctgttagatggaatgcaatattttgccacaactgagagttcacctaccgagcaggacggccgccaactttggctcgaggtgaagaacatcgaggagcacagacagcgttcactcgatagtgttcaggaattgatggagagtggccaggccgtgggagggatggtaacgactacaacggattggaaccagcccgccgaagctcagcaggctcaacaggtgcagagaataatatcaaggtgcaactgcaggatgtactacatcagctattcccacgacatcgatcctgaattggcaacacaaatcaagcccccggaggtgctggaaaaccaagagaaggaggacctgctgaagaagcaggaaggcgcagtagataccttcacacttatccatcacgaattggaaatcagcacgaatcccgctcaatatgctatgatcctcgatattgtgaataaccttttacttcatgtggagcccaagagaaaagaacattcggaaaaaaagcagcgcgtgaggttccagctcgaaatatcgtctaatcctgaagaacagcggtcatctattttgcatctccaggaggccgttcgccagcatgtcgcgcaaattcgtcagctcgaaaagcagatgtatagtattatgaagtcacttcaggatgactctaagaacgagaatctgctcgacctgaatcagaagctccaactccagctcaatcaagagaaggctaatctgcagctggagagcgaggaactcaacatactgattaggtgctttaaggattttcaactgcaacgtgctaacaaaatggaactacgaaagcaacaagaagatgtctcagttgtgagacggacggagttctacttcgcccaagccaggtggcggctgaccgaagaggacggacaattaggcatcgctgagctagaactgcagcgatttctgtacagtaaagtgaacaagagtgacgacaccgctgaacatctactcgaattgggctggtttaccatgaacaacctgttgcccaatgcagtgtacaaggtagtgttgaggccacagtcaagctgtcaaagcggaagacagctggcgctcaggctgtttagtaaagtgcgcccacccgtcgggggaatctccgtcaaggaacatttcgaggtgaatgtcgttcccctgactatacaactgacacatcagtttttccatcgcatgatgggatttttctttccgggtcggagcgtagaagacgatgaggtgggagatgaggaggataaatctaaactggtaactaccggcatcccagtcgtgaaaccacgccagttgatcgctaccgatgatgcggtgcccctgggtcctggcaagggagtagcgcaaggcctgacaaggtcctccggggtgcgccgctctttccggaaatcacccgaacatcccgtcgacgacatcgacaagatgaaggagagggccgcgatgaacaattcttttatatacatcaagatacctcaggtgcccctgtgcgtttcctataagggcgaaaagaacagtgtagactggggagacttaaatctcgtattgccttgtctcgaataccacaataatacctggacatggttggatttcgcaatggctgtaaagcgcgattcgcggaaagcactggtggcacaggtcatcaaagagaaactccgtctcaagtcagccactggttccgaggtgcggggcaagctggaaactaagtccgatctcaacatgcagcagcaggaggaggaggagaaagcccgactcctgatcggcctgtctgtgggggacaagaatcccggcaagaagtctatttttgggagacgcaagtag

SEQ ID NO: 181534 - DNA, 6708 bp, Artificial Sequence
  derived and/or modified sequence
atgcccctcttcttctctgctctccttgttctcctcttggtggcattaagcgccttgttcctaggccggtggctagttgtccggttagcgactaaatggtgtcagcgaaagctccaggccgaattgaagattggcagcttccggttcttttggatccagaatgtgtcactaaagtttcagcaacatcagcagaccgtggaaatcgacaacctttggatctcctcaaagttactatctcatgacctcccccactacgtggcactatgctttggcgaggtgaggatccgaaccgacctccagaaagtgagcgacttatctgcacctttcagccagagcgccggcgtggaccaaaaggaactaagctttagcccatctttactgaagatattctgtcagctattctcaatacacgttgatgccatcaatattatggttcttaaagtggacacttccgaaagcttgtggcatattcagatctcccggtctcgattcttattggattctgatggcaagagactgatttgcgaagtctcattatgtaagataaatagcaaagtccttaaatctggccagttggaggacacctgcctcgttgagttgtcattggccctggatctgtgcctgaaagtaggtatttcttcaaggcacttgacagcaatcacagtagatgtgtggactctgcacgccgagttgcatgaaggcttattccagtcacagctcttatgccagggtccatcattggctagtaaacctgtgccatgctccgaggttaccgagaatctcgtggaaccaaccctccctggattatttctactgcagcagctccccgatcaggtaaaagtcaaaatggagaatacaagcgttgtattgagtatgaacagccaaaagagacacctgacatggacattgaaactgcttcaatttctctatcacagagacgaagaccagttgccgttaagatcctttactgccaactctgatatggcacaaatgagcacagaactgctgctggaggacggcctcctgctttctcagtcaaggcaacgcatcgtgtgtttaaactctctgaaggcctcagtccaggtcaccacaattgatttatcagcttcattagttctgaatacatgtatcatccactacaggcatcaggaattcagccactggcttcacctcttggcattggagacccagggatctagctcacccgtccttaagcagcggaagaagcgtacattcccccagatactcgccccaatcatcttctccacctcaatttcgaacgtcaatatctctatccaactgggcgacacgcccccattcgctctggggttcaactcaatcagtctggattaccaacacctgaggccacagtcaatccatcaaagaggagttcttacggtcgaccacctttgctggcgggttggatccgattcacatatccagcgggcccctcacccccctaatatgcatgtttggggagaagctctggtccttgactcattcacccttcaaggaagctataatcagccactcggactctcctccacacagagtgataccctgtttttagactgcacaattaggggattgcaagtggaagccagtgacacctgcgcacagtgcctaagcagaatcctcagcttgatgggcccgcaatctggtaagagcgccgtgtcccgacatagttcctttggggagagcgtgtcattactgtggaaagtggacttgaaggtagaggatatgaacctcttcactctctccgctttggttggcgccagtgaggtcagattggacacacttactatcctggggagcgctgaaacatccaccgttggcatccaaggccttgttctcgccctggtcaaatccgtaaccgagaagatgcaaccttgctgtaaagcacctgatatccctacacctgtgctgtccctgagtatgctctcaatcacgtatcactcttctataagatcgttggaagtacagtgtggcgccggtctaactttactctggagtccccccgatcatatgtacctgtatcaacacgtgctggctactttgcagtgccgagatctgcttcgcgcgaccgtctttcccgaaacagtcccctctcttgcacttgaaacgagcggcaccacctccgaactcgagggaagagcacctgaacccctgccgccaaaacgattactaaacctcacattggaggtctcaaccgcaaaactgactgcctttgtggcagaggacaaattcattacactcgctgcagaaagcgtttctctctccaggcacggcggctctttacaggcctattgtcctgaactggcagcgggcttcgatggaaattcaatcttcaatttcaaggaagtggaggtccagcttttgccagagcttgaggaaatgatcctgcatcgcaatcccttccccgccttgcagaccttgagaaatagagtttggctgctgtcctttggatccgtgagcgttgaatttccttatcagtacgacttcagtagaactcttgacgaggctgtgggggtccagaagtggctgaagggcttacatcagggcactagagcttgggcctcaccatctcctgtacctcttcccccagaccttttgttgaaggtggaacacttttcttgggtatttcttgatgacgtctttgaggtcaaattgcacgataactacgagctgatgaaggacgagtctaaagaatcagcgaaacgtctccagttactcgatgctaaagttgccgccctccggaagcaacatggagaactgcttcccgcacgcaagatcgaggaactctacgcatcattagagcgcaaaaatattgaaatctatattcagcgttcgagaagactttacggaaacacccctatgagacgagccttgttgacatggagtcttgcaggactggagctggttgctttggctgacgcttccttccacggccccgagcatgttgtggagcaagtccaagagttagatcccgggagtcccttcccccctgagggcttggatttagtcatccaatggtgccgcatgcttaaatgcaatgtaaaatcctttctcgtgcggattagggactatccccgctacttgttcgaaataagagactggaggctgatgggcagactggtggggaccgagcagagcggacaaccttgctcacgccgaagacaaattctacaccttggcctgccgtggggcaacgtggccgtggaacgtaacatgccaccacttaaattttatcacgacttccactccgaaattttccagtataccgttgtgtggggcccctgctgggatccagcatggaccctgattggacagtgcgtggaccttcttacaaagccctccgctgacccctcgcctcccttaccatggtgggacaaatcgaggctgctctttcatggcgactggcacatggacattgaacaggcaaacctccaccaactggctaccgaagacccctataatacaaccgagaacatgcactgggagtggagccacctatctttccactggaaacctggacagttcgttttcaagggcgacttagacatcaacgtcaggactgcatctaagtatgatgattgctgctttctacacctgcctgacttatgcatgactttagatttgcaatggctgtgccacggtaacccccatgaccatcactcagtgacactacgtgcacccgaattcttacccgaggtgccactggggcagttacatgacagctacagagctttccgttccgaaaaccttaaccttagtatcaaaatggacctgactcgtcactctggcaccatttcccagccacggattttgctgtacagcagcacattacggtggatgcagaatttttgggcaacatggacatccgtcacaagaccaatatgtcgtggcaaactcttcaataatttaaaaccaagtaagaaaaaactcggccaacattacaagcagttatcatacacagcattgttcccacagctccaagtgcactactgggccagcttcgcccagcagcgcggaatccaaatcgagtgttcccaaggtcacgttttcaccagaggtactcagcgcctgattccacaggcaggcaccgtgatgcgtaggctgataagcgactggtccgtcactcaaatggtatcggatttaagccaggtgaccgtacatctcatggccagtccgaccgaggagaatgccgaccactgcctggatccattggttactaagacccaccttttgtcattatcatcactcacatatcagcgacactcaaataggactgcagaggaggagctgagcgccagagatggcgaccccacattccacactcaccagttgcacctggtggatctccgaatctcttggacgacgaccaaccgggacatcgcattcggactgtacgacggctataaaaaagcagcggtgctcaaacgcaatctaagtacggaagcccttaaaggactgaagatcgacccccaaatgcctgccaaaaaacccaaaagaggcgtcccaacctcagcttctgcccctccccgggttaataccccctctttttccggacaacctgataagggcagtagtggaggcgcttacatgctacagaagctgatcgaagaaacagaccggttcgtcgtgttcacagaagaagagagtggcatgtcagaccagctgtgcggaatcgccgcctgccaaactgacgatatttataacaggaactgtctaattgaactcgtcaactgccagatggttttaaggggagcggaaacagaagggtgcgttatagtctctgcggcaaaagcgcagttactacagtgtcaacatcatcctgcttggtacggagataccctgaagcagaagacaagctggacctgcttactggatggaatgcaatatttcgctactaccgaaagctccccaactgaacaggacggacggcagctttggctggaggtaaagaacatcgaggagcaccgacaacggtcgttagattccgtgcaggaactgatggagagcggccaggcggtcggtggcatggtcactaccacaactgattggaaccaacccgcagaggcacagcaggcccaacaggttcagagaattatttcaagatgtaactgccgaatgtactatattagctattcacacgacattgaccccgagctggccactcagattaaaccccctgaagtactggagaaccaagaaaaggaggacctgctaaaaaagcaagaaggggctgtggacactttcactctgatccaccatgagctcgagattagcactaatccagcacaatatgcaatgatccttgacatagtaaacaacctgctactgcatgtagaaccaaagcgaaaagaacattctgagaagaaacaacgtgtgcggttccagctagaaatctcaagcaaccccgaagagcagcgatctagtatactgcaccttcaggaggctgtcagacaacacgtggctcagattagacaacttgaaaaacagatgtactctataatgaaatccctgcaggatgatagtaaaaatgagaatctcctagacctgaatcagaaactccaattacagctcaaccaagagaaagccaatctgcagctggagtcagaggagttgaatatcctgatccgatgtttcaaggacttccaactacagcgtgccaacaagatggagctcagaaaacaacaagaggacgtgtccgtggtaaggaggaccgagttctatttcgcccaggccagatggaggctgacagaagaagacggtcagctcggcatcgcagagttggagctgcagcgattcctgtattcaaaagtcaataagagtgatgatacagcggagcatctcctggaactgggttggttcacaatgaacaatctattgcctaacgcagtgtataaagtggtattgaggccccaaagcagttgtcaaagcgggcgtcagttggctcttaggttatttagtaaagtgcgccctccagtcggtggaatttcagtaaaggaacattttgaagtgaacgttgtgcccctaactatccagctcacccaccagttcttccaccgaatgatgggattcttttttccaggacggagcgtggaggacgatgaggtgggggacgaagaagacaaatctaaactggtcaccacaggcataccagttgtgaagccacgccagctgatcgccactgacgatgctgttcctttgggtcctggcaagggtgttgcacaggggttaacacgctcctctggtgtacgtcgctccttccgaaagtctcccgaacatccagtcgatgatattgacaaaatgaaagagagagcagccatgaataattcctttatctacataaaaatacctcaggtacccttgtgtgttagctataaaggggaaaagaacagtgtggactggggagatctcaaccttgttctaccatgcctcgaataccataacaacacgtggacgtggctggattttgcaatggccgtaaaacgtgattcccgtaaggcattggtcgcacaggtaattaaagagaaacttcgcttgaagtcagctaccgggagtgaagtgagaggcaagttagaaaccaagtccgacctgaacatgcagcaacaggaagaggaagaaaaagctaggttattgatcggattgagcgtcggagataagaatccaggaaagaaatcaattttcggccgtagaaaatag

SEQ ID NO: 181535 - DNA, 6618 bp, Artificial Sequence
  derived and/or modified sequence
atgcctctattcttttccgccctacttgtgctgctactggtcgctctgtcggcactatttctggggagatggctggtggttaggctggcgactaaatggtgtcagagaaagttacaagcggaactcaagatcggaagcttcaggttcttttggattcagaacgtgtctttgaagtttcaacagcatcagcagacagtggagatagataatctgtggatatctagcaagttgctctcacatgacctgccacactatgttgccctgtgtttcggggaggttcgcattcgcactgatcttcagaaggtaagcgatctctccgctcctttctcccagtccgctggcgtggatcagaaagagctttccttttccccatcgttactcaagatcttctgtcagctgttctcaatacacgtggacgccatcaacatcatggtcctcaaagttgataccagcgaatctctgtggcacattcagatcagtcgatcacgctttcttctagactctgacggaaagcgtctcatctgtgaggtttcgctatgtaaaattaattcaaaagtcctcaagtctggtcaacttgaagatacatgcctcgtggaactaagcttggctctggatttatgtttgaaagtgggcatttcttcgagacatttgaccgcaataacagttgacgtatggactctgcatgccgagctgcacgaaggcctatttcaaagccagctgttgtgccagggccccagtctggcctccaagcctgttccctgctccgaggttaccgagaatctggtcgaacccaccctgcctggactcttcctgctacagcaactacctgaccaagtgaaagtgaagatggagaacaccagcgttgtcctttctatgaactcacagaagcggcatctgacttggactctcaaactgctgcagttcctctatcatcgcgacgaagatcaacttcctctgaggtcttttacagctaattcagacatggcccagatgtcaaccgagctactgttggaggacgggcttctgctgtcccagtcaaggcagagaattgtttgcctgaatagcctgaaggcaagtgtccaagttaccacgatcgacttatctgccagcctcgtactgaacacctgcattatccattatcgacaccaagaatttagccattggctgcacctcctagccctcgaaacacaaggctcctccagtcccgtgttaaaacagcgcaagaagagaacctttccacagatcctggcccctatcattttctccacatcaatttcgaatgttaacatttctattcagctcggagacacccccccttttgccttaggcttcaacagtatctcgctcgactatcaacacttgcgcccacaaagcattcatcagagaggcgttctaacggtagaccacctgtgttggagggtcggaagcgattcccatattcagagggccccacacccaccaaacatgcatgtttggggcgaggctttagttctcgactcttttacccttcagggatcttataatcaacccctcggtctctcctctacacagagcgatacattgtttctcgattgtacaattcggggcctgcaagtggaagccagtgacacatgcgctcagtgtctctcacggatcctcagcctcatgggacctcagagcgggaagagcgccgtttcacgccattcgtcattcggtgagtccgtctcactcttgtggaaagtggatcttaaagtcgaggatatgaacctatttacattgtcggcactggttggtgcgtcggaggtacggcttgatactttaaccattttgggctctgccgagacttctacagtcggtatccagggactcgttttagctctcgttaagtctgttactgaaaagatgcagccatgttgcaaggcccctgatattcccacccccgtactatctctgtccatgctctcaataacataccactcatccatcagaagtttggaagtccagtgtggcgccgggttaacacttctgtggagcccaccagaccacatgtacctgtatcagcacgtcctggccacactgcaatgccgagatttactccgagctaccgtgttccccgagaccgtgccatctctcgctcttgagaccagtggcactacatctgaattagagggtcgcgcacccgagcctctcccacccaaacggctgctcaacttgactctggaggtgtccacagcaaagctcacagcatttgtcgccgaggataagttcattaccctcgccgccgaatccgtttctttaagtcgccatggcgggtctcttcaagcttattgtccggaacttgcagctggatttgatgggaacagcatctttaacttcaaggaagtggaagtgcaactattacccgaagtggaatttccttaccaatacgacttttctaggaccttagatgaggccgtaggagtgcagaaatggctcaaaggattgcaccaaggaacccgcgcctgggcctccccttcccctgtccctttgccccctgacctgctgctgaaagttgagcacttcagctgggttttcctggacgacgtgtttgaagttaaactccatgataactacgaattgatgaaagacgaaagcaaagagagtgcaaaacggcttcaactcctggacgccaaggtcgcggcactgagaaaacagcatggtgaattactcccggcacgcaaaatcgaagagctgtacgcctctctggaacgtaaaaatatcgaaatttacatacaacgctctcggcgcctttacggtaacacccccatgcggcgtgcattgcttacgtggtctttggccggcttagagcttgttgccctcgcagatgcctccttccatggacccgagcacgtcgttgagcaggtgcaggaattggaccccggctcaccctttcctccagaaggactggaccttgtcatccaatggtgtcgcatgttaaaatgtaatgttaagagctttctagtgagaatcagagactacccaagatacctgttcgaaatcagagactggagattgatgggcagactcgtcggcacagagcagtcaggacagccttgtagcagacgacgacagattctacacctcggtctgccctgggggaatgtagccgttgaaaggaatatgccgcccttgaaattttaccacgattttcatagcgagatcttccaatacactgtcgtatggggcccctgctgggatccagcatggacactaattgggcagtgtgtcgacctgcttaccaaacctagcgccgaccctagcccccccttgccctggtgggacaaatctcgcctgctttttcacggggattggcatatggatatcgagcaggctaatctgcatcagctggccaccgaggatccctataacactaccgaaaacatgcactgggaatggagtcacttatcatttcattggaaaccaggacagtttgtctttaagggcgatctagacattaatgttcggacagcaagtaagtacgacgactgttgctttttgcatctccccgatctgtgtatgacccttgatttacagtggctatgtcacggaaatccccacgatcaccatagtgtaaccctccgcgctccggagtttttacctgaggtccccctgggacagctgcatgattcttaccgagccttccgatccgaaaatctgaatctttcaattaaaatggatttgacgagacacagcggaacaatttcccagccacggattcttctgtatagctccacgctgcgctggatgcagaatttttgggcaacctggacatcggttacaagacccatttgtagaggcaagctttttaacaaccttaagccatccaagaaaaaactaggccagcactataaacaattaagctacacagccctgttcccacagctgcaggtacattattgggcatccttcgcacaacagcgcggcatccagatcgagtgctctcagggccatgtctttactcgcggaactcagaggctgataccacaggctggaaccgtgatgcgtcgacttatttccgactggagtgttacacaaatggtgtctgatctgtcccaagtgacggtgcatctgatggctagtccaaccgaagaaaatgccgatcactgcttagatcctctcgtcactaaaacacacttactaagcctgagctcgttaacctatcagcgtcattcaaaccggactgcagaggaagaactcagcgcccgagatggcgaccccacgttccacacccatcagctgcacctggtggatttacggatttcttggaccaccacaaatcgggatatcgcatttggactttatgacggatataagaaggcagcagtcttaaaacggaacctgagtaccgaagctctaaaggggctgaagatcgaccctcagatgccagccaagaaacccaaaagaggcgtacccacctccgcttctgctccacctcgagttaacacaccttcattttccggccagccagacaaaggctcttctggaggagcatatatgttgcagaagttaatagaagaaactgacagattcgtcgtttttactgaagaagagagtgggatgagcgaccagctgtgcggtatagctgcttgccaaacagatgatatctacaatagaaattgcctcattgaactagtcaactgtcagatggttctgaggggcgccgagacagaaggctgtgtcattgtatcagcagccaaggcccagctattgcagtgccaacaccatccagcgtggtacggggacacactaaagcagaaaacgagctggacgtgtttgctcgacgggatgcagtactttgccacgaccgaatccagccccactgaacaggatggccgtcagctgtggctagaagtgaagaatattgaagagcaccgccaaagaagcctcgactcagtgcaggaacttatggaatccggccaagccgtaggaggaatggttactacgaccaccgactggaatcaacccgctgaagcgcagcaggctcaacaggttcaacgaataatttctagatgcaactgtagaatgtattacatttcatactctcatgacattgatcctgagctggccacccaaatcaaaccacccgaggtcctggagaatcaggagaaagaagatttgctcaaaaagcaagaaggagccgtcgacacattcacccttatccaccacgagttagagattagtactaaccctgcacagtacgctatgatcctggacatcgtaaacaacttgcttctacatgtggagccaaaacgcaaagagcattcagagaaaaagcaacgtgttcgcttccaactcgaaatcagcagtaaccccgaagagcagaggtctagcatcctccacttgcaggaagccgtgagacagcatgttgcgcagatcagacagttagagaaacagatgtacagcatcatgaaatcattacaagacgatagcaagaacgaaaacttactggacctaaatcagaaactgcagttacagttaaatcaggagaaagcaaacttgcagctggaaagcgaagaactcaacatcctcatccggtgctttaaggatttccagctacaaagagccaataagatggaactgagaaaacaacaggaagatgtgtccgtcgtgagaagaactgaattttactttgcacaggcccggtggcgcctgaccgaagaggatgggcagctcggcatagccgaactcgagttacagagatttctttactctaaagtgaacaagtctgatgacaccgccgaacacctcctcgaattaggctggttcaccatgaataatctgctccctaacgctgtctacaaagtggtcctcaggccccagtccagctgccaatctggtcgccaactcgcattaagactgttctcaaaagtgagaccccctgtgggtggcattagcgtcaaagagcacttcgaggtcaacgttgtcccactgactatacaactgacgcaccaattcttccatcgtatgatgggcttcttttttcccggccggtcagttgaagatgatgaagttggagatgaggaagataagagtaagttggttaccaccggcatccctgtggtcaaaccacgtcaactgatcgcaacagacgatgcagtgccccttggccctgggaaaggagtagcccagggtctgacaaggtcgagcggtgtcaggaggtccttccgcaaatcccccgagcacccggttgatgacattgacaaaatgaaggaaagagcagccatgaacaatagctttatatacatcaaaatcccgcaggttccattgtgcgtgtcctacaaaggagagaaaaacagcgtcgattggggggatcttaacctcgtgctgccttgcttggagtaccataacaatacatggacttggttggacttcgccatggccgtgaaacgtgatagtagaaaggctcttgttgcgcaggtaatcaaggaaaaactgcgcctcaaatctgcaacagggagtgaagtgagaggtaaattggaaactaaatcagatctgaacatgcagcagcaggaagaggaagaaaaagccagattactcattggcctgagcgtcggtgataagaaccctggtaaaaagtcaatatttggacgtcgaaaatag

SEQ ID NO: 181536 - DNA, 6708 bp, Artificial Sequence
  derived and/or modified sequence
atgcccctcttctttagcgccctgctcgtactgctcttggttgccctcagcgccctgttcctcggcagatggctggtggtgagactggccacaaagtggtgtcagcgaaagctccaggccgagttgaagataggctcttttaggtttttctggatccaaaatgtatctctcaagtttcaacagcatcaacaaacagttgaaatagacaacctctggatttcctctaaactcctttcacatgatctacctcactacgttgccttgtgctttggagaagtacgaataaggacagatctgcagaaggtatctgatctgtctgcgcccttctcccagtcagccggtgtggaccagaaagaattgagctttagcccctccctacttaagatcttttgccagctgttttcaattcatgtggacgcaatcaatataatggtcctgaaagtagacacgtctgagtctctatggcatatccagatcagcaggagcagatttcttctcgactctgacggtaagcgcctgatctgtgaggtgagtctgtgtaaaatcaattccaaagtgctgaagtccgggcagctcgaagatacatgtctggtcgaactttctttagccctcgatttgtgtctcaaggtaggaatatccagtcgccacctgactgctataacggtcgatgtatggaccctgcatgcagagctacatgaaggtctgttccaaagccagttactgtgccaaggcccctccctcgcttctaagcctgtcccctgttcagaggtgacagaaaatttggtcgagcccaccctgcccgggcttttcctactacagcagctgcctgatcaggtgaaggtaaagatggaaaatactagcgtagtcctgtctatgaactcccaaaaaaggcacttgacatggactttaaagttactccagttcttatatcacagagacgaagatcaactgcccctccggagcttcacagccaactccgatatggcccagatgagcacagaattacttttggaagacggactcctgctctctcaaagtcgacagagaatcgtgtgtctcaactccctgaaggcatcagttcaggtgacaacgatcgatctgagtgcatctctggtactcaatacgtgcataatccactaccgtcaccaagagttttcacactggttacacctactggcactagaaacacagggcagtagcagtcccgtgttaaagcaacgaaagaaacgcactttcccccaaatcttggcgcctatcatattttcaacgtcaatcagtaatgttaatatctcaatacagttgggagatacgcctcctttcgcacttggattcaattcaattagcctcgactaccagcacctgaggcctcagtcaatccaccaacggggagtccttaccgtagatcacctctgttggcgcgttggatctgactctcatatacagcgcgcgccccaccctccgaacatgcacgtatggggagaagcccttgtacttgatagttttaccttacagggctcttacaaccaacccctcggtctttcctccactcaatctgatacactcttcctggactgcaccatacgcgggctacaggtcgaagcctctgacacttgcgcgcaatgcctcagccgtattctcagcctcatgggcccccagtctggtaaaagcgctgtgagccggcattcatccttcggagaatccgtatccctcctgtggaaagtcgatctgaaggtggaggacatgaatttgtttacattgtccgccttagtgggggcttctgaagtgaggctcgacactcttacaattctcgggtcagctgagacatccactgtgggcatacaaggtctggtactcgcattggtgaaaagcgtgacggaaaaaatgcagccttgttgtaaggcgcccgacatccccactcctgtgctttccctgtccatgctgagcattacgtaccatagttcaattcgtagcttggaagttcagtgtggagccggtctgaccctactctggtctcctcctgatcacatgtacctttaccagcatgttcttgcaacacttcagtgtcgggatctcctaagagccactgtattcccagaaacagtcccatccctagcgctagagaccagtggaacaacatctgagctggagggtagagcccccgaaccccttcctcctaagcgcctgctgaatttaacattagaagtttcaaccgccaagcttaccgcgtttgtcgcagaggacaaattcattacactagccgccgagtccgtgagcctgtcaagacatgggggatcactgcaagcatattgtccagagctggcagccgggtttgatggaaattctatcttcaatttcaaggaggtcgaagttcagctcctgcctgagctcgaggaaatgatcctgcacagaaacccgttcccagccctccagacccttagaaaccgagtctggttgctatcctttggctcagtgagtgtcgagtttccataccagtatgatttcagcagaacccttgacgaggccgtaggcgtgcaaaagtggttgaaaggacttcaccagggtactcgcgcttgggcatcccctagccccgtacctctgcctccagatctgttgctgaaagtagagcactttagttgggttttcctcgacgacgtgtttgaggtgaaattgcatgacaattacgaattgatgaaggatgaatccaaagagtcggcaaagagactgcagctgctcgacgctaaagttgctgctctgcgcaaacaacacggcgagttactacccgcaagaaagattgaggaactctacgccagtttggagcgcaagaacattgagatttatattcagcgatcacgccgtctgtacggaaatacacctatgagacgggcactgctgacctggtcactcgccggactggaactagtagcactggctgacgcgagcttccacggtccagaacacgtcgttgaacaggttcaagagctcgatcctggatccccctttcctcctgaagggctggatttggtcattcagtggtgcaggatgctgaaatgcaatgtgaagtcttttttggtgcgaataagggactatccaagatatttgtttgagattagggactggagactgatgggcaggctggttgggactgaacaatcaggccagccttgcagccggaggagacagatattacatcttggccttccgtggggcaacgtggcggtggagagaaacatgccaccactaaaattttaccacgactttcattccgaaatcttccaatacaccgtcgtatggggaccttgttgggaccctgcttggacactaatcggccagtgtgttgacttgttaacgaaaccgagcgctgatccctccccccctttgccttggtgggacaaatcacggctgttgttccacggcgattggcatatggatatagaacaggcaaatctccatcagttggcaactgaagatccttacaacactacagaaaatatgcattgggagtggtctcatctttccttccattggaaacccggccaatttgtgttcaagggcgacttagatataaacgttaggaccgcttcaaagtacgatgattgttgtttcctccacctccccgacctgtgtatgaccttagatctccagtggttgtgtcacggcaaccctcacgaccatcactccgttaccctacgtgcgcccgagtttttgcccgaagtgcctttggggcaacttcacgattcataccgtgcttttcgctccgagaacctgaatctctctattaaaatggacctgactagacacagtggaactatttcacagccgcgcattctgctctactccagcaccctcaggtggatgcaaaacttttgggcaacctggacaagcgtcacacgaccaatatgtagaggcaagctattcaacaacttgaagccatccaaaaaaaagctaggccagcactataaacaattatcttacaccgccctgtttcctcagctccaggtgcattattgggcctccttcgcacaacagaggggcatccaaatcgaatgctctcagggtcacgttttcactcgcggaactcagcgcctgattcctcaagcaggcacagtcatgcgaagactcatcagtgattggtccgttacccagatggtatcagacttaagtcaggtcactgtacacttgatggcttcccctactgaggaaaacgctgaccattgcttggatcctttagtgaccaagactcacctcctctccttaagttcactcacataccagagacattccaatcgtacggccgaggaagaacttagcgcacgcgatggagaccctacttttcatacccaccaactgcacctcgttgacctgcgcatttcttggacaactacaaaccgtgacatagccttcggcctttatgatggctacaaaaaagccgccgtcttgaagcggaacctctctacagaagctctcaagggcctcaaaatagacccacagatgcccgcaaagaagcccaagagaggggttcccacgtcagcctccgcaccacctagggtcaacacgccttccttctctgggcagcccgacaagggatcaagtggtggtgcatatatgttgcagaagttaattgaagagaccgatcggttcgtggttttcaccgaggaggagagcgggatgtcagaccaactatgcggtatagccgcttgtcagaccgatgatatttataaccgcaactgtctgattgaactcgtgaactgtcagatggttttaagaggcgcagaaacagaaggctgcgttatcgtctccgctgctaaagcccagctcctgcagtgccaacaccaccccgcatggtacggggacacattgaaacagaagacatcttggacatgtctgctggacggaatgcaatattttgccacaactgaatccagtccaactgaacaagatggccggcaactgtggttggaggttaaaaacatagaggaacatagacaaagaagtttagactcggtgcaagagcttatggagagtggtcaggctgtcggaggaatggtgactacaacgactgattggaatcagcctgctgaagcccaacaagcacaacaagttcagcggatcatctctagatgcaattgtcgtatgtactacatttcctactctcatgatattgacccagagctggctactcaaatcaaacccccagaggtgctcgaaaaccaggagaaagaggatctgctgaaaaaacaggaaggcgccgtcgatacattcactttaatacaccacgaactggagatttccacaaacccagcccagtacgctatgatccttgacattgttaataaccttctactccacgtcgaaccgaaacgtaaggagcactccgagaagaaacaacgcgtccgatttcagttggagatatcatcaaaccctgaagaacagcgctcctctatcctccatctgcaagaagcagtgaggcaacatgtggcccagatcaggcagctggagaaacaaatgtacagcatcatgaaaagcctgcaagacgactctaaaaatgaaaatctgcttgaccttaaccaaaagttacagctgcagctcaatcaggaaaaagctaaccttcagcttgagagcgaggaactcaatattctgatacgctgctttaaagattttcaattgcagcgtgcgaacaaaatggaactgagaaaacagcaggaggacgtgtcagttgttaggcgaactgagttttattttgcacaggctaggtggcgactgaccgaggaagatgggcaactagggatagctgagctcgagctgcaaaggtttctctactccaaagtgaataaatctgacgataccgccgagcatttacttgaattgggttggttcacgatgaataatcttctccctaatgcagtgtataaggccatcttgcgtccccaatcctcttgccaaagcggccgacagttggcactgcgattgttttctaaggtcagacccccggtcggtggcattagtgttaaagagcattttgaggtgaacgtggtaccgttgactatccagctgacacatcaattcttccatcgtatgatgggatttttttttccaggccgtagcgtagaagatgatgaggtcggagatgaggaagataagtcaaaactcgtaacaactgggatccccgtcgtcaaaccaaggcagctgattgcaaccgatgacgccgtgcccctcggtcccgggaaaggagttgcccaagggctgacccgctcatctggcgtgaggaggtcttttcgaaagtcacccgagcacccagtggacgatatcgacaaaatgaaggagagggctgctatgaacaactcatttatctatataaagattccacaggtccccttgtgtgtgagttataaaggagagaagaacagcgttgattggggagatctgaatttggtcctgccctgtctagaataccacaataatacctggacttggctcgattttgcaatggccgttaagagagatagcaggaaggcgctggttgctcaagttattaaagagaagcttagactaaaatcggccaccggctccgaggtccgcggcaagctggagacaaaatcagacctaaacatgcagcagcaggaggaggaagaaaaagccaggctactcataggcctcagcgtcggcgacaaaaacccgggaaagaagtcaatatttggacggagaaagtag

SEQ ID NO: 181537 - DNA, 6279 bp, Artificial Sequence
  derived and/or modified sequence
atggttctcaaggtcgacacaagcgagtctctgtggcatattcagatttccagatcaagattcctgctggattcagatggcaagcgactcatttgcgaggttagcttgtgcaaaataaatagtaaggtcctgaagtcgggtcagctcgaggacacgtgccttgtggaactgagcttagctctggacctgtgtcttaaagtcggcatttcttcaagacacctgacggcaataactgtggacgtgtggacattacatgctgaactccacgaagggctgttccagtctcaattactttgccaaggccctagtctcgcaagcaagcctgtcccttgtagcgaagtcaccgagaatctggttgaacccacgctgcccgggttattcctcctccaacagctaccagatcaggtgaaggtaaaaatggagaatacgtctgtagtgttgagcatgaatagccagaaacgacacctcacctggacgttgaagctactgcaattcctctaccatcgagatgaagaccagctacccctccggagctttaccgccaactccgatatggcgcaaatgagtaccgaactcctgttagaagacggattactccttagccagtccaggcagagaatagtatgtctcaactcactgaaagcctcggtacaagtgacaactatcgacctttccgcgtcgctagtcttaaacacatgcattattcactaccggcaccaagaattttcccactggctgcatctgttggcacttgagacccaaggcagttcttcacccgtactcaaacagagaaaaaagcggacatttccccaaatcctagcacctatcatcttctcaacgtctatttccaacgtcaatatttccatacagttaggcgacacacccccgttcgccctgggcttcaatagcatttctctggactatcagcatttgcggccacagtccattcaccaacgaggagtccttacggtagaccacctgtgttggagagtaggcagcgattctcacatacagagagcccctcacccaccgaacatgcatgtatggggcgaggcactagtcctggattcttttaccctgcaaggcagttacaaccagccgctagggcttagtagcactcagagcgacaccctttttctggactgtacaattcggggcctccaggtagaagcctctgatacctgcgcccaatgtctttcacggattctctccctgatgggtccccagtccggaaagagcgccgttagtcgtcattcttctttcggcgaaagtgtctccttgctgtggaaagttgatctgaaagtcgaagacatgaacctttttaccttaagcgctctagtgggggcaagtgaagtgaggctcgacaccctgaccatattagggtccgccgagaccagcactgtgggaattcaaggacttgtgctcgcccttgttaaaagtgtgaccgagaaaatgcagccctgttgtaaggctcccgacattccgacccctgtgctgagcctttccatgctttccatcacctaccatagctctataagatcccttgaagttcagtgcggagcaggcctgacattactatggagtccgcccgaccacatgtatctctatcagcatgtcctagccacacttcagtgcagggacctattgagagccaccgtgtttccagaaacagtgccttcccttgcattagaaacaagcgggacaactagcgagctggaaggtcgcgcacccgagcccctgccccctaaacggctgctgaatctaacactggaagtctccacagccaagctgaccgcctttgtggcagaggataaattcataaccctagccgcagagtcagtcagcctctctcgccatggaggttccctacaagcatattgtcctgaactagcagccgggtttgatggcaattccatctttaatttcaaggaggtcgaagtgcagctgctacccgagttagaggagatgatccttcatagaaacccgtttcctgctttgcagacccttaggaacagagtgtggcttctcagttttgggtctgtgtctgtggaatttccctaccagtacgatttcagcaggactctcgatgaagcagtcggggtacagaagtggctgaaaggactgcaccaagggacaagagcatgggctagcccgagtcccgttccacttccaccggacttgctcctgaaggtcgaacacttctcttgggtctttctggatgacgtattcgaagtcaagctacacgacaactatgagcttatgaaggacgaaagcaaagaatcagccaagcgtcttcagctgctcgatgcgaaggtagccgcactgcgtaaacaacacggcgagctcctccccgctcggaaaatcgaagagctctatgcctcactggaacggaaaaacattgaaatatatattcagagatccagacggctgtatggcaacaccccaatgagacgagcgcttctcacttggagcttagcagggttagaactagtcgcccttgcagacgcctcttttcacggaccggagcacgtcgtggaacaggtgcaggagcttgaccctggaagcccttttccgcctgaaggtctagatctggtcatacaatggtgtagaatgcttaaatgcaacgtaaagtcatttctggtgcgcatcagagactacccccgctacttgttcgaaattcgcgactggcgcttgatgggccgtctcgtgggcaccgaacaaagcggacagccttgcagtagacggaggcagattttgcaccttggcttaccttggggtaacgtggcggttgaaagaaacatgccccccttgaaattttatcacgactttcattctgagatatttcaatacacagtagtgtggggcccctgctgggatccagcatggaccttgataggacaatgcgtagacttgttgactaagccttcagcagatccttcacctcctctcccctggtgggataaaagtagacttctgttccatggcgattggcacatggatattgagcaggcaaacctccaccaactggccaccgaggatccatataatactactgaaaatatgcattgggaatggagccatctgtcattccattggaagcctggacagtttgttttcaaaggcgatttagacataaatgtgcgcactgcctctaagtatgatgactgctgtttcttacatctaccagacctttgcatgacccttgatctacagtggctgtgtcacggtaacccccacgatcaccactcagtaacactacgggccccggagttccttcccgaggtcccactgggacagcttcacgatagctacagagcatttcgttccgaaaatctgaacctcagcatcaagatggatctaaccaggcattccggcacaatctcccaaccaagaatcttactttactcgtcaactttacgttggatgcagaacttttgggccacttggaccagcgtgacaaggccgatatgtcggggaaagctattcaataacctcaaacctagcaagaaaaaactcgggcagcactataagcagttaagttacactgccctattccctcagttgcaagtgcattattgggcttcctttgcccaacagcgtggcatacaaatagaatgctctcagggccacgtgtttacaagaggaacacagaggctgattccgcaggccggcactgttatgagaagactgatttctgactggagtgttacacagatggtaagcgatctgtcccaggtgactgtccatcttatggcctccccaacagaggagaatgctgatcactgtctggatcccctggttaccaagacacacctcttatctctttcaagtctgacataccaaaggcactcaaaccgcacagctgaagaagagctttctgccagagacggtgaccccacattccacacccaccagctccaccttgtggacctccggatttcatggactactacgaatagggatatcgccttcggtctgtatgacgggtataagaaagcagccgtacttaaacgcaacctctccacagaggctctcaagggcctaaagatagacccccagatgccagcaaaaaagcccaaacgaggcgtcccgacatctgcctccgcccctccaagagtgaataccccaagctttagtggacagcctgataagggaagttcgggcggcgcatatatgttgcagaaactcatcgaagaaaccgaccgatttgttgtttttacagaagaagagagtggtatgtcagatcaactatgtggcatcgccgcatgccagaccgacgatatctacaatagaaattgtttaattgaactcgttaattgtcagatggtgttaagaggtgccgaaacagaaggctgtgtcatcgtgtcagccgccaaagcacagttgctccaatgccagcaccacccagcgtggtatggtgatactctaaaacagaagacatcctggacttgtctgctggacggaatgcaatacttcgcaacaacagagtcttcgccgactgaacaggacgggagacagctgtggctggaggtaaagaacattgaggagcatagacagcgctctttggattccgtccaggaattaatggagagcggacaggccgtaggaggcatggtgacaacaactactgactggaaccaacctgctgaggctcagcaagcccagcaagtccaaagaatcatttctcggtgcaattgcagaatgtattacatatcctattctcacgacatcgaccctgagctcgcaacccagatcaagccccccgaggtattggaaaaccaggaaaaagaggacttacttaagaagcaggaaggcgcagtagataccttcacacttatccatcacgaattggaaatcagcacgaatcccgctcaatatgctatgatcctcgatattgtgaataaccttttacttcatgtggagcccaagagaaaagaacattcggaaaaaaagcagcgcgtgaggttccagctcgaaatatcgtctaatcctgaagaacagcggtcatctattttgcatctccaggaggccgttcgccagcatgtcgcgcaaattcgtcagctcgaaaagcagatgtatagtattatgaagtcacttcaggatgacagtaaaaacgaaaacctcttagatctgaaccagaaattgcagcttcaactgaaccaagagaaggccaacctccagctggaatctgaagagctaaacattttgatcaggtgttttaaagacttccaacttcaaagagcgaacaaaatggagctgaggaaacagcaagaggatgtgtccgtggtgagacggaccgagttctattttgctcaagccagatggcgactaaccgaggaagatggacaactgggcattgcggagctagagctacaaagattcttgtatagcaaagttaataaatctgacgatactgcagaacatctgcttgagctgggctggttcaccatgaacaaccttcttcctaacgccgtttataaggtggtgctgcggcctcaatccagttgtcagtctggtcgccagctcgccctgcgactcttttccaaagtgaggcccccagtgggcggtatctcagtgaaggaacactttgaagtgaatgtggtgccccttactattcaacttacccaccaattttttcacagaatgatgggctttttcttccccgggagaagtgtggaggacgacgaagtgggagatgaggaggacaagtccaagctagtgaccaccggaataccagtagtgaaacctagacaattaattgcgactgacgacgctgtacccctgggaccaggcaagggagtggcacagggcttgacccgcagttcaggagtgcggcgctcttttaggaaatcacccgagcaccctgtcgatgatatcgataaaatgaaggaaagggctgcaatgaataacagctttatttatattaaaattcctcaggtacctctctgtgtgtcctacaaaggcgagaagaacagcgtggattggggagatctaaacctcgttcttccttgtctggagtaccacaacaacacctggacctggctggatttcgccatggctgtgaagagggatagcaggaaagcattagtggctcaagtcatcaaggaaaagctcaggcttaaaagcgccaccgggtctgaggtaagaggaaagctggagaccaaaagcgacctgaacatgcagcagcaagaggaagaggaaaaggcacgtttattaatcggactgtccgtgggcgacaagaaccctggtaaaaaatctatatttggtcgacgaaaatag

SEQ ID NO: 181538 - DNA, 7340 bp, Artificial Sequence
  derived and/or modified sequence
cgcgcgcagctggtcggcccgcggcggtgctgcgcggatccggcgtcggggcccggcatggcgggggccggggccaagccgggccggacccggacctaaatgcctctgttcttctccgcgctgttggtcttgctgctagttgcgcttagcgccctctttctaggccggtggcttgtggtccggttggccaccaagtggtgtcagcggaagctgcaggcggagctaaagattggctccttccgctttttttggatccagaatgtcagtcttaagtttcagcaacaccagcaaacagtggaaattgataacctgtggatttccagcaaactccttagccatgatcttccacactatgtggcattgtgctttggagaagtgcgtatcagaacggacctacagaaagtttctgacctgtctgccccattctcccagagcgctggggtggatcaaaaggaactgtccttcagcccatccttattgaagatcttctgccaactattctccattcatgtagatgctataaacatcatggttctcaaggtggatacctctgagtccttatggcatattcagatcagtagaagcagatttcttttggatagtgatgggaaaaggctaatctgtgaggtgagcttatgtaagatcaacagcaaagttctaaagagtggtcagctggaggacacctgcctagtggagctttcactggccctggacctgtgtctaaaggtgggcattagcagtcggcatctcactgctatcactgtggatgtgtggacactccatgctgaactgcatgagggcctcttccagagccaactgctgtgccagggcccaagcctagcatctaagcctgttccctgttcagaggtgacagaaaacttagttgagccaactctgcctggcctattccttctccagcagctgccagaccaggtcaaggttaagatggagaacacaagcgtggtattgtccatgaatagtcaaaagaggcacctgacttggactctgaagctgctgcagttcctgtaccaccgtgatgaggatcagctgccccttcgaagcttcacagcaaactctgatatggcacagatgagcactgaactgctgctggaagatgggttgttgttgtcccagagtcgccaacgcattgtctgcctcaactccctcaaggctagtgtgcaggtgaccaccattgacctctcagcctccctagttctgaacacttgcatcattcactaccggcaccaggaattctctcactggctgcacctgctagcactggaaacccaagggtctagttcacctgttctaaagcaaaggaaaaaaagaaccttcccccaaatcctggctcccatcatctttagcacctccatctccaatgtcaacatttccattcaacttggagatacaccaccttttgccttgggattcaattctatctctctggattaccagcacctcaggccacaaagcatccatcagcggggcgtcctaactgtggaccacctctgctggcgtgtgggcagtgactcccacattcagcgggcgccacacccacccaatatgcatgtttggggtgaggcacttgttctggactccttcacactacagggtagctataaccagcctctgggcctgtccagcacccagtcagataccctttttcttgattgtaccattcgaggacttcaggtggaagcatcagatacctgtgcccaatgtctgtctcgtatcttatccctgatgggtccacaatctgggaagtcagctgtctctaggcactcttcatttggggaatctgtgtcattactgtggaaggtggacttgaaggtcgaagacatgaacttgtttaccctttctgccttggttggtgcttcagaggtacgactggacaccctaactatcctgggcagtgcagagacgtccactgtggggattcaaggacttgtgttagcgctggtgaaatcagtcacggagaagatgcaaccctgttgcaaggcccctgacatccctaccccagtgctcagcctttccatgctctccatcacctatcacagcagcatccgctctctggaggttcagtgtggtgcagggctgaccttactttggagccccccagatcacatgtacctgtaccagcatgtcctggccactctacagtgccgagacctactaagagccactgtgtttcctgagactgtaccatcccttgcactagagacttcaggaactacttctgagctagaaggccgtgcccctgagccattacccccaaagcggctgctaaacctaaccctggaggtgagcacagccaagctcacagcttttgtagctgaggacaagttcattaccctggctgcagagagtgtgtcactgagccggcatggaggttccctgcaggcatactgtccagagctggctgctggctttgatggcaatagtatcttcaacttcaaggaggtggaggtgcagctgctacctgaggtggagtttccttatcagtatgacttttctcgaactctagatgaggctgtgggagttcagaagtggctgaagggactacatcaagggactcgtgcttgggcctctccaagccctgtcccactcccacctgatctactcttaaaggttgagcacttctcatgggttttcttggatgatgtttttgaggtgaaacttcatgataactacgagctgatgaaggatgaaagtaaggagagtgccaaaagactacagctactggatgctaaagtggccgcccttcggaagcagcatggggagttgttgcctgcccgcaaaattgaggagctctatgcctctttggaacgcaaaaacattgaaatctacatccagcgttcccgtcgtctctatggcaacacacccatgcgccgggcactgcttacttggagcttagcagggctagaactggtagctctggcagatgcctccttccatggtcctgagcatgtggtagaacaggttcaagagcttgatccaggcagcccttttccccctgagggattagatcttgtcattcagtggtgtcgaatgctcaagtgcaatgtcaagagctttctggttcggatcagggactatccacggtacctgtttgagatccgtgactggcggctaatgggtcgacttgtgggcaccgagcagagtggtcagccttgctcccgtcggcgtcagatcttgcacttggggcttccgtggggtaacgtggcagtggagaggaacatgcccccactcaaattctaccatgactttcactcggaaatattccagtacacagtggtgtggggcccatgctgggatccagcctggacactaattggccagtgtgtggacctcttgaccaagccctcagctgaccccagcccacctttgccctggtgggacaagagccgtcttctgttccatggagactggcacatggacattgaacaggcgaacctgcaccagctggccactgaggatccatacaacacaactgaaaatatgcactgggagtggagccacctgtcttttcattggaaacctggtcagtttgtgttcaagggtgacttggatatcaacgtgagaacagcctctaagtatgacgactgctgcttccttcacctgcctgacctctgcatgacactggacctgcagtggctgtgccatgggaacccccatgatcaccatagtgtcactctgcgggccccagagttcctgcctgaggtgcccttgggccagcttcatgactcctaccgggcctttcgctcggagaacctcaatctctccatcaagatggatctgactcggcacagtggaacaatatcccagccccgaattctgctatatagtagtaccctgcgctggatgcaaaacttctgggcaacttggacaagtgtcacaaggcctatctgcaggggaaagctcttcaataacctgaaacccagcaagaagaaacttggtcagcactacaagcaactttcctatacagccctctttccccagctgcaggtacattattgggcctcatttgcccagcaacggggcatccagattgagtgcagtcagggccatgtcttcactcgggggactcagcggcttatacctcaagcaggcacagtgatgcggcgccttatctctgattggagtgttacccagatggtgagtgacctaagtcaggtgaccgttcacctgatggcctcacccactgaagagaatgctgatcactgtcttgatcccttggtaacaaagacccacctgctgagcttgtcctccctcacctaccaacggcatagcaatcgcacagctgaggaggagctctctgctcgtgatggggatcctacctttcatacacatcagctgcacttagtagatttacggatttcctggacaactaccaatcgagacattgcctttgggttatatgatgggtacaaaaaggcagctgtactcaaacgtaatctttctactgaggccctgaaggggttaaagattgatccacagatgccagccaaaaagccaaagcggggtgtcccaactagtgcctcagccccacctcgtgttaacactcccagcttcagtggacaacctgataaggggtcatcaggaggtgcttacatgttgcagaagctaattgaagagacagataggtttgtagtgttcacagaagaggaatcaggcatgagtgaccagttgtgtggcattgctgcctgccagacggatgacatatacaaccgaaactgccttattgaattggtcaactgtcagatggttcttcgtggagcagagacagaaggctgtgtcattgtgtcagctgccaaagcccaactgctgcagtgccagcaccatccagcctggtatggtgatacattgaagcaaaagacatcctggacttgcctcttggatggcatgcagtactttgccaccactgaaagcagccccacagagcaggatggccgacagctctggttagaggtgaagaatatcgaggagcaccggcagcgtagtctggactctgtgcaggagctgatggagagtgggcaggcagtgggcggcatggttaccacaaccacagattggaaccagccagctgaggcacagcaagcccagcaagtccagcggatcatttcgcgttgcaactgccgaatgtactatattagttacagccatgacattgatcctgaactagcaactcagattaagccacctgaagttcttgagaaccaggaaaaggaagatctcctaaagaagcaggaaggggctgtggataccttcacccttatccaccatgagctggaaatttccaccaacccagctcagtatgccatgatcctggacattgtcaacaacctgctgctccatgtagaacctaagcggaaggaacatagtgagaagaagcaacgggtcaggttccagcttgagatctctagcaatccagaggagcaacgcagcagcatactgcatttgcaggaggctgtgcggcagcatgtggcccaaatacgacagctggagaagcagatgtattctatcatgaagtctttgcaggatgacagcaagaatgagaatctgcttgacctgaaccagaagcttcagttgcagctaaaccaggagaaggccaacctgcagctggaaagtgaagaactgaatatcctcatcaggtgttttaaggatttccaactgcagcgggctaacaagatggagctgcgaaagcagcaagaagatgtgagtgtggtccgtcgcactgagttttactttgctcaggcacggtggcgcctgacagaggaagatggacagctgggaattgctgaattagaactgcagaggttcctctacagcaaggtgaataagtctgatgacacagcagaacatcttctggagttgggctggtttaccatgaacaacctcctccccaatgctgtctataaggtagtactgcggccccagagctcctgccagtctgggcgacagctagctctccgcctcttcagcaaagttcggccccctgttgggggtatctctgttaaggagcattttgaggtaaatgtggtgcctctcaccatccagctgacacaccagttcttccacagaatgatgggctttttctttcctggccgaagtgtggaagatgatgaagttggtgatgaagaggataagtccaaactggtgactactggaataccagtggtgaagcctcggcagctgattgcaacagatgatgcagtaccactgggccctgggaagggtgtggcacagggtttgactcggagttctggggtcagaaggtcatttcgcaaatcgccagagcaccctgtggatgacattgacaagatgaaagagcgagctgccatgaacaactccttcatctacataaagattccacaggttccactgtgtgtcagctacaagggtgagaagaacagtgtggactggggtgaccttaacctggtgctgccctgtctggagtaccacaacaacacatggacatggctagactttgccatggctgtcaaaagggacagccgcaaagccctggttgcccaggtaatcaaagagaagctaaggctgaagtctgcaacaggctctgaggtccggggaaagctagaaactaaatcggacctgaacatgcaacagcaggaagaggaggagaaagcccggctcctcattggtttaagtgtgggcgacaagaaccctggcaagaagtccatctttggcaggcgcaaatgatttggcgattcgagtggctgcagtacaggatctgactctggctcaggctccagggacttgtggggtgggaggggcttcccgttatccacgaggatttgtgggtgtcagagcccataggcatcactcttcagcacctggtctgttcgctgcagggcatggtggacagtaatgctgagttctgtctcacactgatcaggctcagggccagagaggcaacaagagagcaagacccagggaatgggcccagggcaggaccctattcccttggggtcaagtgaaagggtagggggatagtcctgatcaagtgtgataaatttttatagacatatataaatatatatatattatatatatatttctaagtgtaactgtccttcctctgtgccaggaaacgggagggggctgatcctctgatcctcactccactgtcatgtttgaaagaggtattggtgttctggagtgggggtcaacccctccccagtctctgtgctaagttcacttgggaggatggcagtaggagccagggctggccatgggtcccctacccttccccgtaggatataccctggagaatggcaaaatgatttaaagagaaaaaaaaagatattttaaatttgatgctc

SEQ ID NO: 181539 - DNA, 7393 bp, Artificial Sequence
  derived and/or modified sequence
cggtgctgcgcggatccggcgtcggggcccggcatggcgggggccggggccaagccgggccggacccggacctaaatgcctctgttcttctccgcgctgttggtcttgctgctagttgcgcttagcgccctctttctaggccggtggcttgtggtccggttggccaccaagtggtgtcagcggaagctgcaggcggagctaaagattggctccttccgctttttttggatccagaatgtcagtcttaagtttcagcaacaccagcaaacagtggaaattgataacctgtggatttccagcaaactccttagccatgatcttccacactatgtggcattgtgctttggagaagtgcgtatcagaacggacctacagaaagtttctgacctgtctgccccattctcccagagcgctggggtggatcaaaaggaactgtccttcagcccatccttattgaagatcttctgccaactattctccattcatgtagatgctataaacatcatggttctcaaggtggatacctctgagtccttatggcatattcagatcagtagaagcagatttcttttggatagtgatgggaaaaggctaatctgtgaggtgagcttatgtaagatcaacagcaaagttctaaagagtggtcagctggaggacacctgcctagtggagctttcactggccctggacctgtgtctaaaggtgggcattagcagtcggcatctcactgctatcactgtggatgtgtggacactccatgctgaactgcatgagggcctcttccagagccaactgctgtgccagggcccaagcctagcatctaagcctgttccctgttcagaggtgacagaaaacttagttgagccaactctgcctggcctattccttctccagcagctgccagaccaggtcaaggttaagatggagaacacaagcgtggtattgtccatgaatagtcaaaagaggcacctgacttggactctgaagctgctgcagttcctgtaccaccgtgatgaggatcagctgccccttcgaagcttcacagcaaactctgatatggcacagatgagcactgaactgctgctggaagatgggttgttgttgtcccagagtcgccaacgcattgtctgcctcaactccctcaaggctagtgtgcaggtgaccaccattgacctctcagcctccctagttctgaacacttgcatcattcactaccggcaccaggaattctctcactggctgcacctgctagcactggaaacccaagggtctagttcacctgttctaaagcaaaggaaaaaaagaaccttcccccaaatcctggctcccatcatctttagcacctccatctccaatgtcaacatttccattcaacttggagatacaccaccttttgccttgggattcaattctatctctctggattaccagcacctcaggccacaaagcatccatcagcggggcgtcctaactgtggaccacctctgctggcgtgtgggcagtgactcccacattcagcgggcgccacacccacccaatatgcatgtttggggtgaggcacttgttctggactccttcacactacagggtagctataaccagcctctgggcctgtccagcacccagtcagataccctttttcttgattgtaccattcgaggacttcaggtggaagcatcagatacctgtgcccaatgtctgtctcgtatcttatccctgatgggtccacaatctgggaagtcagctgtctctaggcactcttcatttggggaatctgtgtcattactgtggaaggtggacttgaaggtcgaagacatgaacttgtttaccctttctgccttggttggtgcttcagaggtacgactggacaccctaactatcctgggcagtgcagagacgtccactgtggggattcaaggacttgtgttagcgctggtgaaatcagtcacggagaagatgcaaccctgttgcaaggcccctgacatccctaccccagtgctcagcctttccatgctctccatcacctatcacagcagcatccgctctctggaggttcagtgtggtgcagggctgaccttactttggagccccccagatcacatgtacctgtaccagcatgtcctggccactctacagtgccgagacctactaagagccactgtgtttcctgagactgtaccatcccttgcactagagacttcaggaactacttctgagctagaaggccgtgcccctgagccattacccccaaagcggctgctaaacctaaccctggaggtgagcacagccaagctcacagcttttgtagctgaggacaagttcattaccctggctgcagagagtgtgtcactgagccggcatggaggttccctgcaggcatactgtccagagctggctgctggctttgatggcaatagtatcttcaacttcaaggaggtggaggtgcagctgctacctgagctggaagagatgatcctccaccggaaccccttccctgcgctgcagaccctccggaaccgtgtttggctcctctctttcggctcagtctcggtggagtttccttatcagtatgacttttctcgaactctagatgaggctgtgggagttcagaagtggctgaagggactacatcaagggactcgtgcttgggcctctccaagccctgtcccactcccacctgatctactcttaaaggttgagcacttctcatgggttttcttggatgatgtttttgaggtgaaacttcatgataactacgagctgatgaaggatgaaagtaaggagagtgccaaaagactacagctactggatgctaaagtggccgcccttcggaagcagcatggggagttgttgcctgcccgcaaaattgaggagctctatgcctctttggaacgcaaaaacattgaaatctacatccagcgttcccgtcgtctctatggcaacacacccatgcgccgggcactgcttacttggagcttagcagggctagaactggtagctctggcagatgcctccttccatggtcctgagcatgtggtagaacaggttcaagagcttgatccaggcagcccttttccccctgagggattagatcttgtcattcagtggtgtcgaatgctcaagtgcaatgtcaagagctttctggttcggatcagggactatccacggtacctgtttgagatccgtgactggcggctaatgggtcgacttgtgggcaccgagcagagtggtcagccttgctcccgtcggcgtcagatcttgcacttggggcttccgtggggtaacgtggcagtggagaggaacatgcccccactcaaattctaccatgactttcactcggaaatattccagtacacagtggtgtggggcccatgctgggatccagcctggacactaattggccagtgtgtggacctcttgaccaagccctcagctgaccccagcccacctttgccctggtgggacaagagccgtcttctgttccatggagactggcacatggacattgaacaggcgaacctgcaccagctggccactgaggatccatacaacacaactgaaaatatgcactgggagtggagccacctgtcttttcattggaaacctggtcagtttgtgttcaagggtgacttggatatcaacgtgagaacagcctctaagtatgacgactgctgcttccttcacctgcctgacctctgcatgacactggacctgcagtggctgtgccatgggaacccccatgatcaccatagtgtcactctgcgggccccagagttcctgcctgaggtgcccttgggccagcttcatgactcctaccgggcctttcgctcggagaacctcaatctctccatcaagatggatctgactcggcacagtggaacaatatcccagccccgaattctgctatatagtagtaccctgcgctggatgcaaaacttctgggcaacttggacaagtgtcacaaggcctatctgcaggggaaagctcttcaataacctgaaacccagcaagaagaaacttggtcagcactacaagcaactttcctatacagccctctttccccagctgcaggtacattattgggcctcatttgcccagcaacggggcatccagattgagtgcagtcagggccatgtcttcactcgggggactcagcggcttatacctcaagcaggcacagtgatgcggcgccttatctctgattggagtgttacccagatggtgagtgacctaagtcaggtgaccgttcacctgatggcctcacccactgaagagaatgctgatcactgtcttgatcccttggtaacaaagacccacctgctgagcttgtcctccctcacctaccaacggcatagcaatcgcacagctgaggaggagctctctgctcgtgatggggatcctacctttcatacacatcagctgcacttagtagatttacggatttcctggacaactaccaatcgagacattgcctttgggttatatgatgggtacaaaaaggcagctgtactcaaacgtaatctttctactgaggccctgaaggggttaaagattgatccacagatgccagccaaaaagccaaagcggggtgtcccaactagtgcctcagccccacctcgtgttaacactcccagcttcagtggacaacctgataaggggtcatcaggaggtgcttacatgttgcagaagctaattgaagagacagataggtttgtagtgttcacagaagaggaatcaggcatgagtgaccagttgtgtggcattgctgcctgccagacggatgacatatacaaccgaaactgccttattgaattggtcaactgtcagatggttcttcgtggagcagagacagaaggctgtgtcattgtgtcagctgccaaagcccaactgctgcagtgccagcaccatccagcctggtatggtgatacattgaagcaaaagacatcctggacttgcctcttggatggcatgcagtactttgccaccactgaaagcagccccacagagcaggatggccgacagctctggttagaggtgaagaatatcgaggagcaccggcagcgtagtctggactctgtgcaggagctgatggagagtgggcaggcagtgggcggcatggttaccacaaccacagattggaaccagccagctgaggcacagcaagcccagcaagtccagcggatcatttcgcgttgcaactgccgaatgtactatattagttacagccatgacattgatcctgaactagcaactcagattaagccacctgaagttcttgagaaccaggaaaaggaagatctcctaaagaagcaggaaggggctgtggataccttcacccttatccaccatgagctggaaatttccaccaacccagctcagtatgccatgatcctggacattgtcaacaacctgctgctccatgtagaacctaagcggaaggaacatagtgagaagaagcaacgggtcaggttccagcttgagatctctagcaatccagaggagcaacgcagcagcatactgcatttgcaggaggctgtgcggcagcatgtggcccaaatacgacagctggagaagcagatgtattctatcatgaagtctttgcaggatgacagcaagaatgagaatctgcttgacctgaaccagaagcttcagttgcagctaaaccaggagaaggccaacctgcagctggaaagtgaagaactgaatatcctcatcaggtgttttaaggatttccaactgcagcgggctaacaagatggagctgcgaaagcagcaagaagatgtgagtgtggtccgtcgcactgagttttactttgctcaggcacggtggcgcctgacagaggaagatggacagctgggaattgctgaattagaactgcagaggttcctctacagcaaggtgaataagtctgatgacacagcagaacatcttctggagttgggctggtttaccatgaacaacctcctccccaatgctgtctataaggcaatactgcggccccagagctcctgccagtctgggcgacagctagctctccgcctcttcagcaaagttcggccccctgttgggggtatctctgttaaggagcattttgaggtaaatgtggtgcctctcaccatccagctgacacaccagttcttccacagaatgatgggctttttctttcctggccgaagtgtggaagatgatgaagttggtgatgaagaggataagtccaaactggtgactactggaataccagtggtgaagcctcggcagctgattgcaacagatgatgcagtaccactgggccctgggaagggtgtggcacagggtttgactcggagttctggggtcagaaggtcatttcgcaaatcgccagagcaccctgtggatgacattgacaagatgaaagagcgagctgccatgaacaactccttcatctacataaagattccacaggttccactgtgtgtcagctacaagggtgagaagaacagtgtggactggggtgaccttaacctggtgctgccctgtctggagtaccacaacaacacatggacatggctagactttgccatggctgtcaaaagggacagccgcaaagccctggttgcccaggtaatcaaagagaagctaaggctgaagtctgcaacaggctctgaggtccggggaaagctagaaactaaatcggacctgaacatgcaacagcaggaagaggaggagaaagcccggctcctcattggtttaagtgtgggcgacaagaaccctggcaagaagtccatctttggcaggcgcaaatgatttggcgattcgagtggctgcagtacaggatctgactctggctcaggctccagggacttgtggggtgggaggggcttcccgttatccacgaggatttgtgggtgtcagagcccataggcatcactcttcagcacctggtctgttcgctgcagggcatggtggacagtaatgctgagttctgtctcacactgatcaggctcagggccagagaggcaacaagagagcaagacccagggaatgggcccagggcaggaccctattcccttggggtcaagtgaaagggtagggggatagtcctgatcaagtgtgataaatttttatagacatatataaatatatatatattatatatatatttctaagtgtaactgtccttcctctgtgccaggaaacgggagggggctgatcctctgatcctcactccactgtcatgtttgaaagaggtattggtgttctggagtgggggtcaacccctccccagtctctgtgctaagttcacttgggaggatggcagtaggagccagggctggccatgggtcccctacccttccccgtaggatataccctggagaatggcaaaatgatttaaagagaaaaaaaaagatatttt

SEQ ID NO: 181540 - DNA, 6856 bp, Artificial Sequence
  derived and/or modified sequence
atgagtcagccaggtccaccgccagcccaggtggcttgtggtccggttggccaccaagtggtgtcagcggaagctgcaggcggagctaaagattggctccttccgctttttttggatccagaatgtcagtcttaagtttcagcaacaccagcaaacagtggaaattgataacctgtggatttccagcaaactccttagccatgatcttccacactatgtggcattgtgctttggagaagtgcgtatcagaacggacctacagaaagtttctgacctgtctgccccattctcccagagcgctggggtggatcaaaaggaactgtccttcagcccatccttattgaagatcttctgccaactattctccattcatgtagatgctataaacatcatggttctcaaggtggatacctctgagtccttatggcatattcagatcagtagaagcagatttcttttggatagtgatgggaaaaggctaatctgtgaggtgagcttatgtaagatcaacagcaaagttctaaagagtggtcagctggaggacacctgcctagtggagctttcactggccctggacctgtgtctaaaggtgggcattagcagtcggcatctcactgctatcactgtggatgtgtggacactccatgctgaactgcatgagggcctcttccagagccaactgctgtgccagggcccaagcctagcatctaagcctgttccctgttcagaggtgacagaaaacttagttgagccaactctgcctggcctattccttctccagcagctgccagaccaggtcaaggttaagatggagaacacaagcgtggtattgtccatgaatagtcaaaagaggcacctgacttggactctgaagctgctgcagttcctgtaccaccgtgatgaggatcagctgccccttcgaagcttcacagcaaactctgatatggcacagatgagcactgaactgctgctggaagatgggttgttgttgtcccagagtcgccaacgcattgtctgcctcaactccctcaaggctagtgtgcaggtgaccaccattgacctctcagcctccctagttctgaacacttgcatcattcactaccggcaccaggaattctctcactggctgcacctgctagcactggaaacccaagggtctagttcacctgttctaaagcaaaggaaaaaaagaaccttcccccaaatcctggctcccatcatctttagcacctccatctccaatgtcaacatttccattcaacttggagatacaccaccttttgccttgggattcaattctatctctctggattaccagcacctcaggccacaaagcatccatcagcggggcgtcctaactgtggaccacctctgctggcgtgtgggcagtgactcccacattcagcgggcgccacacccacccaatatgcatgtttggggtgaggcacttgttctggactccttcacactacagggtagctataaccagcctctgggcctgtccagcacccagtcagataccctttttcttgattgtaccattcgaggacttcaggtggaagcatcagatacctgtgcccaatgtctgtctcgtatcttatccctgatgggtccacaatctgggaagtcagctgtctctaggcactcttcatttggggaatctgtgtcattactgtggaaggtggacttgaaggtcgaagacatgaacttgtttaccctttctgccttggttggtgcttcagaggtacgactggacaccctaactatcctgggcagtgcagagacgtccactgtggggattcaaggacttgtgttagcgctggtgaaatcagtcacggagaagatgcaaccctgttgcaaggcccctgacatccctaccccagtgctcagcctttccatgctctccatcacctatcacagcagcatccgctctctggaggttcagtgtggtgcagggctgaccttactttggagccccccagatcacatgtacctgtaccagcatgtcctggccactctacagtgccgagacctactaagagccactgtgtttcctgagactgtaccatcccttgcactagagacttcaggaactacttctgagctagaaggccgtgcccctgagccattacccccaaagcggctgctaaacctaaccctggaggtgagcacagccaagctcacagcttttgtagctgaggacaagttcattaccctggctgcagagagtgtgtcactgagccggcatggaggttccctgcaggcatactgtccagagctggctgctggctttgatggcaatagtatcttcaacttcaaggaggtggaggtgcagctgctacctgagctggaagagatgatcctccaccggaaccccttccctgcgctgcagaccctccggaaccgtgtttggctcctctctttcggctcagtctcggtggagtttccttatcagtatgacttttctcgaactctagatgaggctgtgggagttcagaagtggctgaagggactacatcaagggactcgtgcttgggcctctccaagccctgtcccactcccacctgatctactcttaaaggttgagcacttctcatgggttttcttggatgatgtttttgaggtgaaacttcatgataactacgagctgatgaaggatgaaagtaaggagagtgccaaaagactacagctactggatgctaaagtggccgcccttcggaagcagcatggggagttgttgcctgcccgcaaaattgaggagctctatgcctctttggaacgcaaaaacattgaaatctacatccagcgttcccgtcgtctctatggcaacacacccatgcgccgggcactgcttacttggagcttagcagggctagaactggtagctctggcagatgcctccttccatggtcctgagcatgtggtagaacaggttcaagagcttgatccaggcagcccttttccccctgagggattagatcttgtcattcagtggtgtcgaatgctcaagtgcaatgtcaagagctttctggttcggatcagggactatccacggtacctgtttgagatccgtgactggcggctaatgggtcgacttgtgggcaccgagcagagtggtcagccttgctcccgtcggcgtcagatcttgcacttggggcttccgtggggtaacgtggcagtggagaggaacatgcccccactcaaattctaccatgactttcactcggaaatattccagtacacagtggtgtggggcccatgctgggatccagcctggacactaattggccagtgtgtggacctcttgaccaagccctcagctgaccccagcccacctttgccctggtgggacaagagccgtcttctgttccatggagactggcacatggacattgaacaggcgaacctgcaccagctggccactgaggatccatacaacacaactgaaaatatgcactgggagtggagccacctgtcttttcattggaaacctggtcagtttgtgttcaagggtgacttggatatcaacgtgagaacagcctctaagtatgacgactgctgcttccttcacctgcctgacctctgcatgacactggacctgcagtggctgtgccatgggaacccccatgatcaccatagtgtcactctgcgggccccagagttcctgcctgaggtgcccttgggccagcttcatgactcctaccgggcctttcgctcggagaacctcaatctctccatcaagatggatctgactcggcacagtggaacaatatcccagccccgaattctgctatatagtagtaccctgcgctggatgcaaaacttctgggcaacttggacaagtgtcacaaggcctatctgcaggggaaagctcttcaataacctgaaacccagcaagaagaaacttggtcagcactacaagcaactttcctatacagccctctttccccagctgcaggtacattattgggcctcatttgcccagcaacggggcatccagattgagtgcagtcagggccatgtcttcactcgggggactcagcggcttatacctcaagcaggcacagtgatgcggcgccttatctctgattggagtgttacccagatggtgagtgacctaagtcaggtgaccgttcacctgatggcctcacccactgaagagaatgctgatcactgtcttgatcccttggtaacaaagacccacctgctgagcttgtcctccctcacctaccaacggcatagcaatcgcacagctgaggaggagctctctgctcgtgatggggatcctacctttcatacacatcagctgcacttagtagatttacggatttcctggacaactaccaatcgagacattgcctttgggttatatgatgggtacaaaaaggcagctgtactcaaacgtaatctttctactgaggccctgaaggggttaaagattgatccacagatgccagccaaaaagccaaagcggggtgtcccaactagtgcctcagccccacctcgtgttaacactcccagcttcagtggacaacctgataaggggtcatcaggaggtgcttacatgttgcagaagctaattgaagagacagataggtttgtagtgttcacagaagaggaatcaggcatgagtgaccagttgtgtggcattgctgcctgccagacggatgacatatacaaccgaaactgccttattgaattggtcaactgtcagatggttcttcgtggagcagagacagaaggctgtgtcattgtgtcagctgccaaagcccaactgctgcagtgccagcaccatccagcctggtatggtgatacattgaagcaaaagacatcctggacttgcctcttggatggcatgcagtactttgccaccactgaaagcagccccacagagcaggatggccgacagctctggttagaggtgaagaatatcgaggagcaccggcagcgtagtctggactctgtgcaggagctgatggagagtgggcaggcagtgggcggcatggttaccacaaccacagattggaaccagccagctgaggcacagcaagcccagcaagtccagcggatcatttcgcgttgcaactgccgaatgtactatattagttacagccatgacattgatcctgaactagcaactcagattaagccacctgaagttcttgagaaccaggaaaaggaagatctcctaaagaagcaggaaggggctgtggataccttcacccttatccaccatgagctggaaatttccaccaacccagctcagtatgccatgatcctggacattgtcaacaacctgctgctccatgtagaacctaagcggaaggaacatagtgagaagaagcaacgggtcaggttccagcttgagatctctagcaatccagaggagcaacgcagcagcatactgcatttgcaggaggctgtgcggcagcatgtggcccaaatacgacagctggagaagcagatgtattctatcatgaagtctttgcaggatgacagcaagaatgagaatctgcttgacctgaaccagaagcttcagttgcagctaaaccaggagaaggccaacctgcagctggaaagtgaagaactgaatatcctcatcaggtgttttaaggatttccaactgcagcgggctaacaagatggagctgcgaaagcagcaagaagatgtgagtgtggtccgtcgcactgagttttactttgctcaggcacggtggcgcctgacagaggaagatggacagctgggaattgctgaattagaactgcagaggttcctctacagcaaggtgaataagtctgatgacacagcagaacatcttctggagttgggctggtttaccatgaacaacctcctccccaatgctgtctataaggtagtactgcggccccagagctcctgccagtctgggcgacagctagctctccgcctcttcagcaaagttcggccccctgttgggggtatctctgttaaggagcattttgaggtaaatgtggtgcctctcaccatccagctgacacaccagttcttccacagaatgatgggctttttctttcctggccgaagtgtggaagatgatgaagttggtgatgaagaggataagtccaaactggtgactactggaataccagtggtgaagcctcggcagctgattgcaacagatgatgcagtaccactgggccctgggaagggtgtggcacagggtttgactcggagttctggggtcagaaggtcatttcgcaaatcgccagagcaccctgtggatgacattgacaagatgaaagagcgagctgccatgaacaactccttcatctacataaagattccacaggttccactgtgtgtcagctacaagggtgagaagaacagtgtggactggggtgaccttaacctggtgctgccctgtctggagtaccacaacaacacatggacatggctagactttgccatggctgtcaaaagggacagccgcaaagccctggttgcccaggtaatcaaagagaagctaaggctgaagtctgcaacaggctctgaggtccggggaaagctagaaactaaatcggacctgaacatgcaacagcaggaagaggaggagaaagcccggctcctcattggtttaagtgtgggcgacaagaaccctggcaagaagtccatctttggcaggcgcaaatgatttggcgattcgagtggctgcagtacaggatctgactctggctcaggctccagggacttgtggggtgggaggggcttcccgttatccacgaggatttgtgggtgtcagagcccataggcatcactcttcagcacctggtctgttcgctgcagggcatggtggacagtaatgctgagttctgtctca

SEQ ID NO: 181541 - protein, 1143 aa, Artificial Sequence
  derived and/or modified sequence
MPPPRTREGRDRRDHHRAPSEEEALEKWDWNCPETRRLLEDAFFREEDYIRQGSEECQKFWTFFERLQRFQNLKTSRKEEKDPGQPKHSIPALADLPRTYDPRYRINLSVLGPATRGSQGLGRHLPAERVAEFRRALLHYLDFGQKQAFGRLAKLQRERAALPIAQYGNRILQTLKEHQVVVVAGDTGCGKSTQVPQYLLAAGFSHVACTQPRRIACISLAKRVGFESLSQYGSQVGYQIRFESTRSAATKIVFLTVGLLLRQIQREPSLPQYEVLIVDEVHERHLHNDFLLGVLQRLLPTRPDLKVILMSATINISLFSSYFSNAPVVQVPGRLFPITVVYQPQEAEPTTSKSEKLDPRPFLRVLESIDHKYPPEERGDLLVFLSGMAEISAVLEAAQTYASHTQRWVVLPLHSALSVADQDKVFDVAPPGVRKCILSTNIAETSVTIDGIRFVVDSGKVKEMSYDPQAKLQRLQEFWISQASAEQRKGRAGRTGPGVCFRLYAESDYDAFAPYPVPEIRRVALDSLVLQMKSMSVGDPRTFPFIEPPPPASLETAILYLRDQGALDSSEALTPIGSLLAQLPVDVVIGKMLILGSMFSLVEPVLTIAAALSVQSPFTRSAQSSPECAAARRPLESDQGDPFTLFNVFNAWVQVKSERSRNSRKWCRRRGIEEHRLYEMANLRRQFKELLEDHGLLAGAQAAQVGDSYSRLQQRRERRALHQLKRQHEEGAGRRRKVLRLQEEQDGGSSDEDRAGPAPPGASDGVDIQDVKFKLRHDLAQLQAAASSAQDLSREQLALLKLVLGRGLYPQLAVPDAFNSSRKDSDQIFHTQAKQGAVLHPTCVFAGSPEVLHAQELEASNCDGSRDDKDKMSSKHQLLSFVSLLETNKPYLVNCVRIPALQSLLLFSRSLDTNGDCSRLVADGWLELQLADSESAIRLLAASLRLRARWESALDRQLAHQAQQQLEEEEEDTPVSPKEVATLSKELLQFTASKIPYSLRRLTGLEVQNMYVGPQTIPATPHLPGLFGSSTLSPHPTKGGYAVTDFLTYNCLTNDTDLYSDCLRTFWTCPHCGLHAPLTPLERIAHENTCPQAPQDGPPGAEEAALETLQKTSVLQRPYHCEACGKDFLFTPTEVLRHRKQHV

SEQ ID NO: 181542 - DNA, 3432 bp, Artificial Sequence
  derived and/or modified sequence
atgcccccccccagaaccagagagggcagagacagaagagaccaccacagagcccccagcgaggaggaggccctggagaagtgggactggaactgccccgagaccagaagactgctggaggacgccttcttcagagaggaggactacatcagacagggcagcgaggagtgccagaagttctggaccttcttcgagagactgcagagattccagaacctgaagaccagcagaaaggaggagaaggaccccggccagcccaagcacagcatccccgccctggccgacctgcccagaacctacgaccccagatacagaatcaacctgagcgtgctgggccccgccaccagaggcagccagggcctgggcagacacctgcccgccgagagagtggccgagttcagaagagccctgctgcactacctggacttcggccagaagcaggccttcggcagactggccaagctgcagagagagagagccgccctgcccatcgcccagtacggcaacagaatcctgcagaccctgaaggagcaccaggtggtggtggtggccggcgacaccggctgcggcaagagcacccaggtgccccagtacctgctggccgccggcttcagccacgtggcctgcacccagcccagaagaatcgcctgcatcagcctggccaagagagtgggcttcgagagcctgagccagtacggcagccaggtgggctaccagatcagattcgagagcaccagaagcgccgccaccaagatcgtgttcctgaccgtgggcctgctgctgagacagatccagagagagcccagcctgccccagtacgaggtgctgatcgtggacgaggtgcacgagagacacctgcacaacgacttcctgctgggcgtgctgcagagactgctgcccaccagacccgacctgaaggtgatcctgatgagcgccaccatcaacatcagcctgttcagcagctacttcagcaacgcccccgtggtgcaggtgcccggcagactgttccccatcaccgtggtgtaccagccccaggaggccgagcccaccaccagcaagagcgagaagctggaccccagacccttcctgagagtgctggagagcatcgaccacaagtacccccccgaggagagaggcgacctgctggtgttcctgagcggcatggccgagatcagcgccgtgctggaggccgcccagacctacgccagccacacccagagatgggtggtgctgcccctgcacagcgccctgagcgtggccgaccaggacaaggtgttcgacgtggccccccccggcgtgagaaagtgcatcctgagcaccaacatcgccgagaccagcgtgaccatcgacggcatcagattcgtggtggacagcggcaaggtgaaggagatgagctacgacccccaggccaagctgcagagactgcaggagttctggatcagccaggccagcgccgagcagagaaagggcagagccggcagaaccggccccggcgtgtgcttcagactgtacgccgagagcgactacgacgccttcgccccctaccccgtgcccgagatcagaagagtggccctggacagcctggtgctgcagatgaagagcatgagcgtgggcgaccccagaaccttccccttcatcgagccccccccccccgccagcctggagaccgccatcctgtacctgagagaccagggcgccctggacagcagcgaggccctgacccccatcggcagcctgctggcccagctgcccgtggacgtggtgatcggcaagatgctgatcctgggcagcatgttcagcctggtggagcccgtgctgaccatcgccgccgccctgagcgtgcagagccccttcaccagaagcgcccagagcagccccgagtgcgccgccgccagaagacccctggagagcgaccagggcgaccccttcaccctgttcaacgtgttcaacgcctgggtgcaggtgaagagcgagagaagcagaaacagcagaaagtggtgcagaagaagaggcatcgaggagcacagactgtacgagatggccaacctgagaagacagttcaaggagctgctggaggaccacggcctgctggccggcgcccaggccgcccaggtgggcgacagctacagcagactgcagcagagaagagagagaagagccctgcaccagctgaagagacagcacgaggagggcgccggcagaagaagaaaggtgctgagactgcaggaggagcaggacggcggcagcagcgacgaggacagagccggccccgccccccccggcgccagcgacggcgtggacatccaggacgtgaagttcaagctgagacacgacctggcccagctgcaggccgccgccagcagcgcccaggacctgagcagagagcagctggccctgctgaagctggtgctgggcagaggcctgtacccccagctggccgtgcccgacgccttcaacagcagcagaaaggacagcgaccagatcttccacacccaggccaagcagggcgccgtgctgcaccccacctgcgtgttcgccggcagccccgaggtgctgcacgcccaggagctggaggccagcaactgcgacggcagcagagacgacaaggacaagatgagcagcaagcaccagctgctgagcttcgtgagcctgctggagaccaacaagccctacctggtgaactgcgtgagaatccccgccctgcagagcctgctgctgttcagcagaagcctggacaccaacggcgactgcagcagactggtggccgacggctggctggagctgcagctggccgacagcgagagcgccatcagactgctggccgccagcctgagactgagagccagatgggagagcgccctggacagacagctggcccaccaggcccagcagcagctggaggaggaggaggaggacacccccgtgagccccaaggaggtggccaccctgagcaaggagctgctgcagttcaccgccagcaagatcccctacagcctgagaagactgaccggcctggaggtgcagaacatgtacgtgggcccccagaccatccccgccaccccccacctgcccggcctgttcggcagcagcaccctgagcccccaccccaccaagggcggctacgccgtgaccgacttcctgacctacaactgcctgaccaacgacaccgacctgtacagcgactgcctgagaaccttctggacctgcccccactgcggcctgcacgcccccctgacccccctggagagaatcgcccacgagaacacctgcccccaggccccccaggacggcccccccggcgccgaggaggccgccctggagaccctgcagaagaccagcgtgctgcagagaccctaccactgcgaggcctgcggcaaggacttcctgttcacccccaccgaggtgctgagacacagaaagcagcacgtgtag

SEQ ID NO: 181543 - DNA, 4372 bp, Artificial Sequence
  derived and/or modified sequence
acgagatggctgtgtgcgcaggcgcaagactagcgctcttgggaccggaagttaaggcgttcgcggcgtgtgaatccagggcctgaaaacccagaatgaacttgtgtccatcccagagatcactgcagatgtcatgaggtaccctttgtgtcaccagctcaagcaggcctctggccactttatcatctgtggtggtcctgtgccgtgaccaggaggaaaaattagctctttgaagagaaagtagttctctattgcaggcactggcctcttaaattgttgcaggtggggaatggatgagaatatttgttttgggtgatcagaactgagactcctattgtggattagtaacatgcctcctcctagaacaagggagggcagggatcgccgagaccaccaccgggctcccagcgaggaagaggccttggagaaatgggactggaattgtccagagacgcgtcgcctcttggaagatgccttcttccgtgaagaggattacatccgtcagggttctgaggaatgtcagaagttttggaccttctttgaacgcctgcagagattccagaatctcaagacctccaggaaggaggagaaagaccctggacagcccaagcacagcatcccagcgctggccgacctacctcgcacttacgacccacgttaccgcatcaacctctctgttcttggccctgccacgcggggctctcagggactgggcaggcacttgcccgcggagagagtggctgagttccgccgagccctgttgcactacctggactttggccagaagcaggcatttgggcgtctggccaagctgcagcgtgagcgggcagccctccccatcgcccagtatgggaaccgcatcctgcagacgctgaaggagcaccaggtggtggtagtggccggtgacaccggctgtggcaagtccactcaggtgccccagtacctgctggctgctggcttcagtcatgtggcgtgcacccagccccggcggatcgcctgcatctcactggccaagcgtgtgggctttgagagcctcagtcagtatggctcacaggtcggctaccagatccgctttgagagcacacgttcggcggccaccaagattgtattcctgacagtggggctgctcctgcgacaaatccagcgggaacccagcctgccccagtatgaggtcctgattgtggatgaagtccatgagcggcatctccacaacgatttcctcctgggcgtcctccagcgcctgttgcccacgcggcctgacctcaaggtcatcctcatgtcggccaccatcaacatctcgctcttctccagctatttcagcaatgcccctgtggtacaggtgcctgggaggctgttccccatcacggttgtgtaccagccgcaggaggcggagccgaccacgtccaagtcagagaagctggacccgcggcctttcctgagggtgctggagtccattgaccacaagtacccgcctgaggagcggggtgacctcctcgtcttcctcagcggcatggcggagatcagcgccgtgctggaggctgcccagacctatgccagccacacccagcgctgggtggtactgccactgcacagcgccctgtctgtggccgaccaggacaaggtatttgatgtggcaccccctggagtccggaaatgcatcctctccaccaacattgctgagacctcagtcaccattgacgggatccgcttcgtagtagattccggaaaggtgaaggagatgagctacgatccgcaggccaagctgcaacggctgcaggagttctggattagtcaggccagcgcagagcagcggaagggccgggcgggccgcacgggccccggagtctgcttccgcctctatgccgaatcggactatgatgccttcgccccctaccccgtcccagaaattcggagggtggccctggactcgttggtgctgcagatgaagagcatgagtgtgggggacccccgaaccttccccttcatcgagcccccaccaccagccagcctggaaaccgccatcctctacctccgggaccagggggccctggacagctcagaggccctcacacccattgggtccctgctagcccagctgcctgtggacgttgtgattgggaagatgctgatcctgggctccatgttcagcctggtggagcctgtgctcaccatcgcagccgcacttagcgtccagtcgcccttcacccgcagcgcccagagcagcccagagtgcgcggcagcacggcggccgctggagagcgaccagggtgaccccttcacgctcttcaacgtcttcaacgcctgggtgcaggtgaaatctgaacggagcagaaactctcgcaagtggtgccgccgccggggcatagaggagcatcgactgtacgaaatggccaaccttcggcgccagttcaaggagctgttggaggaccacgggctgctggctggggcccaggccgcgcaggtaggggacagctacagtcggttgcagcagcgccgggagcgccgggccctgcaccagctgaaacgccagcacgaggagggcgcggggcgcaggcgcaaggtgctgcggctgcaggaggagcaggacggcggctccagtgacgaggacagggctggcccagcccccccaggggccagtgatggcgtggacatccaggatgtgaagttcaagcttcggcatgacctggcgcagctgcaggccgctgccagctcagcccaggacctgagccgcgagcagctggctctgctgaagctggtgctgggccggggcctgtacccacagctggccgtccccgacgccttcaacagcagccgaaaggactcagaccagattttccacacgcaggccaagcagggcgccgtgctgcaccccacctgcgtcttcgctggcagccccgaggtgctgcacgcacaggagctggaggccagcaactgcgacggaagccgagacgacaaggacaagatgagcagcaaacaccagctcctcagcttcgtgtccctgctggagaccaacaagccgtacctggtgaactgcgtccgcatccctgccctccagtccctcctgctttttagccggtctttggacaccaatggtgactgctcccgcctggtggccgatggctggctggagctgcagctagcagacagtgaaagtgccatccgactcctggcggcttccctgcggctccgtgcccgctgggaaagtgccctggaccggcagctggcgcaccaggcccagcagcagctggaggaggaggaggaggatacgccagtcagccccaaggaggtggccaccctgagcaaggaactcctgcaattcacggcatccaagattccttacagcctccggcggctcacagggctagaagtccagaacatgtatgtgggaccccagaccatcccagccaccccccatcttcctggcctctttggcagctccaccctgtccccccaccccacaaaggggggctacgcagtcactgacttcctcacctacaactgcctcacgaatgacacagacctgtacagcgactgtctccgaaccttctggacctgcccccactgtggcctgcatgcgcccctcacgcccctggagcgcatcgcccatgagaacacctgcccccaggccccacaggatgggcccccaggggctgaggaagctgccctcgaaaccctccagaagacatctgtcctgcagaggccctaccactgcgaggcctgcgggaaggacttcctctttacacccacagaggtgctgcgccaccggaagcagcacgtgtgagctgggccaggagccctgcccacctccgtgcagctgacctgccctccagcccaggactaggggcaggactcttgcctgaacccccagcctgggcttagccctgtggtcctgtcccagtgcagagggcctggagcacggattgtgaataaagcctcacatgctgatacacactgttaggcctgcacctgcccatccagaaagcagcagctgccttgttagtcctccccagggtctagctttccttcttcctgctgcagggtgctgcctgaggggtcctgggtaggaggggcgttagagccagcagggacctcccatgtctccagattccaggtgcaggttcttagcacctccgcagccgctctctcttgagtccatcctcagtctctcctaccccttgaagtagggggaccctgaatttgcccatccacctgggtcactttgagagttgtgcaggggggctgggagcactggtgttcacgtgggaccacaggctgcaccataagacccactcacaataaaaaaataaaaggccgagccgggcatggttgctcactcccgtaataaaaaaataaaagaacaggctgagccggg

SEQ ID NO: 181544 - DNA, 3432 bp, Artificial Sequence
  derived and/or modified sequence
atgcccccaccaaggacacgggaggggagggatcgtagagaccatcacagggcaccttcagaggaagaagccttggaaaaatgggattggaattgcccggagactcggagactgttggaggacgcattttttcgggaagaggattatattaggcagggcagcgaggagtgccagaaattctggaccttctttgaaaggctccagagattccagaatcttaaaacaagtcgtaaagaggagaaagacccaggccagcccaagcatagcatccccgctctggccgacttaccacgaacttacgacccccgataccgaattaacctgtctgttctaggccccgccaccagggggtcccaggggctcggcaggcacctgccagctgaacgtgtggctgaatttcgacgggctctgctgcattacctggactttggccagaagcaggcgtttggaagactcgccaagttgcaacgagagagagctgcattaccgatcgctcagtatgggaaccgcattttgcagactctgaaggagcaccaggtggtggtggtggctggagacactggatgtggaaaatctacacaggtgccgcagtacttgctagccgcaggtttcagccatgtcgcctgtacacaaccccgacgaatagcttgcatatcactggccaaacgcgtcgggttcgaaagcctctcgcagtacggcagtcaagttggttatcagatcaggttcgaatccactagaagtgcagccacaaagattgtcttcctcacagtcggattactccttcgccagatccagcgggagcccagcctgccacagtacgaagtactgatagtagacgaggtccacgagcggcacctccacaacgactttctgttgggagtgctccagaggctgctccctacacggcccgatctgaaggtgatcctaatgagcgccacaatcaatatctctctgttcagttcatatttttccaacgcccccgtggttcaggtaccaggaaggctttttcccattactgtcgtctatcagccgcaggaggccgagccaactaccagcaagtctgaaaaattagatccgaggcccttcctgagggtgctcgaaagcatcgaccacaaatacccacccgaggaaaggggggaccttctagtcttcctttccggtatggcggagatttcagctgttttagaagcagcacagacttatgcctcccatactcaaaggtgggtagtcctgcccttgcattcggcccttagtgttgccgaccaggacaaggtgtttgatgtggccccaccaggcgtacgcaaatgcattctcagtactaacattgcagaaacaagtgtgacgatcgatggtattaggttcgtagtagattctggcaaggtgaaagagatgtcatacgacccgcaggcaaagttgcagagactgcaggagttttggattagccaggcttcagccgagcagaggaaaggcagggcagggcgcaccggacccggagtgtgtttcagactttacgcagaaagtgactatgatgcattcgctccatacccagtcccggagataagacgggtggccttggattccctggtgttacagatgaagtctatgtcagtgggcgatccaagaaccttcccattcattgaacccccgccacctgcctctctggaaactgcaatcctataccttcgcgatcaaggcgccttagattcaagcgaggccctcactccaataggctcgttgctggcccaactgccggtggatgttgtgatcggtaaaatgttaatccttggatctatgttttccctggtagaacctgtgttgacaatagccgccgccctatcggtccagtcgcctttcacccggagcgcccagagtagtcctgaatgtgctgctgcacggaggccactcgaaagcgaccagggggatcctttcactctattcaatgtgtttaacgcatgggtgcaggtgaagtccgagagaagccggaacagtcggaaatggtgcaggagacgggggattgaagaacacagactgtacgaaatggcaaacctgcgacgccagtttaaggagttactcgaagaccacgggcttttagcaggtgcacaggccgcccaagtcggggacagctatagcaggttgcagcaacgcagagagagacgggccctacatcagctgaaaagacagcacgaggaaggggctggccgcaggaggaaagtcctgcggcttcaggaagaacaggatggagggtcttctgacgaagacagagctggccccgcaccgccgggagcatccgacggcgtagacatccaggacgtaaagttcaagctgaggcatgatctggcacagcttcaggccgcagcttcatccgcccaggacctatctcgcgagcaactcgcattacttaagctggtcttgggcagaggtctgtaccctcagttagccgtccctgacgcgttcaactcctcaagaaaggactctgatcaaatatttcatactcaagccaagcagggagccgtcttacatcccacctgtgttttcgccggctcccccgaggtcttgcacgcccaggaactcgaggcgtctaactgtgacggcagtcgagacgataaagataaaatgtcgtctaagcaccagctgctgtcctttgtctctttactagagacaaataaaccatacttggttaactgtgtgaggatcccagccctccaatccttactcctgttttctcgcagccttgacaccaacggagactgcagcaggctggtggcagacggctggttagagctccagcttgcggacagcgaatccgccattcgtctgcttgccgcgagcctgcggcttagagcgcgctgggaatcggctttagatcggcaactggcccaccaggcccagcaacagctggaggaggaggaggaagatacccctgtgtcccccaaggaagtggccaccctctctaaagagctgctgcaatttaccgcgagcaagataccatattccctgcggagactgacaggactagaggtccagaacatgtatgtcggtcctcagactatcccagctacaccacacctgcctggcctctttggatccagtaccctgagcccgcaccctacaaaggggggctacgccgttacagattttctgacgtataattgcctgacaaatgatacagatctatacagcgactgtttaaggacgttctggacctgcccacattgtggactacatgcccctctgacaccactggagaggatcgcacatgaaaatacctgcccacaggcgccacaggacggacctccgggcgcagaggaggccgccctggaaacactccagaagacatctgtcctccagaggccgtatcattgcgaagcttgcggcaaagactttctttttactccgactgaagttctcagacaccggaaacaacacgtgtag

SEQ ID NO: 181545 - DNA, 3432 bp, Artificial Sequence
  derived and/or modified sequence
atgcccccacccaggacccgggagggccgggaccggcgggaccaccaccgggcccccagcgaggaggaggccctggagaagtgggactggaactgcccagagacccggcggctgctggaggatgccttcttccgggaggaggactacatccggcagggcagcgaggagtgccagaagttctggaccttctttgagcggctgcagcgcttccagaacctgaagaccagcaggaaggaggagaaggaccccggccagcccaagcacagcatcccagccctggccgacctgcccaggacctatgacccccgctaccgcatcaacctgtctgtgctgggccctgccacccggggcagccagggcctgggccgccacctgcctgctgagcgggtggccgagttccggcgggccctgctgcactacctggactttggccagaagcaggccttcggccgcctggccaagctgcagcgggagcgggccgccctgcccatcgcccagtatggcaaccgcatcctgcagaccctgaaggagcaccaggtggtggtggtggccggggacaccggctgcggcaagagcacccaggtgccccagtacctgctggccgccggcttcagccacgtggcctgcacccagcccaggagaattgcctgcatcagcctggccaagagggtgggctttgagagcctgagccagtatggcagccaggtgggctaccagatccgctttgagagcaccaggtctgctgccaccaagatcgtgttcctgactgtgggcctgctgctgcggcagatccagcgggagcccagcctgccccagtatgaggtgctgattgtggatgaggtgcatgagcggcacctgcacaatgacttcctgctgggcgtgctgcagaggctgctgcccaccaggccagacctgaaggtgatcctgatgtctgccaccatcaacatcagcctcttcagcagctacttcagcaatgcccctgtggtgcaggtgcccggccgcctcttccccatcaccgtggtgtaccagccccaggaggccgagcccaccaccagcaagtctgagaagctggacccccggcccttcctgcgggtgctggagagcattgaccacaagtacccacctgaggagcggggggacctgctggtgttcctgagcggcatggccgagatctctgctgtgctggaggccgcccagacctacgccagccacacccagcgctgggtggtgctgcccctgcacagcgccctgtctgtggccgaccaggacaaggtgtttgatgtggcccctcctggggtgaggaagtgcatcctgagcaccaacattgctgagacctctgtgaccattgatggcatccgctttgtggtggacagcggcaaggtgaaggagatgtcctatgacccccaggccaagctgcagaggctgcaggagttctggatcagccaggccagcgctgagcagaggaagggccgggccggccgcactggacctggggtgtgcttccggctgtatgcagagagtgactatgatgcctttgccccctaccctgtgcctgagatcagaagagtggccctggacagcctggtgctgcagatgaagtccatgtctgtgggggaccccaggaccttccccttcatcgagcccccacctccagccagcctggagacagccatcctgtacctgcgggaccagggcgccctggacagcagcgaggccctgacccccatcggcagcctgctggcccagctgcctgtggatgtggtgattggcaagatgctgatcctgggctccatgttcagcctggtggagcctgtgctgaccatcgccgccgccctgtctgtgcagagccccttcaccaggtctgcccagagcagcccagaatgtgccgccgcccggcggcccctggagagtgaccagggcgaccccttcaccctcttcaacgtgttcaatgcctgggtgcaggtgaagtctgagaggagcaggaacagcaggaagtggtgcagaagaagaggcatcgaggagcaccggctgtatgagatggccaacctgcggcggcagttcaaggagctgctggaggaccacggcctgctggccggggcccaggccgcccaggtgggggacagctacagccggctgcagcagaggcgggagcggcgggccctgcaccagctgaagaggcagcacgaggagggcgccggcagaagaaggaaggtgctgcggctgcaggaggagcaggacggcggcagcagtgatgaggacagagctggccctgcccctcctggggccagtgatggagtggacatccaggatgtgaagttcaagctgcggcatgacctggcccagctgcaggccgccgccagcagcgcccaggacctgagccgggagcagctggccctgctgaagctggtgctgggccggggcctgtacccccagctggccgtgcctgatgccttcaacagcagcaggaaggacagcgaccagatcttccacacccaggccaagcagggcgctgtgctgcaccccacctgtgtgtttgctggcagccctgaggtgctgcacgcccaggagctggaggccagcaactgtgatggcagcagagatgacaaggacaagatgagcagcaagcaccagctgctgagctttgtgtccctgctggagaccaacaagccctacctggtgaactgtgtgcgcatcccagccctgcagagcctgctgctcttcagccgcagcctggacaccaacggggactgcagccggctggtggctgatggctggctggagctgcagctggccgacagcgagagcgccatccggctgctggccgccagcctgcggctgcgggcccgctgggagagcgccctggaccggcagctggcccaccaggcccagcagcagctggaggaggaggaggaggacacccctgtgagccccaaggaggtggccaccctgagcaaggagctgctgcagttcaccgccagcaagatcccctacagcctgcggcggctgaccggcctggaggtgcagaacatgtatgtgggcccccagaccatcccagccaccccccacctgcccggcctgtttggcagcagcaccctgagcccccaccccaccaagggcggctatgctgtgacagacttcctgacctacaactgcctgaccaatgacacagacctgtacagcgactgcctgcggaccttctggacctgcccccactgcggcctgcacgcccccctgacccccctggagcgcatcgcccacgagaacacctgcccccaggccccccaggacggccccccaggagctgaggaggccgccctggagaccctgcagaagacctctgtgctgcagaggccctaccactgtgaggcctgtgggaaggacttcctgttcacccccacagaggtgctgcggcacaggaagcagcacgtgtag

SEQ ID NO: 181546 - DNA, 3432 bp, Artificial Sequence
  derived and/or modified sequence
atgccccccccccggacccgggagggccgggaccggcgggaccaccatagagccccatccgaggaagaggcacttgaaaaatgggattggaattgcccagaaactcgtcggctgctggaagatgctttttttcgagaggaagattacatcagacaaggcagtgaggagtgtcaaaagttttggaccttctttgagaggctccagcgcttccagaatttgaagacgtcccgtaaggaggaaaaagatcccggtcagcccaagcactctatcccggcacttgccgacctgcctagaacatatgacccaagataccgcatcaatttatccgtgctgggtccggccacaaggggttctcagggcctgggacgccatttgcctgccgagcgggtggctgaattcaggcgcgccctgctgcattacctggacttcggtcagaaacaggcatttgggcgtctggccaaactgcaacgggaacgcgccgcgttacctattgctcagtacgggaatagaatcctgcagacacttaaggagcatcaggtagtagttgtcgctggggacaccgggtgcgggaaaagcacacaggtgccacagtacttgctggcagctgggttttcccacgtggcatgcacccaacctcgccgtatcgcttgcatatccctggctaaacgcgtgggtttcgaaagtctaagccaatacggaagccaggtcggataccagatccgctttgagtccactcgttcagctgctacgaaaatcgtgtttttaacagtgggattgctgctaaggcagatccagagggagccctcactgccacagtacgaagttctgattgtggacgaggttcatgagcggcacctccacaacgactttttgctcggggtgttgcaaaggctgcttccaacacgccctgacctgaaagtgattctgatgagcgcaactatcaatattagtctgttcagttcctacttttctaatgcccccgtggttcaggttcccgggcggctcttccccataacggtcgtctaccagcctcaagaagcggaacccactacctcaaagagcgaaaagctggatcccagaccattcttgcgtgtgctggaatcaatcgatcataagtaccctcccgaggagcgtggcgatctattagtctttcttagtggaatggctgaaatttcagcggtcttggaggcggcccaaacatatgcctcccacacccagagatgggtcgttttgcctttgcactccgcccttagtgttgccgatcaagacaaagtctttgacgtggcccccccgggcgtgcgaaaatgtattctgtccacgaacattgccgagacttcggtgacgatcgacggaatccgtttcgtcgtggattccgggaaggtcaaggagatgagctatgatccccaggccaagctgcaacggcttcaggagttctggatttcccaggcttccgctgagcaacgcaaaggtagagccgggcgaacagggcccggcgtctgtttccgcttgtatgcagaaagtgactacgatgcgtttgccccatacccggtgcctgagattcgccgcgttgccttggattcactagtgcttcagatgaagtctatgtctgtgggcgatccgagaacgtttccctttatcgaaccgccccctccggctagcctggagacggctattttgtacctgagggaccagggcgcattagacagctctgaggccctgacaccaatcggtagcctgcttgcacagctgcccgttgatgtggtgattggaaagatgctgatcctgggatctatgttctcactggtcgagcccgtgctgacaatcgcggccgccctcagtgtccagagcccttttaccagatccgctcaatctagccccgagtgtgctgccgcaagaagacctctagagagtgatcagggcgatccatttacactgtttaacgtattcaatgcttgggtgcaggttaagagcgagcggagtcgtaattctcggaagtggtgtaggaggagggggattgaggaacaccgcttgtatgagatggcaaacttgcgccgccagtttaaggaactgttagaggatcacgggttgctggcaggggcacaggcggcccaggttggagactcatactcccgtctgcagcagcgccgcgagagacgggccctgcaccagctcaaacgccagcatgaagagggggccggacgacgaagaaaagtgctgcggctgcaggaggaacaggatgggggctcaagtgatgaagatagagctggcccagcaccaccaggtgcgtcagatggcgttgacatacaagacgtcaagttcaagctgaggcatgaccttgcccagctgcaggctgcagcttccagcgcccaggatttgtctagagagcagctggcgctcttaaagctggtactgggtcgggggttgtacccccaactggcagtgcctgacgcctttaacagtagtcgaaaagacagcgaccaaatcttccacacacaagcaaaacagggcgctgtgttgcacccaacctgtgtgtttgccggcagccccgaggtgctgcacgcacaggaactagaagcgtccaactgtgacggctcacgggatgacaaagataaaatgagctcaaagcaccagctcctgtcgttcgttagtttgctagagaccaataaaccatacctggtgaactgcgtgaggatccccgctctgcagagcctactcctttttagtcgaagtctggacacaaacggcgactgcagccggctagtggccgatggatggctggaactccagctggcagattccgaatcagcaattagactgttggctgcttcactgagactcagggctcggtgggagagcgcccttgaccgccaactcgcccaccaagcacagcagcagctcgaggaggaagaggaagacacaccagtaagtcccaaagaagtcgctactctgagcaaagaactcctgcagttcacggcttctaagataccgtattctctgcgccggctcaccggcttggaagtccagaacatgtacgtaggcccccagaccattccggccacgccacacctgcctggattgttcggctcttcaacgttatctccacaccctactaaaggaggttacgctgtgaccgacttccttacctataactgtctaaccaacgacactgacttgtactctgattgtctacgaacattctggacctgtccgcattgtggactgcacgccccactgacccctttagaaaggattgcccatgagaatacatgtccccaggcaccgcaggacggccctccgggtgctgaggaggccgctctggaaaccctccagaaaacatcagttctgcagagaccatatcactgcgaggcatgtggcaaagattttttatttaccccaactgaggtgctcaggcatcgcaaacagcacgtgtag

SEQ ID NO: 181547 - DNA, 3432 bp, Artificial Sequence
  derived and/or modified sequence
atgcctcctccacggaccagggaagggagagatcggagggaccaccaccgggcaccctccgaggaggaagcactcgaaaagtgggattggaactgtccagaaacccgccgtctgctggaggacgcattctttagggaagaggactatattcgccaggggagtgaagaatgtcagaagttctggacttttttcgagcgactgcaacgtttccagaacctgaagacctcccgaaaggaagaaaaagaccctggccagccgaagcactccataccagctctagccgatctcccgcgtacctatgaccctcgttatcgcattaaccttagcgtgctcgggccagccacgcgagggagccaagggttgggcaggcatctaccagccgaaagggtggccgagtttcgacgggctctcttgcattacctggactttggacagaagcaggcctttgggagactggccaagctgcagcgagagcgcgctgccctgcctatcgcccagtatggaaataggatactacagactcttaaagaacaccaggtggttgtggtcgctggagacactgggtgcggaaaatccacccaggtgcctcagtacttgctcgcggcagggttcagccacgtggcatgcacgcagcctagaagaattgcttgcatcagtctggccaaacgcgtgggatttgagtcgctgtcccagtacggaagccaggtaggataccagatcaggttcgaaagtacccgtagcgcagctacaaaaattgtgtttttgactgttggcctgctcctgaggcaaatccagcgggagccttcactgcctcagtacgaagtgctgatcgtggacgaagtacatgagcggcacctacacaatgatttcttattgggcgtgctgcagagactgttgccaaccagaccggatttaaaagtgatcctgatgtctgcaaccatcaatatttctctcttctcgtcttatttttctaacgctcctgtcgtgcaagtgcctggtcgactgtttcctattactgttgtgtatcagccgcaagaagctgagccgacaacgagtaagtccgagaagctcgatccccgaccattcctgcgcgtgctggagtccatcgatcacaaatatccacccgaggagcgaggggacctgctggtgttcttgtcaggcatggccgagatatcagccgtgctggaggccgcacagacgtacgcctctcatacccagagatgggttgtgctgcccctgcactcagcactgagtgtcgctgatcaggataaggtcttcgacgttgcacctcccggagtgcgaaagtgcatcctgtccaccaatatagcagagacatcagtgacaatagacggcataaggtttgtcgtcgatagcggcaaggtaaaagagatgagttacgatccacaggctaaattgcagcgcttgcaggaattctggatttcgcaggccagtgctgagcagcggaaggggcgtgcgggtcgaactggacccggagtgtgttttagactttatgctgaatcagactatgatgctttcgctccatacccagtaccagagattcggagagtcgcacttgactctcttgtcctccagatgaaatcaatgagcgtgggagaccctaggacttttccttttatagaaccaccaccccctgccagcttggagactgccattctctatctgcgagatcagggagccctcgattcttctgaagctttgacaccaattggatctctcttagcccagctcccagtagatgtggtcatcggaaagatgttgatcctgggctctatgtttagcctggtcgagcctgtgctgacaatagcagccgcattaagtgtacagagccccttcacacgttcagcacagagtagcccggagtgcgccgcagccaggaggccattagagagcgaccagggcgacccctttacactctttaatgtgtttaacgcgtgggtgcaggtgaaatctgaacgctcccggaactcaagaaaatggtgtagaaggcgaggcattgaagagcaccggctgtacgagatggccaacctcaggaggcagttcaaggaactcctggaggaccacgggctcctagcgggtgcccaagccgcacaggtgggggacagttattctaggctccagcaacgcagggaacgaagagccctgcaccagcttaagcggcaacatgaagagggagcaggcaggaggcgcaaagtgctgcgcctgcaggaagaacaggatgggggatcctccgacgaggacagggcaggacccgcaccccctggggcaagtgatggggtggacattcaggacgtgaaatttaagctgagacacgacctggcccaacttcaggcagctgccagtagtgcacaggacctcagtagggagcagctcgccttgttaaaactggtgcttgggagaggtctctaccctcagttggccgtgccagacgccttcaactcatcccggaaggatagtgatcagatctttcacacacaggctaaacagggggctgtgctgcaccccacatgtgtgtttgccggatcaccggaagtgctgcatgcacaggagttggaagcctcgaattgtgacggatcaagagatgataaagataagatgtcatcaaagcatcaactgcttagtttcgtgagtctactggaaaccaacaagccatatctcgtaaactgcgtccgaatacccgcactccagtcgcttctgctctttagcaggagtttggataccaatggagactgtagcagactggtggccgacggctggctagaattacaattagcagatagtgagagtgcgatacggttgctggcagcgtcactgcgcctgagggctcgctgggaatccgcgcttgatcggcagttagcacatcaggcacagcagcagttggaagaggaagaggaagatactcccgtgagtcccaaagaggtggcgacactgagcaaagagctgcttcagtttaccgcgagtaagataccctattccctcagacgcctaacgggcttggaggtccagaacatgtatgttggtccccagacgatacccgcaacacctcacctcccaggtttattcggatcatctaccctctctccacacccaaccaaaggtggctacgccgtgacggattttcttacatacaattgcctgaccaacgacactgatttatattccgattgtctaaggaccttctggacctgtccgcactgcggtcttcatgccccactgactccgttggaacggattgcccacgaaaacacatgtccccaagcccctcaggacgggcctccaggcgctgaggaagccgcactggagacccttcaaaagaccagcgtgctccagcggccttaccattgtgaagcctgtgggaaagactttctcttcacacccactgaggtgctcaggcaccgcaaacagcacgtctag

SEQ ID NO: 181548 - protein, 1047 aa, Artificial Sequence
  derived and/or modified sequence
MDAEAEDKTLRTRSKGTEVPMDSLIQELSVAYDCSMAKKRTAEDQALGVPVNKRKSLLMKPRHYSPKADCQEDRSDRTEDDGPLETHGHSTAEEIMIKPMDESLLSTAQENSSRKEDRYSCYQELMVKSLMHLGKFEKNVSVQTVSENLNDSGIQSLKAESDEADECFLIHSDDGRDKIDDSQPPFCSSDDNESNSESAENGWDSGSNFSEETKPPRVPKYVLTDHKKDLLEVPEIKTEGDKFIPCENRCDSETERKDPQNALAEPLDGNAQPSFPDVEEEDSESLAVMTEEGSDLEKAKGNLSLLEQAIALQAERGCVFHNTYKELDRFLLEHLAGERRQTKVIDMGGRQIFNNKHSPRPEKRETKCPIPGCDGTGHVTGLYPHHRSLSGCPHKVRVPLEILAMHENVLKCPTPGCTGRGHVNSNRNTHRSLSGCPIAAAEKLAMSQDKNQLDSPQTGQCPDQAHRTSLVKQIEFNFPSQAITSPRATVSKEQEKFGKVPFDYASFDAQVFGKRPLIQTVQGRKTPPFPESKHFPNPVKFPNRLPSAGAHTQSPGRASSYSYGQCSEDTHIAAAAAILNLSTRCREATDILSNKPQSLHAKGAEIEVDENGTLDLSMKKNRILDKSAPLTSSNTSIPTPSSSPFKTSSILVNAAFYQALCDQEGWDTPINYSKTHGKTEEEKEKDPVSSLENLEEKKFPGEASIPSPKPKLHARDLKKELITCPTPGCDGSGHVTGNYASHRSVSGCPLADKTLKSLMAANSQELKCPTPGCDGSGHVTGNYASHRSLSGCPRARKGGVKMTPTKEEKEDPELKCPVIGCDGQGHISGKYTSHRTASGCPLAAKRQKENPLNGASLSWKLNKQELPHCPLPGCNGLGHVNNVFVTHRSLSGCPLNAQVIKKGKVSEELMTIKLKATGGIESDEEIRHLDEEIKELNESNLKIEADMMKLQTQITSMESNLKTIEEENKLIEQNNESLLKELAGLSQALISSLADIQLPQMGPISEQNFEAYVNTLTDMYSNLERDYSPECKALLESIKQAVKGIHV

SEQ ID NO: 181549 - protein, 620 aa, Artificial Sequence
  derived and/or modified sequence
MDAEAEDKTLRTRSKGTEVPMDSLIQELSVAYDCSMAKKRTAEDQALGVPVNKRKSLLMKPRHYSPKADCQEDRSDRTEDDGPLETHGHSTAEEIMIKPMDESLLSTAQENSSRKEDRYSCYQELMVKSLMHLGKFEKNVSVQTVSENLNDSGIQSLKAESDEADECFLIHSDDGRDKIDDSQPPFCSSDDNESNSESAENGWDSGSNFSEETKPPRVPKYVLTDHKKDLLEVPEIKTEGDKFIPCENRCDSETERKDPQNALAEPLDGNAQPSFPDVEEEDSESLAVMTEEGSDLEKAKGNLSLLEQAIALQAERGCVFHNTYKELDRFLLEHLAGERRQTKVIDMGGRQIFNNKHSPRPEKRETKCPIPGCDGTGHVTGLYPHHRSLSGCPHKVRVPLEILAMHENVLKCPTPGCTGRGHVNSNRNTHRSLSGCPIAAAEKLAMSQDKNQLDSPQTGQCPDQAHRTSLVKQIEFNFPSQAITSPRATVSKEQEKFGKVPFDYASFDAQVFGKRPLIQTVQGRKTPPFPESKHFPNPVKFPNRLPSAGAHTQSPGRASSYSYGQCSEDTHIAAAAAILNLSTRCREATDILSNKPQSLHAKGAEIEVDENGTLDLSMKK

SEQ ID NO: 181550 - DNA, 6330 bp, Artificial Sequence
  derived and/or modified sequence
cgcttgttcgctcactctcagtgaaaagagttttgaaatgagttctgaatagacagcattttctttgtgcggttggtaaataacacagagcaaagttagcaagttgcagcgcctctgcgttctgattctatggaacctttttgtagggagaagggcaggatgtttttaactgaatgtgacctcaggggaatactagagaaaataataaaatttctgaatggggcagcgtggagaaatcctaagagaaatagcataagagcattttggaacacatccaggaaaagataactttcgacacacctgtagacgttcgccaggtaaaggagtgatggaaactctccagttcagatccagtagcttttagggaaggaactacagttgctgacttaagttgaagaagcatctatttaatgtctggtcaaatcctacaagaaacacagaaatctatgattaaaaagctgagcactttgatatactgcaaagggtagagaaggcaggacggtagaaattttctgcaagaaagaatgaatttcaggatttatcactaaataagacaaagtcatttatttagtccccctgacacagcagggcaaactgagttgacatacaagttacctggagaaaaagagagcaattccaggacttcctcttcagcctaaaagaaggtaccagatctgtgcactggggcgatgtggaagagacctgcttattgcccctgatgtaagctccagtaagaaaagacgtcaagtacaagtactaggaaatcactttatacatctgtttataggaatgacctcaggactttgtgttcatgttatagatggatgcagaggctgaagataaaacgctgcgtactcgctctaaaggaaccgaggtgccaatggattcactaatccaggagctcagtgttgcctatgattgctccatggcaaagaagagaacagctgaagatcaggctttgggggttccagtcaacaaaaggaaatccctgctaatgaagccccgacactacagcccaaaagcagactgccaagaagaccgcagtgacaggacagaggacgatggccccttggaaacacatggtcactctaccgcagaggaaatcatgataaaacctatggatgaaagtcttctttcaactgcacaagaaaactccagtaggaaggaagacagatactcttgttatcaagagctcatggtcaagtctttaatgcacttggggaaatttgaaaaaaatgtatctgttcagactgtaagtgaaaatttaaatgacagtggcatccagtctttaaaagcagagagcgatgaagcagacgagtgctttctgattcattctgatgatggaagagacaagattgatgattctcagccacccttctgctcctctgatgacaatgaaagtaactctgaaagtgcagaaaatggctgggacagtggctccaacttctcagaagaaaccaaaccacctagagtcccaaagtatgttttaacagatcataaaaaagacctattggaagttcctgaaataaaaactgaaggtgacaaatttatcccttgtgagaacaggtgtgattctgaaacagaaaggaaagacccgcagaatgctctcgcagaacccctggatggcaatgcccagccctcattccctgacgttgaggaggaagatagcgagagcctggcagtaatgacggaagagggtagtgacctggaaaaggccaaggggaatttaagtttgctggagcaggcaattgctctgcaggctgagcgaggttgtgttttccataacacctacaaagagctggataggttcctgctggagcacctagcaggggaaaggaggcaaaccaaagttatcgacatgggtggaagacaaatctttaacaataaacattcaccaaggcctgaaaagagggagaccaagtgcccgatccctggatgtgatggcacgggacacgtgacagggctctacccgcaccaccgcagcctttcggggtgcccccacaaagtgcgggttcccctggaaattcttgccatgcatgaaaatgtgctcaagtgtcccacgccgggatgcacaggaaggggtcatgtgaacagcaaccgcaacacccacaggagtctttctggttgtccaattgctgcagctgaaaaattggcaatgtcccaggataaaaatcagcttgattctccccaaactgggcagtgtcctgaccaggcccacaggacaagtttggtgaagcaaattgaattcaatttcccgtcacaagccatcacctctcccagagccacagtgtcaaaagaacaagagaagtttggaaaagtaccatttgattatgccagttttgatgcccaagttttcggtaaacgccctctcatacaaacagtgcaaggacgaaaaacaccaccatttcctgaatcaaagcattttccaaatccagtgaaatttcctaatcgactgcctagtgcaggcgcccacacccagagccctggccgtgccagctcttatagctacggtcaatgtagtgaagacacccacatagcagcagctgctgccatcctgaacctttccacccgctgcagggaagccacagacatcctctccaacaagccacagagtctgcatgccaagggagccgaaatagaagtggatgaaaatggcacattggacttaagcatgaaaaaaaatcgaatcctggacaagtctgcacccctaacttcctctaacacttctattccaactccttcctcttccccattcaaaacaagcagcattctggtcaatgcagcattctatcaggctctttgtgaccaagagggctgggacactcctatcaactatagcaaaactcacgggaagacagaggaggagaaagagaaagacccagtgagctctctagaaaatttagaggaaaaaaagtttcctggagaggcctctataccaagccctaaacccaagcttcatgcaagagatctcaaaaaggaactaatcacctgtccaacaccaggatgtgatggaagtggccacgtgacaggaaactatgcatctcatcgcagtgtttctggatgtcctttagcagataagactctaaaatccctcatggctgccaactctcaggagcttaagtgtccaaccccaggctgcgatggctcggggcacgtgactggaaactatgcttcccacagaagcttgtccggatgccctcgtgcaaggaaaggtggtgtcaaaatgacccctaccaaggaagaaaaagaagaccctgaactgaaatgtcctgtgatagggtgtgatggccaaggtcacatatcaggtaaatacacatcacaccgcacagcttctggctgtcctctggctgccaagagacagaaggagaatcctctcaatggagcctccctctcctggaaactgaacaaacaagagctaccacattgtcccttgccaggctgcaatgggctgggccatgtaaataatgtttttgtcacccaccgaagcttatctggatgtcctctcaatgcacaagttatcaaaaagggcaaggtttctgaagaactcatgaccatcaagctcaaagcaactgggggaatagagagtgatgaagaaattaggcatttggatgaagaaataaaggaactgaatgaatccaaccttaaaattgaagcagatatgatgaaacttcagacccagatcacatctatggagagcaacttaaagacgatagaggaggagaacaaactcatagaacagaacaatgaaagtctgctgaaagagctggcaggtctaagccaagctctcatttcaagccttgctgacatccagcttccacagatgggacctatcagtgagcagaattttgaagcatatgtaaatacactcacagatatgtacagcaatctggaacgggactattccccggaatgcaaagctctactggaaagtatcaaacaggcagtgaagggtatccatgtgtaggatcacagcgctgccgggcaacagaagttaccaacagcagtaaactccagatggatctgttagaggttcatgtactgctaaggcgtggaggttgccgtactgcatttacaatttgcaacattgcactaattttattttccccagctgatataaaaaggaaagaaaaactatgatagacttcttggattaaaagcaatgcagtcaattattagatcttatttattttcatatgtttttcttttatttcttcattgtactctttttttttttgtaaagtatatgtaaaataaatgtgacatttttataatttatttattactaatcaaagagttttttatcttttaactgcattttgaagtctgccgtatttttacaagtgtgtttattaatttattttccaataggatttaaatagaaatgctattctcaagtcatctttcttgctgggttttaatgaggaaacaggaaagggtgaaggaaatccttgtctaaggactgcactatagttgagtttgatttttattgcacacttcttcccccacctttcactgatttttgtatttataaatgaatttgcggtaaggtgagctgcacggaaggaataagaagacaaatggcgcccactagtggggaatccgcactcacaaaagcacaggatgctggaaaacagcctgctcagaatttgttagcaataattaaatatagcaatcagcaaagtattcgacttggctggacggttttcgttaatatgaattatttatttgaaatgttttaaagaaacataagcctttttagtgatgcagatttgtctgtttgtttttcaagtcatatcagatcgttggcaactcgtatcccaagatgaaaaataagacttggtgtgaccagccaggctttcctgccatatgttggtacaatatacaagtgacaatattggtgtagatttgtacttagcaaatacaaacacatccaaatgaaaaattttgtagataccatatcccctgaaatagcatttatcttactgggttgactggaaaggaatggaaaatatagtaacacatgaaaaaatgctactccaatctgaatgattacttcaaacactggcaccttgggtctcacccaccataggaaacaagacaacattcaatttgatagaaatcttgccacaaaacttcaaatgctacaaaatatacacacacactcacacacacaggcatactcacacacagacacacacacacacacacacacagactcatccacacttcaaattgagcccacaatcttgaatttctgaacggatcagagtttcatagtttctatagtaaaggcaatgtctatttcagggattgtaaagtagttaagcattgtttcaaaagtttttttatatttattttttttaaggaaaaggtatagacaaccagctaaactgcctttttggtgtgcacacacatttcatgtgcagacgtgcctctgtgtaaatgtacacatgaacttcatgtgggcttaattttctgtgctataaacaaaagtgtttattttttattaacctcatggatatttagatggaaagtgatggcattcacaggcttgatgtattccactgttattactgttacctgcacaaatgaaaaacaatactcaacagtaattccactcccatgaaactttggtcattgttatgcattaagtggggcttatctttggtttggagttcatttgaactcttgaaccttagtttagtgaagatgaactgtctgttcttaggtagaaacggtgtttatttaaaaatcagttttaaaaaatgagctaccatatgtgctgtctattataaatgggacaccaaacaaaattttctattacagttgtgtacttgcaaacattttgctatacagtacttcatagatgcatacaaatgagctcacttattacaaagacaaacgtttaatttgctaaatattttaacaagtttgttatatattttatttaatttaaaagaaatctcttaccaacctacatatttattactataatttgctatgacttcaggttaatttatttgtgtttgcatagtttgagcaggatgttttgtgaagtatgtttgtatttatttgcctactttgtacttgatgtgttttgtaatgtgcactgaatttgttttcttttcaactatgttaatgatcaatactgtaaattgggtcttttgtaaacaaaaaggcaatgatgtatgcattttttttaatttgaggtagtttgtttgtatactgtttctccaaacacttaatatttcttacatcaaagcaacaaaattgtgttcagtgctgtacatttggtgtatggtaggaaataaaaattgataacgagttttg

SEQ ID NO: 181551 - DNA, 3144 bp, Artificial Sequence
  derived and/or modified sequence
atggatgccgaagcggaggacaagactttacgtacgcgctccaagggaaccgaggtcccgatggattctttgatacaagagctgagcgtggcgtacgattgcagcatggctaaaaagaggacagccgaggaccaggcactgggagtgccggtcaataaacggaagagcctcctcatgaagccgcgtcactactcacctaaggcggattgccaagaggatagatcagatcgcacagaggacgatgggcccctcgagactcatggtcatagcacagccgaggagattatgataaaaccgatggatgagagcctgctttccacggctcaagaaaattccagtcgcaaagaggaccggtacagctgttatcaggagctcatggtgaagagtctgatgcacctgggcaaattcgagaaaaatgtctccgtgcaaacggtgtcagagaaccttaacgactctggcattcaaagcctaaaagccgaaagtgatgaggccgacgagtgtttcttaatccattcagacgacggccgagacaaaattgatgattcacaaccgcccttttgtagcagtgatgacaacgagagcaattctgaatctgctgagaacggatgggactccggcagcaatttttccgaggaaaccaagccgccgagggttccaaaatacgtcctcacagatcataaaaaagacctgctggaggttcctgagattaagaccgagggcgataaatttataccgtgcgagaacagatgcgatagtgaaactgaaagaaaagaccctcaaaacgcgctggccgagcctctcgacggcaatgcgcagccatcttttccggacgtggaagaggaagatagcgagtctttagctgtaatgactgaagaaggttccgatctcgaaaaggcgaaggggaatctctccttgctggagcaagcaattgctttacaggccgaacgcggctgcgtgtttcacaatacctacaaggagttggacagatttttgctggagcacctagcgggcgagaggcgccagacaaaggtcattgacatgggcggacgccaaatctttaataataaacattctcctcgccccgagaaacgggagacaaagtgcccaattcctgggtgcgacggtactggacacgtgactggactctaccctcatcatcgctccctgtccggatgtccgcataaggtccgagtgcccctggaaatcttagccatgcacgaaaacgttctgaaatgtccaactcctgggtgtacaggaagaggtcacgtgaatagtaaccgaaacacgcatagatccctttcaggctgtcccatcgccgccgccgagaagctggcgatgtcacaggataaaaaccaactggatagcccacagacaggccaatgtccggaccaggcccaccgtactagcctagtgaagcagatcgaatttaattttccttctcaggcgatcacgagcccaagggccaccgtatctaaagaacaggagaaattcggaaaggtaccctttgattacgcaagtttcgacgctcaagtgttcggtaaaagaccacttatccaaacagtccagggccggaagacccctccattccctgaaagcaagcacttcccaaaccccgtaaaattccctaatcggctgccctccgcgggagcacacacgcagtcgccggggcgggcatcctcatactcctatggacaatgctcggaggacacccatatcgctgccgctgcagccattttgaacctgagcactaggtgtcgggaagcaacagacattttgtcgaataaacctcagagtctgcatgcaaaaggcgctgaaatagaggttgatgaaaacggcaccctagacctgagtatgaagaaaaatagaatcctagacaaaagcgcgccactcacctcaagtaatacaagcattcctacccccagcagctccccctttaaaacatcatctatcctagtgaatgcagccttttaccaggcgctatgtgatcaggagggctgggatactcccatcaactattccaaaacacatggcaagacagaggaggaaaaggagaaggatcccgtgtcttctctggagaatcttgaagagaagaaatttccaggtgaggccagcatcccaagcccaaaacctaagctgcatgcacgtgaccttaagaaggagcttataacttgccccaccccagggtgtgatggatccggccacgtgaccgggaactatgcttctcataggagcgtgagcggctgcccgctcgctgataaaaccctgaagtcgcttatggccgcaaatagccaggaacttaagtgtcccacacctggctgtgacggctccggacacgtcacggggaattacgcctcacacagaagtctctccggctgcccacgggctcgcaagggaggcgtaaagatgacaccaactaaagaggagaaagaggacccagagctcaaatgccccgtcataggatgtgatgggcaaggccacatctcaggcaagtacacttcccatcggactgcctcaggatgtcctcttgcggccaagcgccagaaggaaaaccctttaaatggcgcatcgctatcctggaagcttaacaagcaggagctgccccactgccctctccctggttgcaatggacttgggcatgtgaataacgtgttcgtaactcatcgcagtcttagcggttgtccgttaaacgcccaggttattaaaaagggtaaggtctccgaggaacttatgactatcaagcttaaagccacagggggcattgagagcgatgaagagatccgccacctggatgaggaaattaaggagttgaatgaatccaacttgaagatcgaagctgacatgatgaaattgcagacacagataacttccatggaatcaaatttgaaaactatcgaggaagaaaataagttaattgagcagaacaatgaatctcttctgaaggagctcgccgggctgtctcaggcactgatctctagtctcgccgacatccagctgccccagatgggaccaatttcagaacagaactttgaggcctacgtaaatacacttaccgacatgtacagtaacctagaaagggactattcacctgagtgtaaggccctgctcgagtctatcaagcaagcagtgaagggcatccacgtatag

SEQ ID NO: 181552 - DNA, 1863 bp, Artificial Sequence
  derived and/or modified sequence
atggacgcggaggcagaggacaagacactgagaacacggtctaagggcaccgaagtcccaatggatagtctgatacaggagctgtccgttgcctacgactgcagcatggcgaagaagagaactgcagaagaccaggccctgggagtgccagtcaataagcgaaagagtctgctgatgaaaccccggcattactcaccaaaagctgattgtcaggaggatcggagcgataggaccgaggacgatggcccactcgagacccatggtcacagtaccgccgaagaaatcatgattaaaccaatggatgaatcccttttgtctactgcacaggaaaattcctcaagaaaagaggaccgttacagctgctatcaagaactaatggtcaagagcctgatgcacctgggtaagttcgagaaaaatgtttctgtgcaaaccgtatcagaaaacctgaatgactccgggattcagtccctgaaagctgagtcagacgaggctgatgaatgctttctgatccactccgacgatggtagagacaaaatagatgattcacagcctcccttttgttcttcagatgacaatgaaagtaactcagaaagcgccgaaaatgggtgggactcagggtcaaacttcagcgaagaaactaaaccaccacgcgtaccgaagtacgtgttgacggatcataagaaagaccttttagaggtgcccgaaatcaagactgagggagataaatttattccctgtgaaaatcgttgtgacagcgagacagagaggaaagacccacagaatgccctggcagagccactagacggcaacgcacagcccagctttcccgacgttgaagaggaggactccgagagccttgctgttatgacggaagaaggctcagacttggaaaaagccaagggaaacttgtcactactcgagcaggccatcgcattacaggctgaacgcgggtgtgtcttccataatacatacaaggagctggatcggtttttgttggaacacctggcaggagaaagaaggcagacaaaggttatcgatatggggggcagacaaatattcaacaacaaacactccccccgccctgaaaagagggagaccaagtgcccaattcccgggtgcgacggtacgggccacgtcacaggactatacccacaccatcgtagcttatccggctgtccccacaaggtgcgagtgcccctcgagattctggctatgcacgagaacgttctcaagtgccctacccctggctgcacaggaagggggcacgtgaattccaaccgaaacacccacagaagcttgtcgggctgtcctattgccgccgccgagaaactagcaatgtctcaggacaaaaaccagctggactcaccgcagactggtcaatgcccggaccaggctcatcgaacctctcttgttaaacagattgaattcaactttccttcccaggccattacaagccctagggccaccgttagcaaggaacaagaaaagttcggaaaggtcccgttcgactatgccagcttcgatgctcaggtgtttggaaagcggcccctgatccagacagtccagggtagaaaaacccccccattccccgaatcgaagcactttcccaaccccgtgaaatttccaaacagattgccaagtgccggcgcacatactcagtctccaggccgagccagctcctatagttatggtcaatgttccgaagatactcacatcgctgccgccgccgcaatcctcaacttatcgactagatgccgggaagctactgatatacttagtaataagcctcaaagccttcatgccaagggggccgaaatcgaggtggacgagaatggcactttagacttgagcatgaagaaatag

SEQ ID NO: 181553 - DNA, 42 bp, Artificial Sequence
  derived and/or modified sequence
atggacgctgaggccgaggacaagacactgcgcaccagatag

SEQ ID NO: 181554 - DNA, 3144 bp, Artificial Sequence
  derived and/or modified sequence
atggatgctgaggccgaggacaagaccctgcggaccaggagcaaaggaacagaggtgcccatggacagcctcatccaggagctgtctgtggcctatgactgcagcatggccaagaagaggacagctgaggaccaggccctgggcgtgcctgtgaacaagaggaagagcctgctgatgaagcccaggcactacagccccaaggctgactgccaggaggacagaagtgacagaacagaagatgatggccccctggagacccacggccacagcacagctgaggagatcatgatcaagcccatggatgagagcctgctgagcacagcccaggagaacagcagcaggaaggaggaccgctacagctgctaccaggagctgatggtgaagagcctgatgcacctgggcaagtttgagaagaatgtgtctgtgcagacagtgtctgagaacctgaatgacagcggcatccagagcctgaaggccgagagtgatgaagcagatgagtgcttcctgatccacagtgatgatggccgggacaagattgatgacagccagccccccttctgcagcagtgatgacaatgaaagcaacagcgagagcgcagaaaatggctgggacagcggcagcaacttcagcgaggagaccaagccaccccgggtgcccaagtatgtgctgacagaccacaagaaggacctgctggaggtgcctgagatcaagacagaaggagacaagttcatcccctgtgaaaatagatgtgacagcgagacagagaggaaggacccccagaatgccctggccgagcccctggatggaaatgcccagcccagcttcccagatgtggaggaggaggacagcgagagcctggccgtgatgacagaggagggcagtgacctggagaaggccaagggcaacctgagcctgctggagcaggccatcgccctgcaggccgagcggggctgtgtgttccacaacacctacaaggagctggaccgcttcctgctggagcacctggccggggagcggcggcagaccaaggtgattgacatgggcggccggcagatcttcaacaacaagcacagccccaggcctgagaagcgggagaccaagtgccccatccctggctgtgatggcaccggccacgtgacaggcctgtacccccaccacaggagcctgagcggctgcccccacaaggtgcgggtgcccctggagatcctggccatgcatgaaaatgtgctgaagtgccccaccccaggctgcaccggccggggccacgtgaacagcaacagaaacacccacaggagcctgagcggctgccccatcgctgctgctgagaagctggccatgagccaggacaagaaccagctggacagcccccagacaggccagtgcccagaccaggcccacaggaccagcctggtgaagcagatcgagttcaacttccccagccaggccatcaccagcccccgggccaccgtgtccaaggagcaggagaagtttgggaaggtgccctttgattatgccagctttgatgcccaggtgtttgggaagaggcccctcatccagacagtgcagggcaggaagaccccacccttccctgagagcaagcacttccccaaccctgtgaagttccccaaccggctgcccagcgctggggcccacacccagagccctggccgggccagcagctacagctatggccagtgcagcgaggacacccacatcgctgctgctgctgccatcctgaacctgagcacccgctgccgggaggccacagacatcctgagcaacaagccccagagcctgcacgccaagggagctgagattgaggtggatgaaaatggcaccctggacctgtccatgaagaagaaccgcatcctggacaagagcgcccccctgaccagcagcaacaccagcatccccacccccagcagcagccccttcaagaccagcagcatcctggtgaatgctgccttctaccaggccctgtgtgaccaggagggctgggacacccccatcaactacagcaagacccacggcaagacagaggaggagaaggagaaggaccctgtgagcagcctggagaacctggaggagaagaagtttcctggagaggccagcatccccagccccaagcccaagctgcacgcccgggacctgaagaaggagctgatcacctgccccaccccaggctgtgatggcagcggccacgtgacaggcaactatgccagccacaggtctgtgtctggctgccccctggccgacaagaccctgaagagcctgatggccgccaacagccaggagctgaagtgccccaccccaggctgtgatggcagcggccacgtgacaggcaactatgccagccacaggagcctgagcggctgcccccgggccaggaaaggaggagtgaagatgacccccaccaaggaggagaaggaggaccctgagctgaagtgccctgtgattggctgtgatggccagggccacatcagcggcaagtacaccagccacaggacagccagcggctgccccctggccgccaagaggcagaaggagaaccccctgaatggagccagcctgtcctggaagctgaacaagcaggagctgccccactgccccctgcccggctgcaatggcctgggccacgtgaacaacgtgtttgtgacccacaggagcctgagcggctgccccctgaatgcccaggtgatcaagaagggcaaggtgtctgaggagctgatgaccatcaagctgaaggccactggaggcatcgagagtgatgaggagatccgccacctggatgaggagatcaaggagctgaatgaaagcaacctgaagattgaagctgacatgatgaagctgcagacccagatcacctccatggagagcaacctgaagaccatcgaggaggagaacaagctgattgagcagaacaatgaaagcctgctgaaggagctggccggcctgagccaggccctgatcagcagcctggccgacatccagctgccccagatgggccccatcagcgagcagaactttgaggcctacgtgaacaccctgacagacatgtacagcaacctggagcgggactacagccctgagtgcaaggccctgctggagagcatcaagcaggccgtgaagggcatccacgtgtag

SEQ ID NO: 181555 - DNA, 1863 bp, Artificial Sequence
  derived and/or modified sequence
atggatgctgaggccgaggacaagaccctgcggaccaggagcaaaggaacagaggtgcccatggacagcctcatccaggagctgtctgtggcctatgactgcagcatggccaagaagaggacagctgaggaccaggccctgggcgtgcctgtgaacaagaggaagagcctgctgatgaagcccaggcactacagccccaaggctgactgccaggaggacagaagtgacagaacagaagatgatggccccctggagacccacggccacagcacagctgaggagatcatgatcaagcccatggatgagagcctgctgagcacagcccaggagaacagcagcaggaaggaggaccgctacagctgctaccaggagctgatggtgaagagcctgatgcacctgggcaagtttgagaagaatgtgtctgtgcagacagtgtctgagaacctgaatgacagcggcatccagagcctgaaggccgagagtgatgaagcagatgagtgcttcctgatccacagtgatgatggccgggacaagattgatgacagccagccccccttctgcagcagtgatgacaatgaaagcaacagcgagagcgcagaaaatggctgggacagcggcagcaacttcagcgaggagaccaagccaccccgggtgcccaagtatgtgctgacagaccacaagaaggacctgctggaggtgcctgagatcaagacagaaggagacaagttcatcccctgtgaaaatagatgtgacagcgagacagagaggaaggacccccagaatgccctggccgagcccctggatggaaatgcccagcccagcttcccagatgtggaggaggaggacagcgagagcctggccgtgatgacagaggagggcagtgacctggagaaggccaagggcaacctgagcctgctggagcaggccatcgccctgcaggccgagcggggctgtgtgttccacaacacctacaaggagctggaccgcttcctgctggagcacctggccggggagcggcggcagaccaaggtgattgacatgggcggccggcagatcttcaacaacaagcacagccccaggcctgagaagcgggagaccaagtgccccatccctggctgtgatggcaccggccacgtgacaggcctgtacccccaccacaggagcctgagcggctgcccccacaaggtgcgggtgcccctggagatcctggccatgcatgaaaatgtgctgaagtgccccaccccaggctgcaccggccggggccacgtgaacagcaacagaaacacccacaggagcctgagcggctgccccatcgctgctgctgagaagctggccatgagccaggacaagaaccagctggacagcccccagacaggccagtgcccagaccaggcccacaggaccagcctggtgaagcagatcgagttcaacttccccagccaggccatcaccagcccccgggccaccgtgtccaaggagcaggagaagtttgggaaggtgccctttgattatgccagctttgatgcccaggtgtttgggaagaggcccctcatccagacagtgcagggcaggaagaccccacccttccctgagagcaagcacttccccaaccctgtgaagttccccaaccggctgcccagcgctggggcccacacccagagccctggccgggccagcagctacagctatggccagtgcagcgaggacacccacatcgctgctgctgctgccatcctgaacctgagcacccgctgccgggaggccacagacatcctgagcaacaagccccagagcctgcacgccaagggagctgagattgaggtggatgaaaatggcaccctggacctgtccatgaagaagtag

SEQ ID NO: 181556 - DNA, 42 bp, Artificial Sequence
  derived and/or modified sequence
atggatgctgaggccgaggacaagaccctgcggaccaggtag

SEQ ID NO: 181557 - DNA, 3144 bp, Artificial Sequence
  derived and/or modified sequence
atggacgccgaggccgaggacaagaccctgcggacccggagcaagggcacagaagtccccatggacagtcttattcaggagctgtcagtggcctacgattgcagcatggcaaaaaaaagaaccgcagaagaccaagctctgggtgtacccgttaacaaaagaaaaagtctgttaatgaaacctaggcactattcacccaaggcagattgccaggaggacaggtcagaccgcaccgaagacgatggaccacttgaaacacatggccattccactgccgaggaaattatgattaagcctatggatgagagcctgctatcaaccgcacaggagaactccagcaggaaagaagaccggtattcctgttaccaggagcttatggtgaagtcattgatgcacctcggcaagtttgagaagaacgtatcagtccagaccgtgagcgagaatctgaacgatagcggcatccagagtctgaaggcggaatccgatgaggccgatgagtgctttctgatacactcagatgatgggcgcgacaaaatcgatgactctcaacctccgttttgttctagcgacgacaacgagagcaactcagaaagtgctgaaaatgggtgggattctggatcaaattttagcgaggaaacgaagcctcccagagtccctaaatatgtactaactgaccacaagaaggatctgctcgaggtgccagagataaaaaccgagggagacaaatttatcccctgtgagaatcgctgtgactcagaaacagagcggaaggacccgcaaaatgccctggctgagcctttggacggtaatgctcagccatctttccctgatgtggaggaggaggattcagagagcctagccgtgatgaccgaagaggggtccgacctggaaaaggccaagggtaacctaagcctgctggagcaggctatcgctctgcaggccgagcgcggctgtgtatttcataacacgtacaaggaacttgacagattcctcctggagcaccttgccggtgagcgcagacagaccaaggtgattgacatgggcggaaggcagatctttaataacaagcacagccccagaccggagaagcgcgaaaccaaatgtcccatcccgggctgcgacggaacggggcatgtgaccgggctgtatcctcatcacagaagtttgagcgggtgcccccacaaggtccgggtgcccctggaaatcctcgcaatgcatgagaatgttctaaaatgtccgacccccggctgcactgggagaggccacgtaaattctaaccgcaatacccatagaagtctcagcggatgcccaattgctgccgctgaaaaactggcgatgtctcaggataagaaccaactggactcaccccaaaccgggcaatgccctgaccaggctcaccgaacatccctcgttaagcagatcgagttcaatttcccgtctcaagccatcacttcacctagagcaactgtgagcaaggagcaggagaaattcggcaaggtgcctttcgattacgccagtttcgatgctcaggttttcggcaagcgtcccctcatccagaccgttcagggtaggaaaacccccccctttcccgagagtaaacatttccccaacccggtaaagttcccaaatcgactgcctagcgcgggcgctcacactcagagccctgggcgcgcctcttcctacagctacggacaatgctccgaggatactcatattgcagcggcagccgcaatcctcaacttgtctacccgctgccgggaagccacagacattctgagtaacaagccccagtcacttcacgctaaaggggcagaaattgaagtagacgagaatgggactctggatcttagcatgaaaaagaacagaattctggacaaatcggctcccctgacctcaagcaacacatctataccaactccttctagctccccattcaagacgtcttctatactagtaaatgcagccttctatcaagctctctgtgatcaagaagggtgggatacgcctatcaattattcgaaaacacacggaaagacggaggaagaaaaagaaaaggatcccgtcagtagcctggagaatttggaggagaagaagtttcccggagaggcttccattccttcacctaaaccgaagctgcacgcccgggacctgaagaaggagctcatcacttgccctacacctggatgtgacgggtcggggcacgttacaggaaattatgctagccatcggagcgtcagcggttgtcctcttgccgataaaacactgaagagcttgatggccgctaatagccaggagctgaaatgccccaccccaggttgtgacggttccggacatgtgaccggtaactacgcaagtcatcgcagcttaagcgggtgtcctagagctagaaaaggtggcgtgaagatgacacccactaaagaagaaaaagaggaccccgaactgaagtgcccggtgattggatgcgatgggcaggggcatatctctggaaagtatacttcccataggacagcctctgggtgcccccttgccgctaagagacagaaggagaacccactgaacggtgccagccttagctggaaactgaacaagcaggaactaccccattgcccgctgccgggctgcaacggccttggacatgttaataatgtattcgtgacacacagatctctctccggctgccctctgaatgcccaggtgataaagaaggggaaggtcagtgaagaattgatgactattaaactgaaggctaccggcggaattgagtctgatgaagagattcgacatctggacgaagagattaaagagctaaatgaaagcaatctgaagattgaggccgacatgatgaaattgcaaacccagattacctcaatggaatcaaacttgaagacaatcgaggaagagaataagctgattgagcagaataatgaatcacttctgaaggaattggccggcttgagccaagctttgatctcaagtctcgccgacatccagctgccacagatgggtcctatctcagaacagaattttgaagcgtatgtcaatactttgactgacatgtatagcaacctggaaagagactattctccggagtgtaaggcactgttggagagtatcaagcaggccgtgaaaggaatccatgtgtag

SEQ ID NO: 181558 - DNA, 1863 bp, Artificial Sequence
  derived and/or modified sequence
atggacgccgaggccgaggacaagaccctgcggacccggagcaagggcactgaggtgcccatggattctcttatacaggagctttccgtcgcctatgattgtagcatggccaaaaaacggacagctgaggatcaggctcttggagtcccagttaataagcgaaaaagtctactgatgaaaccaaggcactattctccaaaggcagattgtcaggaggatagaagcgaccggactgaagatgacggacctttggagacccacgggcactctacagctgaagagattatgataaagccaatggatgagtccctcttaagcaccgcccaggaaaactcttctaggaaggaagaccggtactcttgctatcaggagctcatggttaagtccctgatgcatttgggcaagtttgagaagaatgtgtctgtgcagactgtgtcagagaacctgaacgatagcggaatccagtcactcaaggccgagtctgacgaagctgacgagtgtttcctaatacacagcgatgatggtcgcgataagatcgacgattcacagcctcccttctgtagtagcgacgataacgaaagcaacagtgaaagtgctgaaaatggatgggattccgggagcaacttttcagaggaaacaaaacccccaagagtcccaaagtacgtcctaaccgatcacaaaaaggatctgctcgaggttccagagatcaagacggaaggtgacaagtttatcccatgcgagaacagatgtgattctgagactgagcggaaggacccacaaaacgctttggctgaaccccttgacgggaacgcccagcccagcttcccagatgttgaggaggaggattccgaaagcctcgcagtgatgacagaggaaggcagcgacctggagaaagccaagggtaaccttagcttactcgagcaagccatagccctgcaggcagagcgcggctgtgtgttccacaatacctataaggagctggacagattccttctggaacacctggctggcgagcgacgccagacaaaggtgattgatatgggtggccgtcagatttttaataataaacactcacctagaccagagaagagggagacgaagtgcccaatcccaggctgtgatggtacagggcacgtcacgggcttgtacccacatcacaggagcttgagcggttgcccacataaagtgagagttccacttgagattctcgcaatgcatgagaacgtgctgaagtgtccgactcctggctgcacagggcggggacacgtgaactccaaccggaacacgcatcggtcgctgagcggatgtcccatagctgccgccgaaaagctcgcaatgagccaggataagaatcagctggacagtccacagaccgggcaatgtccagaccaagcacaccggacctcattggtgaaacagatcgagttcaatttcccctctcaggctattaccagtccgcgagcaacagtgtccaaggagcaggaaaagtttggaaaagtgcctttcgattatgcttcttttgatgcgcaggtctttggcaagcgtcccctgatccaaacagttcagggtcgaaagactcctccattccctgagtcaaaacatttcccgaaccccgtaaaattcccgaatcgactcccctctgcgggtgcccacacccagtcccccgggagggcatcatcatacagctatggtcagtgttccgaagatacgcatattgcagctgcagcagctatacttaacttgagtacccggtgtcgtgaggctactgatattctgtctaataaaccacagtccctgcacgctaagggagcagagattgaagtggatgaaaatgggacactggatctgtcaatgaaaaagtag

SEQ ID NO: 181559 - DNA, 42 bp, Artificial Sequence
  derived and/or modified sequence
atggacgccgaggccgaggacaagaccctgcggacccggtag

SEQ ID NO: 181560 - DNA, 6187 bp, Artificial Sequence
  derived and/or modified sequence
ctttttgtagggagaagggcaggatgtttttaactgaatgtgacctcaggggaatactagagaaaataataaaatttctgaatggggcagcgtggagaaatcctaagagaaatagcataagagcattttggaacacatccaggaaaagataactttcgacacacctgtagacgttcgccaggtaaaggagtgatggaaactctccagttcagatccagtagcttttagggaaggaactacagttgctgacttaagttgaagaagcatctatttaatgtctggtcaaatcctacaagaaacacagaaatctatgattaaaaagctgagcactttgatatactgcaaagggtagagaaggcaggacggtagaaattttctgcaagaaagaatgaatttcaggatttatcactaaataagacaaagtcatttatttagtccccctgacacagcagggcaaactgagttgacatacaagttacctggagaaaaagagagcaattccaggacttcctcttcagcctaaaagaaggtaccagatctgtgcactggggcgatgtggaagagacctgcttattgcccctgatgtaagctccagtaagaaaagacgtcaagtacaagtactaggaaatcactttatacatctgtttataggaatgacctcaggactttgtgttcatgttatagatggatgcagaggctgaagataaaacgctgcgtactcgctctaaaggaaccgaggtgccaatggattcactaatccaggagctcagtgttgcctatgattgctccatggcaaagaagagaacagctgaagatcaggctttgggggttccagtcaacaaaaggaaatccctgctaatgaagccccgacactacagcccaaaagcagactgccaagaagaccgcagtgacaggacagaggacgatggccccttggaaacacatggtcactctaccgcagaggaaatcatgataaaacctatggatgaaagtcttctttcaactgcacaagaaaactccagtaggaaggaagacagatactcttgttatcaagagctcatggtcaagtctttaatgcacttggggaaatttgaaaaaaatgtatctgttcagactgtaagtgaaaatttaaatgacagtggcatccagtctttaaaagcagagagcgatgaagcagacgagtgctttctgattcattctgatgatggaagagacaagattgatgattctcagccacccttctgctcctctgatgacaatgaaagtaactctgaaagtgcagaaaatggctgggacagtggctccaacttctcagaagaaaccaaaccacctagagtcccaaagtatgttttaacagatcataaaaaagacctattggaagttcctgaaataaaaactgaaggtgacaaatttatcccttgtgagaacaggtgtgattctgaaacagaaaggaaagacccgcagaatgctctcgcagaacccctggatggcaatgcccagccctcattccctgacgttgaggaggaagatagcgagagcctggcagtaatgacggaagagggtagtgacctggaaaaggccaaggggaatttaagtttgctggagcaggcaattgctctgcaggctgagcgaggttgtgttttccataacacctacaaagagctggataggttcctgctggagcacctagcaggggaaaggaggcaaaccaaagttatcgacatgggtggaagacaaatctttaacaataaacattcaccaaggcctgaaaagagggagaccaagtgcccgatccctggatgtgatggcacgggacacgtgacagggctctacccgcaccaccgcagcctttcggggtgcccccacaaagtgcgggttcccctggaaattcttgccatgcatgaaaatgtgctcaagtgtcccacgccgggatgcacaggaaggggtcatgtgaacagcaaccgcaacacccacaggagtctttctggttgtccaattgctgcagctgaaaaattggcaatgtcccaggataaaaatcagcttgattctccccaaactgggcagtgtcctgaccaggcccacaggacaagtttggtgaagcaaattgaattcaatttcccgtcacaagccatcacctctcccagagccacagtgtcaaaagaacaagagaagtttggaaaagtaccatttgattatgccagttttgatgcccaagttttcggtaaacgccctctcatacaaacagtgcaaggacgaaaaacaccaccatttcctgaatcaaagcattttccaaatccagtgaaatttcctaatcgactgcctagtgcaggcgcccacacccagagccctggccgtgccagctcttatagctacggtcaatgtagtgaagacacccacatagcagcagctgctgccatcctgaacctttccacccgctgcagggaagccacagacatcctctccaacaagccacagagtctgcatgccaagggagccgaaatagaagtggatgaaaatggcacattggacttaagcatgaaaaaaaatcgaatcctggacaagtctgcacccctaacttcctctaacacttctattccaactccttcctcttccccattcaaaacaagcagcattctggtcaatgcagcattctatcaggctctttgtgaccaagagggctgggacactcctatcaactatagcaaaactcacgggaagacagaggaggagaaagagaaagacccagtgagctctctagaaaatttagaggaaaaaaagtttcctggagaggcctctataccaagccctaaacccaagcttcatgcaagagatctcaaaaaggaactaatcacctgtccaacaccaggatgtgatggaagtggccacgtgacaggaaactatgcatctcatcgcagtgtttctggatgtcctttagcagataagactctaaaatccctcatggctgccaactctcaggagcttaagtgtccaaccccaggctgcgatggctcggggcacgtgactggaaactatgcttcccacagaagcttgtccggatgccctcgtgcaaggaaaggtggtgtcaaaatgacccctaccaaggaagaaaaagaagaccctgaactgaaatgtcctgtgatagggtgtgatggccaaggtcacatatcaggtaaatacacatcacaccgcacagcttctggctgtcctctggctgccaagagacagaaggagaatcctctcaatggagcctccctctcctggaaactgaacaaacaagagctaccacattgtcccttgccaggctgcaatgggctgggccatgtaaataatgtttttgtcacccaccgaagcttatctggatgtcctctcaatgcacaagttatcaaaaagggcaaggtttctgaagaactcatgaccatcaagctcaaagcaactgggggaatagagagtgatgaagaaattaggcatttggatgaagaaataaaggaactgaatgaatccaaccttaaaattgaagcagatatgatgaaacttcagacccagatcacatctatggagagcaacttaaagacgatagaggaggagaacaaactcatagaacagaacaatgaaagtctgctgaaagagctggcaggtctaagccaagctctcatttcaagccttgctgacatccagcttccacagatgggacctatcagtgagcagaattttgaagcatatgtaaatacactcacagatatgtacagcaatctggaacgggactattccccggaatgcaaagctctactggaaagtatcaaacaggcagtgaagggtatccatgtgtaggatcacagcgctgccgggcaacagaagttaccaacagcagtaaactccagatggatctgttagaggttcatgtactgctaaggcgtggaggttgccgtactgcatttacaatttgcaacattgcactaattttattttccccagctgatataaaaaggaaagaaaaactatgatagacttcttggattaaaagcaatgcagtcaattattagatcttatttattttcatatgtttttcttttatttcttcattgtactctttttttttttgtaaagtatatgtaaaataaatgtgacatttttataatttatttattactaatcaaagagttttttatcttttaactgcattttgaagtctgccgtatttttacaagtgtgtttattaatttattttccaataggatttaaatagaaatgctattctcaagtcatctttcttgctgggttttaatgaggaaacaggaaagggtgaaggaaatccttgtctaaggactgcactatagttgagtttgatttttattgcacacttcttcccccacctttcactgatttttgtatttataaatgaatttgcggtaaggtgagctgcacggaaggaataagaagacaaatggcgcccactagtggggaatccgcactcacaaaagcacaggatgctggaaaacagcctgctcagaatttgttagcaataattaaatatagcaatcagcaaagtattcgacttggctggacggttttcgttaatatgaattatttatttgaaatgttttaaagaaacataagcctttttagtgatgcagatttgtctgtttgtttttcaagtcatatcagatcgttggcaactcgtatcccaagatgaaaaataagacttggtgtgaccagccaggctttcctgccatatgttggtacaatatacaagtgacaatattggtgtagatttgtacttagcaaatacaaacacatccaaatgaaaaattttgtagataccatatcccctgaaatagcatttatcttactgggttgactggaaaggaatggaaaatatagtaacacatgaaaaaatgctactccaatctgaatgattacttcaaacactggcaccttgggtctcacccaccataggaaacaagacaacattcaatttgatagaaatcttgccacaaaacttcaaatgctacaaaatatacacacacactcacacacacaggcatactcacacacagacacacacacacacacacacacagactcatccacacttcaaattgagcccacaatcttgaatttctgaacggatcagagtttcatagtttctatagtaaaggcaatgtctatttcagggattgtaaagtagttaagcattgtttcaaaagtttttttatatttattttttttaaggaaaaggtatagacaaccagctaaactgcctttttggtgtgcacacacatttcatgtgcagacgtgcctctgtgtaaatgtacacatgaacttcatgtgggcttaattttctgtgctataaacaaaagtgtttattttttattaacctcatggatatttagatggaaagtgatggcattcacaggcttgatgtattccactgttattactgttacctgcacaaatgaaaaacaatactcaacagtaattccactcccatgaaactttggtcattgttatgcattaagtggggcttatctttggtttggagttcatttgaactcttgaaccttagtttagtgaagatgaactgtctgttcttaggtagaaacggtgtttatttaaaaatcagttttaaaaaatgagctaccatatgtgctgtctattataaatgggacaccaaacaaaattttctattacagttgtgtacttgcaaacattttgctatacagtacttcatagatgcatacaaatgagctcacttattacaaagacaaacgtttaatttgctaaatattttaacaagtttgttatatattttatttaatttaaaagaaatctcttaccaacctacatatttattactataatttgctatgacttcaggttaatttatttgtgtttgcatagtttgagcaggatgttttgtgaagtatgtttgtatttatttgcctactttgtacttgatgtgttttgtaatgtgcactgaatttgttttcttttcaactatgttaatgatcaatactgtaaattgggtcttttgtaaacaaaaaggcaatgatgtatgcattttttttaatttgaggtagtttgtttgtatactgtttctccaaacacttaatatttcttacatcaaagcaacaaaattgtgttcagtgctgtacatttggtgtatggtaggaaataaaaattgataacg

SEQ ID NO: 181561 - DNA, 2579 bp, Artificial Sequence
  derived and/or modified sequence
ggtaaataacacagagcaaagttagcaagttgcagcgcctctgcgttctgattctatggaacctttttgtagggagaagggcaggatgtttttaactgaatgtgacctcaggggaatactagagaaaataataaaatttctgaatggggcagcgtggagaaatcctaagagaaatagcataagagcattttggaacacatccaggaaaagataactttcgacacacctgtagacgttcgccaggtaaaggagtgatggaaactctccagttcagatccagtagcttttagggaaggaactacagttgctgacttaagttgaagaagcatctatttaatgtctggtcaaatcctacaagaaacacagaaatctatgattaaaaagctgagcactttgatatactgcaaagggtagagaaggcaggacggtagaaattttctgcaagaaagaatgaatttcaggatttatcactaaataagacaaagtcatttatttagtccccctgacacagcagggcaaactgagttgacatacaagttacctggagaaaaagagagcaattccaggacttcctcttcagcctaaaagaaggtaccagatctgtgcactggggcgatgtggaagagacctgcttattgcccctgatgtaagctccagtaagaaaagacgtcaagtacaagtactaggaaatcactttatacatctgtttataggtttatggatgcagaggctgaagataaaacgctgcgtactcgctctaaaggaaccgaggtgccaatggattcactaatccaggagctcagtgttgcctatgattgctccatggcaaagaagagaacagctgaagatcaggctttgggggttccagtcaacaaaaggaaatccctgctaatgaagccccgacactacagcccaaaagcagactgccaagaagaccgcagtgacaggacagaggacgatggccccttggaaacacatggtcactctaccgcagaggaaatcatgataaaacctatggatgaaagtcttctttcaactgcacaagaaaactccagtaggaaggaagacagatactcttgttatcaagagctcatggtcaagtctttaatgcacttggggaaatttgaaaaaaatgtatctgttcagactgtaagtgaaaatttaaatgacagtggcatccagtctttaaaagcagagagcgatgaagcagacgagtgctttctgattcattctgatgatggaagagacaagattgatgattctcagccacccttctgctcctctgatgacaatgaaagtaactctgaaagtgcagaaaatggctgggacagtggctccaacttctcagaagaaaccaaaccacctagagtcccaaagtatgttttaacagatcataaaaaagacctattggaagttcctgaaataaaaactgaaggtgacaaatttatcccttgtgagaacaggtgtgattctgaaacagaaaggaaagacccgcagaatgctctcgcagaacccctggatggcaatgcccagccctcattccctgacgttgaggaggaagatagcgagagcctggcagtaatgacggaagagggtagtgacctggaaaaggccaaggggaatttaagtttgctggagcaggcaattgctctgcaggctgagcgaggttgtgttttccataacacctacaaagagctggataggttcctgctggagcacctagcaggggaaaggaggcaaaccaaagttatcgacatgggtggaagacaaatctttaacaataaacattcaccaaggcctgaaaagagggagaccaagtgcccgatccctggatgtgatggcacgggacacgtgacagggctctacccgcaccaccgcagcctttcggggtgcccccacaaagtgcgggttcccctggaaattcttgccatgcatgaaaatgtgctcaagtgtcccacgccgggatgcacaggaaggggtcatgtgaacagcaaccgcaacacccacaggagtctttctggttgtccaattgctgcagctgaaaaattggcaatgtcccaggataaaaatcagcttgattctccccaaactgggcagtgtcctgaccaggcccacaggacaagtttggtgaagcaaattgaattcaatttcccgtcacaagccatcacctctcccagagccacagtgtcaaaagaacaagagaagtttggaaaagtaccatttgattatgccagttttgatgcccaagttttcggtaaacgccctctcatacaaacagtgcaaggacgaaaaacaccaccatttcctgaatcaaagcattttccaaatccagtgaaatttcctaatcgactgcctagtgcaggcgcccacacccagagccctggccgtgccagctcttatagctacggtcaatgtagtgaagacacccacatagcagcagctgctgccatcctgaacctttccacccgctgcagggaagccacagacatcctctccaacaagccacagagtctgcatgccaagggagccgaaatagaagtggatgaaaatggcacattggacttaagcatgaaaaaaaa

SEQ ID NO: 181562 - DNA, 3144 bp, Artificial Sequence
  derived and/or modified sequence
atggatgcagaggctgaggataagacccttaggacacgtagcaaaggtactgaagtccccatggacagtctcatacaggagctaagtgtagcttatgactgctccatggccaagaagcgcacagccgaagaccaggctctcggtgtacctgtgaacaagaggaaatcactgctcatgaaacccaggcactattcacccaaggctgattgccaggaagataggtccgatagaaccgaagacgacgggccactggagacccatgggcactctaccgccgaggagattatgatcaaaccaatggacgaaagcttgctgtcgaccgcacaggaaaattcctcgcgaaaggaagatagatactcctgctatcaagagcttatggtgaaaagccttatgcatcttggtaagtttgagaaaaacgtgtccgttcagactgtgtccgaaaatctgaatgacagtggtatacagagcctgaaagccgaaagcgacgaagccgacgagtgtttcctgatccactccgacgatggtagagacaagattgacgactcacaaccaccgttttgttcctctgatgataatgaaagcaattccgaatcagccgagaacggttgggactcaggctctaacttttcagaggagactaaaccaccgcgagtaccaaagtatgtccttacggaccataagaaggacctgctggaagtccccgaaattaagactgaaggtgataaatttatcccttgcgaaaataggtgtgattctgagactgaaagaaaggatccccagaatgcacttgccgagcccttggatggcaacgcccagccgtccttcccggacgtcgaggaggaggactctgaatcccttgctgtgatgactgaggagggtagcgatctggagaaagctaaggggaatctgtcccttctggaacaagctattgctctgcaggccgagagaggatgtgtgtttcataacacctacaaagagctggaccggttcctgcttgaacacttggcaggggagaggcgccagaccaaggtaatcgatatgggtggaagacagatattcaacaataaacacagtcccaggccagagaagagggagaccaagtgtcctataccaggatgtgatgggacaggacacgtaactggactgtacccccatcacaggagtttatccgggtgtcctcacaaagtccgggtgcccttggagattctcgccatgcatgagaatgtattgaaatgccccaccccaggttgcactggtcgtggccacgtgaatagcaacaggaatacacaccgatccttgtccggctgcccaatcgcagccgcagagaagctcgcgatgagccaagataagaaccagctggattcaccacaaacgggccagtgtcccgatcaggcacacagaacttctcttgttaagcaaattgagttcaacttcccatctcaggccataacttcacctagagctactgtctcaaaggaacaggaaaaattcgggaaggtccctttcgactacgcatccttcgatgctcaagtgtttggcaagcgacctctgatacagacagtccaggggaggaagactcctccctttcctgagagcaaacacttccccaatcctgtgaagtttccgaatcgtctgcccagtgctggcgcacacacccagagtccaggcagagctagctcctatagctacggccagtgctctgaagatacgcacattgctgctgccgctgccatactgaatctatccactagatgtagagaagcaaccgacattttgagcaataagcctcagtccctgcacgccaaaggggctgaaattgaggtggacgaaaacggcactcttgatctttctatgaaaaaaaacagaatcctcgataaaagtgcgcctctgacatcaagcaatacctctatccccacacctagctccagtccctttaagacctcgagcatactcgtaaatgcagcattttatcaggcactttgcgatcaagagggttgggacacaccaataaactactcaaagactcatgggaagaccgaagaggagaaggagaaagaccccgtgtcatctctggagaacctggaagaaaagaaattccctggggaggctagcatcccttcccctaaaccaaagctccacgctcgcgacctgaagaaagagctgattacgtgcccaacgccagggtgcgacgggtcaggacacgtaactgggaactacgcctcccacaggagcgtatcagggtgccccttggctgacaagaccctgaagtctctcatggccgcaaattcccaggagcttaagtgtcctacacccggttgcgacgggagcggccacgtgactggaaattacgctagccacagatctctctcaggctgtcctagggcgagaaagggtggagtgaaaatgacccctaccaaagaggagaaagaggatccagaactgaaatgcccggtgatcggatgtgatggccagggacatatttctggtaagtacacttctcacaggacagcctcggggtgtccactggcagctaagcggcagaaggagaaccctttaaacggtgccagtctgagctggaagctgaacaagcaggagctgccccactgccctcttcctggctgtaatggacttgggcacgtgaataacgtattcgtcacccaccgttccctctcaggctgtcctctcaacgcacaagtcatcaaaaaagggaaggtgagtgaagaattaatgactatcaaattaaaagccactgggggaattgagagcgacgaggaaatacggcaccttgacgaggagatcaaagagcttaacgagagcaatttgaagatcgaggctgacatgatgaaactccagacccagataacaagcatggagtccaatctgaaaactatcgaggaagagaacaagttaatagaacagaacaacgagagcctactgaaagagctcgccggattgtctcaggccctgatctcatccctcgccgacatacaactgccccagatgggcccaatcagcgagcagaatttcgaagcttacgtgaatacactgacagacatgtattccaatctggaacgagattactcaccagagtgcaaggccttactggagtccattaagcaagccgtgaaaggaatccacgtatag

SEQ ID NO: 181563 - DNA, 1863 bp, Artificial Sequence
  derived and/or modified sequence
atggacgccgaagccgaagataaaactctgcggacacggagcaagggtaccgaggttccaatggactccttgatacaggagctgagcgtggcctatgactgtagcatggctaaaaagcggaccgctgaggatcaggcactgggcgttccggtcaataaacgcaagtctcttcttatgaagcccaggcactattctcccaaggcagactgccaggaagaccgttccgacaggaccgaggatgatggacccttggaaacacatggccacagcacagccgaggaaatcatgattaagccaatggatgaatccctcctgagcacggcccaggagaatagtagtcggaaggaagataggtacagttgttaccaggagctcatggtcaagtcccttatgcatctgggcaaattcgagaaaaatgttagcgtgcaaactgttagcgagaatttgaatgacagcggaattcaatctctcaaagccgaaagtgatgaagcggacgaatgctttttgattcactcggatgacggcagagacaaaattgacgactcccagcccccattttgtagctccgatgataatgaaagcaactctgaatccgctgaaaatgggtgggactccggcagcaatttcagcgaagagaccaagcctccaagagtccccaaatatgtgctgaccgatcataagaaggacctgttggaagttcctgagatcaaaacggagggtgacaagtttattccgtgtgaaaatagatgtgacagcgagactgagcggaaggacccccaaaatgccctcgcggagccattagacggaaacgcacaacctagcttccccgatgtagaggaggaggacagtgagtccctagcagtgatgaccgaagagggctcggacctggagaaagcaaaggggaacctatcgttgctcgaacaggccatcgctctccaggcagagaggggttgcgtgtttcacaacacatacaaagagctggaccgctttctcctcgagcacttagccggtgagagacgtcagaccaaagtgatagatatgggaggcaggcagattttcaacaataaacatagtccccgacctgaaaaacgggaaacgaaatgcccgatccccggatgtgatgggacaggacacgtgacaggtctctatccccaccaccgatctctgagtggctgccctcacaaagtgagagtgccactggagattctggccatgcatgagaatgtactgaagtgcccaacgcccggttgtaccggacggggacatgtcaactccaacaggaacacacataggtcgctgtctggctgtccaatcgccgctgctgaaaagcttgccatgtcacaggacaaaaaccagctagactccccccagaccgggcaatgcccagatcaggcccaccgaacatcactagtgaaacagatcgaatttaacttcccgagtcaggccataactagccccagggccaccgtttccaaagagcaggaaaaatttgggaaggtgcccttcgattacgcctcattcgacgctcaggtatttggcaaaaggcccttgattcagaccgtgcagggtagaaaaacccctcccttcccagaaagtaagcacttccctaatcccgtgaagttcccaaatcggctgcccagtgctggggctcacacacagagccctgggcgagctagcagttactcctacggccagtgttccgaggacacacacattgcagctgcggcagctattctgaacctctccacacggtgtcgcgaggcaacggatatcctgagcaacaaacctcagagtctccatgcgaaaggcgcagagatagaggtcgacgagaacgggacgctggacctgtctatgaaaaagtag

SEQ ID NO: 181564 - DNA, 42 bp, Artificial Sequence
  derived and/or modified sequence
atggacgctgaagctgaggataagacgctgcggacccgatag

SEQ ID NO: 181565 - DNA, 3144 bp, Artificial Sequence
  derived and/or modified sequence
atggacgccgaggccgaggacaagaccctgagaaccagaagcaagggcaccgaggtgcccatggacagcctgatccaggagctgagcgtggcctacgactgcagcatggccaagaagagaaccgccgaggaccaggccctgggcgtgcccgtgaacaagagaaagagcctgctgatgaagcccagacactacagccccaaggccgactgccaggaggacagaagcgacagaaccgaggacgacggccccctggagacccacggccacagcaccgccgaggagatcatgatcaagcccatggacgagagcctgctgagcaccgcccaggagaacagcagcagaaaggaggacagatacagctgctaccaggagctgatggtgaagagcctgatgcacctgggcaagttcgagaagaacgtgagcgtgcagaccgtgagcgagaacctgaacgacagcggcatccagagcctgaaggccgagagcgacgaggccgacgagtgcttcctgatccacagcgacgacggcagagacaagatcgacgacagccagccccccttctgcagcagcgacgacaacgagagcaacagcgagagcgccgagaacggctgggacagcggcagcaacttcagcgaggagaccaagccccccagagtgcccaagtacgtgctgaccgaccacaagaaggacctgctggaggtgcccgagatcaagaccgagggcgacaagttcatcccctgcgagaacagatgcgacagcgagaccgagagaaaggacccccagaacgccctggccgagcccctggacggcaacgcccagcccagcttccccgacgtggaggaggaggacagcgagagcctggccgtgatgaccgaggagggcagcgacctggagaaggccaagggcaacctgagcctgctggagcaggccatcgccctgcaggccgagagaggctgcgtgttccacaacacctacaaggagctggacagattcctgctggagcacctggccggcgagagaagacagaccaaggtgatcgacatgggcggcagacagatcttcaacaacaagcacagccccagacccgagaagagagagaccaagtgccccatccccggctgcgacggcaccggccacgtgaccggcctgtacccccaccacagaagcctgagcggctgcccccacaaggtgagagtgcccctggagatcctggccatgcacgagaacgtgctgaagtgccccacccccggctgcaccggcagaggccacgtgaacagcaacagaaacacccacagaagcctgagcggctgccccatcgccgccgccgagaagctggccatgagccaggacaagaaccagctggacagcccccagaccggccagtgccccgaccaggcccacagaaccagcctggtgaagcagatcgagttcaacttccccagccaggccatcaccagccccagagccaccgtgagcaaggagcaggagaagttcggcaaggtgcccttcgactacgccagcttcgacgcccaggtgttcggcaagagacccctgatccagaccgtgcagggcagaaagaccccccccttccccgagagcaagcacttccccaaccccgtgaagttccccaacagactgcccagcgccggcgcccacacccagagccccggcagagccagcagctacagctacggccagtgcagcgaggacacccacatcgccgccgccgccgccatcctgaacctgagcaccagatgcagagaggccaccgacatcctgagcaacaagccccagagcctgcacgccaagggcgccgagatcgaggtggacgagaacggcaccctggacctgagcatgaagaagaacagaatcctggacaagagcgcccccctgaccagcagcaacaccagcatccccacccccagcagcagccccttcaagaccagcagcatcctggtgaacgccgccttctaccaggccctgtgcgaccaggagggctgggacacccccatcaactacagcaagacccacggcaagaccgaggaggagaaggagaaggaccccgtgagcagcctggagaacctggaggagaagaagttccccggcgaggccagcatccccagccccaagcccaagctgcacgccagagacctgaagaaggagctgatcacctgccccacccccggctgcgacggcagcggccacgtgaccggcaactacgccagccacagaagcgtgagcggctgccccctggccgacaagaccctgaagagcctgatggccgccaacagccaggagctgaagtgccccacccccggctgcgacggcagcggccacgtgaccggcaactacgccagccacagaagcctgagcggctgccccagagccagaaagggcggcgtgaagatgacccccaccaaggaggagaaggaggaccccgagctgaagtgccccgtgatcggctgcgacggccagggccacatcagcggcaagtacaccagccacagaaccgccagcggctgccccctggccgccaagagacagaaggagaaccccctgaacggcgccagcctgagctggaagctgaacaagcaggagctgccccactgccccctgcccggctgcaacggcctgggccacgtgaacaacgtgttcgtgacccacagaagcctgagcggctgccccctgaacgcccaggtgatcaagaagggcaaggtgagcgaggagctgatgaccatcaagctgaaggccaccggcggcatcgagagcgacgaggagatcagacacctggacgaggagatcaaggagctgaacgagagcaacctgaagatcgaggccgacatgatgaagctgcagacccagatcaccagcatggagagcaacctgaagaccatcgaggaggagaacaagctgatcgagcagaacaacgagagcctgctgaaggagctggccggcctgagccaggccctgatcagcagcctggccgacatccagctgccccagatgggccccatcagcgagcagaacttcgaggcctacgtgaacaccctgaccgacatgtacagcaacctggagagagactacagccccgagtgcaaggccctgctggagagcatcaagcaggccgtgaagggcatccacgtgtag

SEQ ID NO: 181566 - DNA, 1863 bp, Artificial Sequence
  derived and/or modified sequence
atggacgccgaggccgaggacaagaccctgagaaccagaagcaagggcaccgaggtgcccatggacagcctgatccaggagctgagcgtggcctacgactgcagcatggccaagaagagaaccgccgaggaccaggccctgggcgtgcccgtgaacaagagaaagagcctgctgatgaagcccagacactacagccccaaggccgactgccaggaggacagaagcgacagaaccgaggacgacggccccctggagacccacggccacagcaccgccgaggagatcatgatcaagcccatggacgagagcctgctgagcaccgcccaggagaacagcagcagaaaggaggacagatacagctgctaccaggagctgatggtgaagagcctgatgcacctgggcaagttcgagaagaacgtgagcgtgcagaccgtgagcgagaacctgaacgacagcggcatccagagcctgaaggccgagagcgacgaggccgacgagtgcttcctgatccacagcgacgacggcagagacaagatcgacgacagccagccccccttctgcagcagcgacgacaacgagagcaacagcgagagcgccgagaacggctgggacagcggcagcaacttcagcgaggagaccaagccccccagagtgcccaagtacgtgctgaccgaccacaagaaggacctgctggaggtgcccgagatcaagaccgagggcgacaagttcatcccctgcgagaacagatgcgacagcgagaccgagagaaaggacccccagaacgccctggccgagcccctggacggcaacgcccagcccagcttccccgacgtggaggaggaggacagcgagagcctggccgtgatgaccgaggagggcagcgacctggagaaggccaagggcaacctgagcctgctggagcaggccatcgccctgcaggccgagagaggctgcgtgttccacaacacctacaaggagctggacagattcctgctggagcacctggccggcgagagaagacagaccaaggtgatcgacatgggcggcagacagatcttcaacaacaagcacagccccagacccgagaagagagagaccaagtgccccatccccggctgcgacggcaccggccacgtgaccggcctgtacccccaccacagaagcctgagcggctgcccccacaaggtgagagtgcccctggagatcctggccatgcacgagaacgtgctgaagtgccccacccccggctgcaccggcagaggccacgtgaacagcaacagaaacacccacagaagcctgagcggctgccccatcgccgccgccgagaagctggccatgagccaggacaagaaccagctggacagcccccagaccggccagtgccccgaccaggcccacagaaccagcctggtgaagcagatcgagttcaacttccccagccaggccatcaccagccccagagccaccgtgagcaaggagcaggagaagttcggcaaggtgcccttcgactacgccagcttcgacgcccaggtgttcggcaagagacccctgatccagaccgtgcagggcagaaagaccccccccttccccgagagcaagcacttccccaaccccgtgaagttccccaacagactgcccagcgccggcgcccacacccagagccccggcagagccagcagctacagctacggccagtgcagcgaggacacccacatcgccgccgccgccgccatcctgaacctgagcaccagatgcagagaggccaccgacatcctgagcaacaagccccagagcctgcacgccaagggcgccgagatcgaggtggacgagaacggcaccctggacctgagcatgaagaagtag

SEQ ID NO: 181567 - DNA, 42 bp, Artificial Sequence
  derived and/or modified sequence
atggacgccgaggccgaggacaagaccctgagaaccagatag

SEQ ID NO: 181568 - protein, 391 aa, Artificial Sequence
  derived and/or modified sequence
MESETEPEPVTLLVKSPNQRHRDLELSGDRGWSVGHLKAHLSRVYPERPRPEDQRLIYSGKLLLDHQCLRDLLPKQEKRHVLHLVCNVKSPSKMPEINAKVAESTEEPAGSNRGQYPEDSSSDGLRQREVLRNLSSPGWENISRPEAAQQAFQGLGPGFSGYTPYGWLQLSWFQQIYARQYYMQYLAATAASGAFVPPPSAQEIPVVSAPAPAPIHNQFPAENQPANQNAAPQVVVNPGANQNLRMNAQGGPIVEEDDEINRDWLDWTYSAATFSVFLSILYFYSSLSRFLMVMGATVVMYLHHVGWFPFRPRPVQNFPNDGPPPDVVNQDPNNNLQEGTDPETEDPNHLPPDRDVLDGEQTSPSFMSTAWLVFKTFFASLLPEGPPAIAN

SEQ ID NO: 181569 - DNA, 1176 bp, Artificial Sequence
  derived and/or modified sequence
atggaatcagaaaccgagcctgaaccagtgaccctgttagtcaaatctccaaaccagaggcacagagacctggaactttctggtgatcgaggatggagcgtgggtcatcttaaggcacacctgtcaagggtttatcctgaaagaccccgtccagaggatcagaggttgatctactctggcaagctgttgctcgatcaccagtgccttagagatctgctcccaaagcaggaaaagcggcacgtcctgcatttggtatgtaacgtgaagtcaccttccaagatgccagagatcaacgcaaaggtggccgagtctaccgaagaacccgccggatccaacagaggacaatatcccgaagatagctcttccgacgggctgcggcagagagaagtgctcagaaacctctctagtccaggatgggaaaatatatcacgccctgaagccgcccaacaggcttttcagggactgggccctggtttctcagggtacactccttatggctggctgcagcttagctggtttcagcagatttatgctcggcagtattacatgcagtacctggctgcaactgctgcctcaggcgccttcgtaccgcccccaagcgcccaggaaattcctgtggtgtctgccccagcaccggcacctattcacaatcagtttccggctgaaaaccaacccgccaaccagaacgcagctcctcaggtcgttgtcaatccgggcgccaatcaaaacctgcgcatgaacgcacaggggggtcccattgttgaggaggacgatgaaataaaccgcgactggctggattggacttattccgcagccacattttcagttttcctgagcatactctacttctactcgtcactgtccagatttctgatggtgatgggagctacagtggtcatgtatttgcaccatgtgggctggttcccctttcgcccgcgtcctgtgcagaatttccctaacgacgggccgcctcctgatgtggttaaccaggaccccaacaacaacctgcaggagggcaccgacccagagacagaagacccaaaccacctcccaccggacagggatgttcttgatggtgaacagacttcaccgtcctttatgtccactgcatggctggtatttaagaccttttttgcctcgctcctgccggagggccctcctgcaattgccaattag

SEQ ID NO: 181570 - DNA, 1176 bp, Artificial Sequence
  derived and/or modified sequence
atggagagcgagacagagcctgagcctgtgaccctgctggtgaagagccccaaccagaggcaccgggacctggagctgagcggggaccggggctggagcgtgggccacctgaaggcccacctgagccgggtgtacccagagcggcccaggcctgaggaccagaggctcatctacagcggcaagctgctgctggaccaccagtgcctgcgggacctgctgcccaagcaggagaagagacatgtgctgcacctggtgtgcaatgtgaagagccccagcaagatgcctgagatcaatgccaaggtggccgagagcacagaggagcctgctggcagcaacagaggccagtacccagaggacagcagcagtgatggcctgcggcagcgggaggtgctgaggaacctgagcagccctggctgggagaacatcagcaggcctgaggccgcccagcaggccttccagggcctgggccctggcttcagcggctacaccccctacggctggctgcagctgtcctggttccagcagatctatgcccggcagtactacatgcagtacctggccgccacagctgccagcggggcctttgtgcccccacccagcgcccaggagatccctgtggtgtctgccccagccccagcccccatccacaaccagtttcctgctgagaaccagcctgccaaccagaatgctgccccccaggtggtggtgaaccctggggccaaccagaacctgaggatgaatgcccagggcggccccatcgtggaggaggatgatgagatcaacagagactggctggactggacctacagcgctgccaccttctctgtgttcctgagcatcctgtacttctacagcagcctgagccgcttcctgatggtgatgggcgccaccgtggtgatgtacctgcaccacgtgggctggttccccttccggcccaggcctgtgcagaacttccccaatgatggccccccaccagatgtggtgaaccaggaccccaacaacaacctgcaggagggcacagatcctgagacagaggaccccaaccacctgcccccagacagagatgtgctggatggagagcagaccagccccagcttcatgagcacagcctggctggtgttcaagaccttctttgccagcctgctgcctgagggccccccagccatcgccaactag

SEQ ID NO: 181571 - DNA, 1176 bp, Artificial Sequence
  derived and/or modified sequence
atggagagcgagaccgagcccgagcccgtgaccctgctggtgaagtctcccaaccaacgtcaccgcgaccttgagctctctggagaccgggggtggtcagtcggccatcttaaggcacatctttctcgtgtctaccccgagcggccccgccctgaggaccagcgcttaatttactcgggaaaattgcttcttgatcaccagtgcttgagagacctcttaccaaaacaagagaaacggcatgtcctacacctggtgtgcaacgttaagtcgccttccaaaatgcccgaaatcaacgcgaaggtcgccgagtcaacagaggaacctgcgggcagcaatcggggccagtaccccgaggacagttctagcgatggactacgtcaacgcgaggttctgagaaacctttcttctccaggatgggaaaatatcagcaggcctgaagccgcacagcaggcttttcaaggcctgggacctggcttttccggatataccccttatggctggctgcagttatcttggtttcagcagatttatgccagacaatactacatgcagtacttggcggctaccgccgcaagcggtgccttcgttcctcctccttctgcccaggaaatacctgtcgtttccgcccccgccccggctccgatccacaatcagtttccggctgaaaatcagcctgcgaaccagaacgccgccccgcaagtcgtggtgaaccccggggcgaaccagaaccttcgcatgaatgcccagggtgggccaattgttgaggaagatgatgaaattaatcgggactggcttgattggacctattcagccgccaccttctcggtattcctcagcatcctgtacttctactcgtctctttctcgcttcctgatggttatgggggctacagtggtgatgtatctgcaccacgtcggctggttcccattccggccacgtcccgtacagaatttcccaaacgatggtcctccacccgacgttgtgaaccaggaccccaacaataatttgcaagagggtactgatcccgagacagaagatcccaatcatctgccacctgatagggatgtcctagacggtgaacagacttccccttcgttcatgtctacggcttggctcgtttttaaaactttttttgcatcgttgctgccggaaggcccaccagctatcgccaattag

SEQ ID NO: 181572 - DNA, 1176 bp, Artificial Sequence
  derived and/or modified sequence
atggagtctgaaaccgaacctgaacccgtgaccctactggtcaagtcgcctaaccagcggcacagggatctggagctgtccggcgatagaggatggagcgtgggccacctcaaagcacatctgagccgcgtgtacccagaacggccacggcctgaggatcaacgcctgatttactccggaaaactgttactggaccaccaatgcctgagagatcttctaccaaagcaggaaaagcgtcatgtgctgcacctggtgtgtaacgttaagtccccgtccaagatgccagaaatcaacgcgaaagtggctgaaagcacggaagagccagcaggctctaatagaggacagtacccggaggactcatcatcagacggcttgaggcagcgtgaggttctccgtaatctgtcaagccccggatgggaaaacattagtcgtcctgaggctgcccagcaggctttccagggactgggacccggtttttcaggatacacgccctacggctggttgcagttgagttggtttcagcagatctacgcacggcagtattacatgcagtacctggccgcaacagccgcaagtggggcatttgttcccccaccgtcagcccaggaaatccctgtcgtgtccgccccagctcccgcacccatacataaccagttcccagccgagaatcagcccgcaaaccagaacgccgctccccaagtggtcgttaatccaggcgctaaccaaaatctgcggatgaatgcccagggaggccctatcgtcgaggaggatgatgagattaaccgcgattggctggactggacttacagtgctgccacattctccgtgttcctcagtatcctgtacttctattcatcactatcgcgcttcctgatggtgatgggcgctactgtagtgatgtacctgcaccacgtcggctggtttcccttcaggcccagacccgtccagaatttccccaacgacgggcctccacctgatgtggtgaaccaggaccccaataacaacctgcaggaaggcaccgaccccgagaccgaggatcctaaccacttgcctcctgacagggacgtgttagacggcgaacagacctccccgtcctttatgtccacagcttggctggtcttcaagacattctttgcttccctcctgcccgagggtccaccagccattgccaactag

SEQ ID NO: 181573 - DNA, 1176 bp, Artificial Sequence
  derived and/or modified sequence
atggagagcgagaccgagcccgagcccgtgaccctgctggtgaagagccccaaccagagacacagagacctggagctgagcggcgacagaggctggagcgtgggccacctgaaggcccacctgagcagagtgtaccccgagagacccagacccgaggaccagagactgatctacagcggcaagctgctgctggaccaccagtgcctgagagacctgctgcccaagcaggagaagagacacgtgctgcacctggtgtgcaacgtgaagagccccagcaagatgcccgagatcaacgccaaggtggccgagagcaccgaggagcccgccggcagcaacagaggccagtaccccgaggacagcagcagcgacggcctgagacagagagaggtgctgagaaacctgagcagccccggctgggagaacatcagcagacccgaggccgcccagcaggccttccagggcctgggccccggcttcagcggctacaccccctacggctggctgcagctgagctggttccagcagatctacgccagacagtactacatgcagtacctggccgccaccgccgccagcggcgccttcgtgcccccccccagcgcccaggagatccccgtggtgagcgcccccgcccccgcccccatccacaaccagttccccgccgagaaccagcccgccaaccagaacgccgccccccaggtggtggtgaaccccggcgccaaccagaacctgagaatgaacgcccagggcggccccatcgtggaggaggacgacgagatcaacagagactggctggactggacctacagcgccgccaccttcagcgtgttcctgagcatcctgtacttctacagcagcctgagcagattcctgatggtgatgggcgccaccgtggtgatgtacctgcaccacgtgggctggttccccttcagacccagacccgtgcagaacttccccaacgacggccccccccccgacgtggtgaaccaggaccccaacaacaacctgcaggagggcaccgaccccgagaccgaggaccccaaccacctgccccccgacagagacgtgctggacggcgagcagaccagccccagcttcatgagcaccgcctggctggtgttcaagaccttcttcgccagcctgctgcccgagggcccccccgccatcgccaactag

SEQ ID NO: 181574 - protein, 1070 aa, Artificial Sequence
  derived and/or modified sequence
MYCCSAQDSKMDYKRRFLLGGSKQKVQQHQQYPMPELGRALSAPLASTATTAPLGSLTAAGSCHHAMPHTTPIADIQQGISKYLDALNVFCRASTFLTDLFSTVFRNSHYSKAATQLKDVQEHVMEAASRLTSAIKPEIAKMLMELSAGAANFTDQKEFSLQDIEVLGRCFLTVVQVHFQFLTHALQKVQPVAHSCFAEVIVPEKKNSGSGGGLSGMGHTPEVEEAVRSWRGAAEATSRLRERGCDGCLAGIEVQQLFCSQSAAIPEHQLKELNIKIDSALQAYKIALESLGHCEYAMKAGFHLNPKAIEASLQGCCSEAEAQQTGRRQTPPQPMQCELPTVPVQIGSHFLKGVSFNESAADNLKLKTHTMLQLMKEAGCYNGITSRDDFPVTEVLNQVCPSTWRGACKTAVQLLFGQAGLVVVDTAQIENKEAYAPQISLEGSRIVVQVPSTWCLKEDPATMSLLQRSLDPEKTLGLVDVLYTAVLDLNRWRAGREQALPCIQIQLQREICDFGNQADLPSGNGNKSSGGLQKTFSKLTSRFTKKASCTSSSSSTNYSIQNTPSKNIFIAGCSEEKAKMPGNIDTRLQSILNIGNFPRTTDPSQSAQNSSNTVANGFLMERRENFLHGDDGKDEKGMNLPTDQEMQEVIDFLSGFNMGQSHQGSPLVTRHNSAATAMVTEQKAGAMQPQQPSLPVPPPPRAPQAGAHTPLTPQPGLAPQQQSPKQQQPQVQYYQHLLQPIGPQQPPPQPRAPGKWVHGSSQQPAQAVGAGLSPLGQWPGISDLSSDLYSLGLVSSYMDNVMSEVLGQKPQGPRNNTWPNRDQSDGVFGMLGEILPFDPAVGSDPEFARYVAGVSQAMQQKRQAQHGRRPGNPRGNWPPMDDAHRTWPFPEFFTEGDGLHGGWSGAQGDSASSSDETSSANGDSLFSMFSGPDLVAAVKQRRKHSSGEQDTSTLPSPPLLTTVEDVNQDNKTKTWPPKAPWQHPSPLPSTLPSPSAPLYAVTSPGSQWNDTMQMLQSPVWAATNDCSAAAFSYVQTPPQPPPPPAHKAAPKGFKAFPGKGERRPAYLPQY

SEQ ID NO: 181575 - protein, 206 aa, Artificial Sequence
  derived and/or modified sequence
MKAGFHLNPKAIEASLQGCCSEAEAQQTGRRQTPPQPMQCELPTVPVQIGSHFLKGVSFNESAADNLKLKTHTMLQLMKEAGCYNGITSRDDFPVTEVLNQVCPSTWRGACKTAVQLLFGQAGLVVVDTAQIENKEAYAPQISLEGSRIVVQVPSTWCLKEDPATMSLLQRSLDPEKTLGLVDVLYTAVLDLNRWRAGRLVYLSFF

SEQ ID NO: 181576 - DNA, 3213 bp, Artificial Sequence
  derived and/or modified sequence
atgtactgctgcagcgcccaggacagcaagatggactacaagagaagattcctgctgggcggcagcaagcagaaggtgcagcagcaccagcagtaccccatgcccgagctgggcagagccctgagcgcccccctggccagcaccgccaccaccgcccccctgggcagcctgaccgccgccggcagctgccaccacgccatgccccacaccacccccatcgccgacatccagcagggcatcagcaagtacctggacgccctgaacgtgttctgcagagccagcaccttcctgaccgacctgttcagcaccgtgttcagaaacagccactacagcaaggccgccacccagctgaaggacgtgcaggagcacgtgatggaggccgccagcagactgaccagcgccatcaagcccgagatcgccaagatgctgatggagctgagcgccggcgccgccaacttcaccgaccagaaggagttcagcctgcaggacatcgaggtgctgggcagatgcttcctgaccgtggtgcaggtgcacttccagttcctgacccacgccctgcagaaggtgcagcccgtggcccacagctgcttcgccgaggtgatcgtgcccgagaagaagaacagcggcagcggcggcggcctgagcggcatgggccacacccccgaggtggaggaggccgtgagaagctggagaggcgccgccgaggccaccagcagactgagagagagaggctgcgacggctgcctggccggcatcgaggtgcagcagctgttctgcagccagagcgccgccatccccgagcaccagctgaaggagctgaacatcaagatcgacagcgccctgcaggcctacaagatcgccctggagagcctgggccactgcgagtacgccatgaaggccggcttccacctgaaccccaaggccatcgaggccagcctgcagggctgctgcagcgaggccgaggcccagcagaccggcagaagacagacccccccccagcccatgcagtgcgagctgcccaccgtgcccgtgcagatcggcagccacttcctgaagggcgtgagcttcaacgagagcgccgccgacaacctgaagctgaagacccacaccatgctgcagctgatgaaggaggccggctgctacaacggcatcaccagcagagacgacttccccgtgaccgaggtgctgaaccaggtgtgccccagcacctggagaggcgcctgcaagaccgccgtgcagctgctgttcggccaggccggcctggtggtggtggacaccgcccagatcgagaacaaggaggcctacgccccccagatcagcctggagggcagcagaatcgtggtgcaggtgcccagcacctggtgcctgaaggaggaccccgccaccatgagcctgctgcagagaagcctggaccccgagaagaccctgggcctggtggacgtgctgtacaccgccgtgctggacctgaacagatggagagccggcagagagcaggccctgccctgcatccagatccagctgcagagagagatctgcgacttcggcaaccaggccgacctgcccagcggcaacggcaacaagagcagcggcggcctgcagaagaccttcagcaagctgaccagcagattcaccaagaaggccagctgcaccagcagcagcagcagcaccaactacagcatccagaacacccccagcaagaacatcttcatcgccggctgcagcgaggagaaggccaagatgcccggcaacatcgacaccagactgcagagcatcctgaacatcggcaacttccccagaaccaccgaccccagccagagcgcccagaacagcagcaacaccgtggccaacggcttcctgatggagagaagagagaacttcctgcacggcgacgacggcaaggacgagaagggcatgaacctgcccaccgaccaggagatgcaggaggtgatcgacttcctgagcggcttcaacatgggccagagccaccagggcagccccctggtgaccagacacaacagcgccgccaccgccatggtgaccgagcagaaggccggcgccatgcagccccagcagcccagcctgcccgtgccccccccccccagagccccccaggccggcgcccacacccccctgaccccccagcccggcctggccccccagcagcagagccccaagcagcagcagccccaggtgcagtactaccagcacctgctgcagcccatcggcccccagcagccccccccccagcccagagcccccggcaagtgggtgcacggcagcagccagcagcccgcccaggccgtgggcgccggcctgagccccctgggccagtggcccggcatcagcgacctgagcagcgacctgtacagcctgggcctggtgagcagctacatggacaacgtgatgagcgaggtgctgggccagaagccccagggccccagaaacaacacctggcccaacagagaccagagcgacggcgtgttcggcatgctgggcgagatcctgcccttcgaccccgccgtgggcagcgaccccgagttcgccagatacgtggccggcgtgagccaggccatgcagcagaagagacaggcccagcacggcagaagacccggcaaccccagaggcaactggccccccatggacgacgcccacagaacctggcccttccccgagttcttcaccgagggcgacggcctgcacggcggctggagcggcgcccagggcgacagcgccagcagcagcgacgagaccagcagcgccaacggcgacagcctgttcagcatgttcagcggccccgacctggtggccgccgtgaagcagagaagaaagcacagcagcggcgagcaggacaccagcaccctgcccagcccccccctgctgaccaccgtggaggacgtgaaccaggacaacaagaccaagacctggccccccaaggccccctggcagcaccccagccccctgcccagcaccctgcccagccccagcgcccccctgtacgccgtgaccagccccggcagccagtggaacgacaccatgcagatgctgcagagccccgtgtgggccgccaccaacgactgcagcgccgccgccttcagctacgtgcagacccccccccagcccccccccccccccgcccacaaggccgcccccaagggcttcaaggccttccccggcaagggcgagagaagacccgcctacctgccccagtactag

SEQ ID NO: 181577 - DNA, 621 bp, Artificial Sequence
  derived and/or modified sequence
atgaaggccggcttccacctgaaccccaaggccatcgaggccagcctgcagggctgctgcagcgaggccgaggcccagcagaccggcagaagacagacccccccccagcccatgcagtgcgagctgcccaccgtgcccgtgcagatcggcagccacttcctgaagggcgtgagcttcaacgagagcgccgccgacaacctgaagctgaagacccacaccatgctgcagctgatgaaggaggccggctgctacaacggcatcaccagcagagacgacttccccgtgaccgaggtgctgaaccaggtgtgccccagcacctggagaggcgcctgcaagaccgccgtgcagctgctgttcggccaggccggcctggtggtggtggacaccgcccagatcgagaacaaggaggcctacgccccccagatcagcctggagggcagcagaatcgtggtgcaggtgcccagcacctggtgcctgaaggaggaccccgccaccatgagcctgctgcagagaagcctggaccccgagaagaccctgggcctggtggacgtgctgtacaccgccgtgctggacctgaacagatggagagccggcagactggtgtacctgagcttcttctag

SEQ ID NO: 181578 - DNA, 3213 bp, Artificial Sequence
  derived and/or modified sequence
atgtactgctgttctgcccaggattcaaagatggactacaaacggaggtttttactcgggggctccaagcagaaggttcagcagcaccaacaataccccatgcccgagcttggacgggcgctctcagctcctctggcctccacggctaccactgccccccttggctcgctgactgcagctggatcctgccaccacgccatgccccataccacaccaatcgccgatatacagcaaggtatctccaagtacttggacgcacttaacgtgttctgcagggcctccacgtttctgactgacttatttagtaccgtgttccgaaactcacattactcaaaagccgcaacccagctgaaggatgttcaggagcacgttatggaggctgcatccagactcacaagtgccatcaagcccgagatcgctaaaatgctcatggaactctcggcaggcgccgctaacttcactgaccagaaagagttcagcctccaagacattgaagttctgggcaggtgcttcctgaccgtggtgcaggtccacttccagttcctgacacacgcacttcagaaggtgcaacctgtggcacatagctgctttgcggaagtaattgtgcccgaaaagaagaatagcggcagtgggggggggttgtcaggaatgggccatactcctgaagtcgaagaagcagtgagaagttggagaggcgcggcggaggcgacttctcggcttcgagaacgtggatgtgatggttgtctcgccgggattgaggtgcaacaactcttttgctcccagtctgccgctattcccgagcaccagctgaaggaactgaacatcaaaatagattctgctctacaggcttataagatagctctcgaaagcctgggtcactgcgaatacgctatgaaggcagggtttcacctgaacccaaaagccattgaagcatccctgcagggttgctgcagtgaagcggaggcccagcagaccggaaggcgtcagactccccctcagccaatgcagtgcgagctgcccacagtacccgtgcaaatcggttcccattttctgaagggggtgagctttaatgagtccgccgccgataacttgaagctgaagactcacactatgctccagctcatgaaggaggccggatgctataatggcatcacatcacgcgatgattttcctgttactgaagttctcaatcaagtttgcccatccacttggagaggggcctgcaaaaccgcggttcaactgcttttcgggcaagccggactggtggtggtcgacacagcccagattgagaacaaagaggcctatgctccacaaatctcactggaggggtccaggatcgttgttcaggtcccctcaacatggtgcctcaaggaggacccagccaccatgtcactacttcagaggtctctagaccccgaaaagacacttggactcgtggacgtattgtataccgctgtcctagatctcaatcggtggcgcgccggcagggagcaggccctgccctgtatacagatccagttgcagcgggaaatctgcgattttggtaatcaagccgacctgccttcaggaaatggaaacaagtcctctggtgggctccagaaaactttcagcaagctcactagtcggtttacaaagaaggctagctgtacgtcctcctcatcctccacaaattactcaatccaaaatacaccctcaaagaacatctttatcgcgggatgctctgaagaaaaagctaagatgcccgggaacatcgatacgcgccttcagtctattcttaacattggaaatttcccaagaacaactgacccgagccagtcggcccagaatagctcgaataccgtagccaatggatttttgatggaacgtcgcgaaaacttcctgcacggagacgatggaaaagacgagaaaggaatgaaccttcccacagatcaggaaatgcaagaggtcattgactttctcagcggatttaacatgggccagagccaccagggctcgcccttagtgacacggcacaactctgctgcaactgccatggtcacagaacagaaagccggcgccatgcagccacagcagccatcgctccctgtccccccacccccccgcgccccccaagctggggcacacacgccactgacaccccagcccggtctggccccacagcagcaaagcccaaaacagcaacagcctcaggtgcagtattatcaacacctgcttcagcctattgggccccagcagcctcccccacagccaagggcccctggtaaatgggtccatggttctagccagcagccagcccaggctgtgggcgcaggtctgtcacctctgggtcagtggccaggcatttcagacctgtcatcagatctctattcccttggcctagtctcaagttacatggacaatgtcatgtctgaagtgttgggccagaagccccaggggcctcgcaataacacctggcctaatagagatcaatctgacggagtgtttgggatgctcggagagatcctcccttttgatccagcagtgggctctgacccggaatttgccagatacgtggccggcgtgtcacaggccatgcaacaaaaacgacaggcccaacacgggcgaagacccggcaatccacggggtaactggccaccaatggacgacgcacatcggacttggcccttcccagagtttttcacagaaggagatgggctgcatgggggctggagcggagcacagggagatagtgcctcatcttctgatgagacgtctagcgctaacggggatagtctattttccatgttctccggcccagacttggtcgcggccgtgaaacagagacgcaagcactcaagcggcgagcaggacactagtaccttgccaagccctccactgcttaccactgttgaggacgtgaatcaggacaataagactaagacttggccccctaaggcaccttggcagcaccctagccccctgccatccactctgccaagtcccagcgcccctctttatgctgtcacttcacctgggtctcagtggaacgacacgatgcaaatgctgcaatcccccgtatgggccgcaactaatgattgctcagccgccgcattttcctacgtgcagacccctccacagccaccaccgccacccgcgcacaaggctgcacctaaggggtttaaggcattcccgggtaaaggagaacggcgcccggcctacctcccgcagtactag

SEQ ID NO: 181579 - DNA, 621 bp, Artificial Sequence
  derived and/or modified sequence
atgaaagcaggatttcacctcaaccccaaagccattgaagcttcgcttcagggatgttgttccgaagcggaagctcagcagactggacgaagacaaacccctccacaacccatgcaatgcgagcttcctaccgtgccggtccaaatcggctctcacttcttaaaaggagttagtttcaacgaaagcgcagccgataacctaaaattaaagactcataccatgttgcagctgatgaaagaggccggctgttataacggaataacttctcgtgacgactttccagtgactgaagtgttgaaccaggtatgtcccagcacctggagaggggcgtgcaagactgcggttcagcttctgtttggccaagcgggactagtggtggtggataccgcccagatagagaacaaggaggcgtatgccccccagatttcgttagaagggagtcgtatcgtcgtccaggtcccatcaacctggtgcctgaaggaggaccccgccacaatgagtctcctgcagcggtctctcgatccagaaaagacacttggactggtagatgtcctgtatactgccgttctggacttgaataggtggagggccggcaggttagtgtacctgagctttttctag

SEQ ID NO: 181580 - DNA, 3213 bp, Artificial Sequence
  derived and/or modified sequence
atgtactgctgcagcgcccaggacagcaagatggactacaagaggcgcttcctgctgggcggcagcaagcagaaggtgcagcagcaccagcagtaccccatgcctgagctgggccgggccctgagcgcccccctggccagcacagccaccacagcccccctgggcagcctgacagctgctggcagctgccaccacgccatgccccacaccacccccatcgctgacatccagcagggcatcagcaagtacctggatgccctgaatgtgttctgccgggccagcaccttcctgacagacctcttcagcacagtgttcaggaacagccactacagcaaggccgccacccagctgaaggatgtgcaggagcacgtgatggaggccgccagccggctgaccagcgccatcaagccagaaattgccaagatgctgatggagctgtctgctggggccgccaacttcacagaccagaaggagttcagcctgcaggacatcgaggtgctgggccgctgcttcctgactgtggtgcaggtgcacttccagttcctgacccacgccctgcagaaggtgcagcctgtggcccacagctgctttgctgaggtgattgtgcctgagaagaagaacagcggcagcggcggcggcctgagcggcatgggccacaccccagaggtggaggaggccgtgcgctcctggagaggagctgctgaggccaccagccggctgcgggagcggggctgtgatggctgcctggccggcatcgaggtgcagcagctgttctgcagccagagcgctgccatccctgagcaccagctgaaggagctgaacatcaagattgattctgccctgcaggcctacaagatcgccctggagagcctgggccactgtgaatatgccatgaaggccggcttccacctgaaccccaaggccatcgaggccagcctgcagggctgctgcagcgaggccgaggcccagcagacaggaagacggcagaccccaccccagcccatgcagtgtgagctgcccaccgtgcctgtgcagatcggcagccacttcctgaagggcgtgtccttcaatgaatctgctgctgacaacctgaagctgaagacccacaccatgctgcagctgatgaaggaggccggctgctacaacggcatcaccagcagagatgacttccctgtgacagaggtgctgaaccaggtgtgccccagcacctggaggggggcctgcaagacagctgtgcagctgctgtttggccaggccggcctggtggtggtggacacagcccagatcgagaacaaggaggcctatgccccccagatcagcctggagggcagccgcatcgtggtgcaggtgcccagcacctggtgcctgaaggaggaccctgccaccatgagcctgctgcagaggagcctggaccctgagaagaccctgggcctggtggatgtgctgtacacagctgtgctggacctgaaccgctggagggctggccgggagcaggccctgccctgcatccagatccagctgcagcgggagatctgtgactttggaaaccaggccgacctgcccagcggaaatggaaacaagagcagcggcggcctgcagaagaccttcagcaagctgaccagccgcttcaccaagaaggccagctgcaccagcagcagcagcagcaccaactacagcatccagaacacccccagcaagaacatcttcatcgccggctgcagcgaggagaaggccaagatgcctggcaacatcgacacccggctgcagagcatcctgaacatcggcaacttccccaggaccacagaccccagccagagcgcccagaacagcagcaacacagtggccaacggcttcctgatggagcggcgggagaacttcctgcatggagatgatggcaaggatgagaagggcatgaacctgcccacagaccaggagatgcaggaggtgattgacttcctgagcggcttcaacatgggccagagccaccagggcagccccctggtgaccaggcacaacagcgctgccacagccatggtgacagagcagaaggccggggccatgcagccccagcagcccagcctgcctgtgcccccaccaccccgggccccccaggccggggcccacacccccctgaccccccagcccggcctggccccccagcagcagagccccaagcagcagcagccccaggtgcagtactaccagcacctgctgcagcccatcggcccccagcagcccccaccccagccccgggcccctgggaagtgggtgcacggcagcagccagcagcctgcccaggccgtgggcgccggcctgagccccctgggccagtggccaggcatcagtgacctgagcagtgacctgtacagcctgggcctggtgagcagctacatggacaacgtgatgtctgaggtgctgggccagaagccccagggccccaggaacaacacctggcccaacagagaccagagtgatggagtgtttggcatgctgggggagatcctgccctttgatcctgctgtgggcagtgaccctgagtttgcccgctacgtggccggcgtgtcccaggccatgcagcagaagaggcaggcccagcacggccggcggcccggcaacccccggggcaactggccacccatggatgatgcccacaggacctggcccttccctgagttcttcacagaaggagatggcctgcacggcggctggagcggggcccagggcgacagcgccagcagcagtgatgagaccagcagcgccaatggagacagcctcttctccatgttcagcggccctgacctggtggccgctgtgaagcagaggaggaagcacagcagcggggagcaggacaccagcaccctgcccagcccccccctgctgaccaccgtggaggatgtgaaccaggacaacaagaccaagacctggccacccaaggccccctggcagcaccccagccccctgcccagcaccctgcccagccccagcgcccccctgtatgctgtgaccagccctggcagccagtggaatgacaccatgcagatgctgcagagccctgtgtgggccgccaccaatgactgcagcgctgctgccttctcctatgtgcagaccccaccccagcccccacctcctccagcccacaaggccgcccccaagggcttcaaggccttccctggaaaaggagagcggcggcctgcctacctgccccagtactag

SEQ ID NO: 181581 - DNA, 621 bp, Artificial Sequence
  derived and/or modified sequence
atgaaggccggcttccacctgaaccccaaggccatcgaggccagcctgcagggctgctgcagcgaggccgaggcccagcagacaggccggcggcagaccccaccccagcccatgcagtgtgagctgcccaccgtgcctgtgcagatcggcagccacttcctgaagggcgtgtccttcaatgaatctgctgctgacaacctgaagctgaagacccacaccatgctgcagctgatgaaggaggccggctgctacaacggcatcaccagcagagatgacttccctgtgacagaggtgctgaaccaggtgtgccccagcacctggaggggggcctgcaagacagctgtgcagctgctgtttggccaggccggcctggtggtggtggacacagcccagatcgagaacaaggaggcctatgccccccagatcagcctggagggcagcagaattgtggtgcaggtgcccagcacctggtgcctgaaggaggaccctgccaccatgagcctgctgcagaggagcctggaccctgagaagaccctgggcctggtggatgtgctgtacacagctgtgctggacctgaaccgctggagggctggccgcctggtgtacctgtccttcttctag

SEQ ID NO: 181582 - DNA, 3213 bp, Artificial Sequence
  derived and/or modified sequence
atgtactgctgcagcgcccaggacagcaagatggactacaagcggcgattcctactgggcggcagcaaacaaaaagtccaacaacaccaacagtacccaatgcccgaactcggcagggctctttctgctcctctggcatcaactgctacaactgcgcccttgggatccctgactgccgctggctcctgccaccatgcaatgccacacacgacacccattgcggacatccaacagggcatctcgaagtacctggatgcgctgaacgtcttttgtcgagccagcacctttttgactgatttgttttccacggtattccgcaactcacactattcgaaggctgctacgcagcttaaagacgtccaggaacatgttatggaggcagcctccaggctaacctcagccataaagcccgagatcgctaagatgcttatggagctttctgccggcgcagcaaattttactgaccagaaggagttttccctgcaggacatcgaagtgctgggcagatgtttcttaacagtcgtgcaagtgcactttcagtttttgacccatgccttgcagaaggtacagcccgtggcccacagctgcttcgctgaagtgatagtgcccgagaaaaagaactccggatccggggggggtttgagtggaatgggccacacacctgaggtagaagaggctgtgaggagctggcggggggcagcagaagcgacgagcaggctgagagaacggggctgtgacggctgtcttgctgggatcgaggtgcaacaactgttttgctctcaaagtgcggcgatacctgagcatcagcttaaggagctcaacattaagatagactcggctcttcaggcttataagatcgcgctcgagtccctggggcattgcgagtatgccatgaaagccgggttccatctcaatcctaaggccatcgaagcgtctctccagggatgctgttctgaggcggaagcacaacagacaggtcgccgccagactcctccacagcctatgcagtgtgagctacctactgtccccgtgcagataggttctcatttcctgaagggagtcagctttaatgagagtgccgctgacaacttgaaattgaaaacccataccatgttgcagctgatgaaggaggcaggatgctacaatgggatcaccagccgagatgatttccccgtgacagaggtgcttaaccaggtctgcccgtcaacatggaggggtgcatgtaaaactgccgttcagcttctgttcggacaagcgggactcgtggtggttgataccgctcagatcgagaacaaagaggcctatgcacctcagatctctcttgaaggatcacggatagtggtgcaggtgccttccacatggtgccttaaggaggaccccgcgacaatgagcttgcttcagcgcagcttagaccctgaaaaaacccttggcctcgtggacgtactttatactgccgttctggacttaaaccggtggcgggccggaagagaacaggccctgccgtgtattcaaatccagctacagagagaaatatgtgattttggtaaccaagccgatcttccgagtggaaacgggaataaatccagcggggggctccagaagacgttctcaaagttaacttcacggttcaccaagaaggcatcctgtactagcagttccagctccaccaactacagtatacagaatacccctagcaagaacatctttatcgccggctgctctgaggaaaaagccaagatgccgggaaatatcgatacccgcttacagagcatactcaatattggcaatttccctcgcacaacagatccttcacagtctgcacagaatagctctaatacagtagctaatggatttctaatggagcgccgagagaacttcttgcacggggacgacggtaaagatgaaaagggcatgaacttgccgacagatcaggagatgcaggaagtgattgactttctgtctggttttaacatgggtcagtctcaccagggttctccgcttgttacgcggcataattcagctgccacagctatggtcactgaacaaaaagcgggtgccatgcaaccacagcagccaagcttgccagtgcccccaccaccacgcgccccgcaggccggtgctcacacacctttgaccccgcaacctggcctggccccacaacagcagtctcctaaacaacagcagcctcaagtacagtattaccagcatctgttgcagccaattggtcctcagcagccccctccacagcctcgtgctccgggaaagtgggttcacgggtcttctcagcagccggcacaggcagttggagcgggtctctcgcccctgggacaatggccgggcatttcagatctgtccagtgatctgtactccttagggctagtaagtagctacatggataacgtaatgtccgaggttctaggccagaagccacagggtccgaggaataacacctggcccaaccgagaccagtccgatggtgtctttgggatgctgggcgagattcttccttttgatccagctgttgggagtgaccctgaattcgccagatacgtggccggcgtgagtcaggcaatgcagcagaaaaggcaagcacagcacggacgacggccagggaatccccgaggcaattggccccctatggatgatgcacatagaacctggccctttccagagttcttcaccgagggcgacggtctgcacggcggctggtccggggcccagggcgattctgccagtagctcagatgagacaagctccgcaaacggcgattccctgttttctatgttctctggccccgatctggtggcggcggtgaagcaaaggcggaaacactctagcggcgaacaggacacatccacactgccttctccaccgctgcttaccaccgtcgaggatgttaatcaggataataagaccaaaacctggccccctaaggctccttggcagcacccaagtccgctgccctccactctgccctcaccaagcgcccctctatacgctgttacaagcccaggttcccagtggaacgacaccatgcaaatgttgcaatctcccgtgtgggcggcaaccaacgactgttctgcagcagccttttcctacgtgcagacacccccacagcctccaccccccccagcccacaaagccgctccaaagggatttaaggccttccccggaaaaggcgaacggcggcccgcttaccttccgcagtactag

SEQ ID NO: 181583 - DNA, 621 bp, Artificial Sequence
  derived and/or modified sequence
atgaaggccggcttccacctgaaccccaaggccatcgaggccagcctccaaggctgctgtagcgaagccgaggctcaacaaaccgggagaagacagaccccgcctcagcctatgcaatgtgagctccccacggtgccagtgcagattggaagccatttcctgaagggagtctcttttaacgagtccgctgccgacaatctgaaactaaagacacatacgatgctgcagctgatgaaggaagcaggatgttacaacggcatcacatcgagagacgactttccagtgactgaagtcctgaaccaagtctgcccctccacatggagaggagcgtgtaagactgcagtgcagctgctcttcggccaagcgggcctcgtagtggtagacaccgcacagattgagaataaagaagcctacgcgcctcagatttctctcgagggcagccgcatcgtcgtgcaggtgccttcaacttggtgtctcaaggaagatccggctactatgtccttactgcaacgttctctcgatcccgaaaagacattgggccttgtcgacgtcttatataccgcagtgctcgacctgaaccgatggcgagcaggcagactagtatatctgagcttcttctag

SEQ ID NO: 181584 - DNA, 3213 bp, Artificial Sequence
  derived and/or modified sequence
atgtactgctgtagcgcccaggatagcaagatggattataagaggcgcttcttactcggtggttccaaacagaaagtgcaacagcaccagcagtatcccatgcctgagttgggacgcgctctctcagccccactcgcctcaacagccaccactgccccattgggatccttgactgccgcagggagctgccatcatgccatgccgcacacaacgccaattgctgatatccaacaaggcatttcgaaatacttggacgcactaaacgtgttctgccgagcctcgactttccttacagacttgtttagtaccgtgttcaggaatagtcattattctaaggctgcaacccagctgaaggacgtgcaggaacatgtgatggaggccgcttcaaggttgacaagtgccatcaagcctgagatagctaaaatgctgatggaactgagcgcgggtgccgcaaatttcacggatcaaaaagagttttctctacaggacatcgaggtactgggacgttgctttctgaccgtcgtccaggttcactttcaatttctgacccacgccctccagaaagtccaacccgtggcacactcatgtttcgctgaagtcatcgtcccagagaagaaaaactctggcagcggaggtgggctgtccggaatgggtcacactcctgaggttgaagaagcagtcagaagttggaggggggctgccgaagcgacctctcgtttgcgcgagagaggctgcgatggctgcttggcaggaatcgaggtgcagcaactgttttgcagccagtcagctgccattcctgagcaccagctgaaggagctgaatattaagatagattccgccttgcaggcctacaagattgcactggaatcactcggccactgcgagtatgccatgaaagctggatttcatctaaatcctaaggctatagaagcctcgttgcaaggctgttgctctgaggcagaagcccagcagactggtcggagacaaactcctccgcagcctatgcagtgtgaactgcctactgtgcccgtgcagattggatcacacttcctcaaaggcgtgtcctttaacgagtccgccgctgataacctcaaacttaagactcatactatgcttcagttgatgaaggaagcagggtgctataacggcattaccagtagagacgacttccccgtaaccgaagttttgaaccaggtgtgtccatccacatggcggggtgcttgtaaaacggcagtgcagctgctctttggccaagccggactggtcgtcgtcgacacagcccagatagagaacaaggaagcttacgctccccaaattagtcttgaaggaagtaggattgtcgtccaagtacccagcacgtggtgcctgaaggaagatccagctaccatgagcctcctgcagcggtctcttgatcctgagaagacactgggactcgtcgatgttctgtacaccgcggtacttgacctgaataggtggagggctggaagagaacaagccctaccgtgcattcaaattcaattgcagagggaaatttgcgacttcggtaaccaggctgaccttccttcaggcaatggaaacaagagctcagggggtctccagaaaactttttctaaactgactagtaggttcactaagaaggcctcgtgtacgagttcaagctcatcaacgaactactccatccagaatacgccttcaaagaatatctttatcgccggttgctcagaggagaaggccaagatgccaggaaatattgatacaaggttgcagtctattctcaatatcggtaattttcctagaaccacagacccttcccagtctgcccagaattccagcaacaccgttgcaaatggcttcctcatggagagaagagaaaactttctgcatggggatgacgggaaggatgaaaaaggcatgaacttgcccaccgaccaggaaatgcaggaagtgattgacttcctctcaggtttcaatatgggacagtcacaccagggcagccccctggtgacccgccataactccgctgcaacagctatggtcacggaacagaaggctggcgcaatgcagccacaacagccttcgctgccagtcccacctcccccacgcgcacctcaagccggtgcccacacccccctgacccctcaaccgggtcttgctccccagcagcaaagtcccaagcagcagcagccccaggtgcagtactatcaacacctgttgcagcctattgggccacagcagcctcctccacagccacgtgcacccggtaagtgggtgcatggttccagccagcagcctgcccaggccgtcggcgcagggctgtcacctctcggacagtggcccggtatttccgatttgtctagcgatttgtacagtttggggctggtttcatcatatatggacaacgtgatgtccgaagtcctcggacagaaacctcaggggcctcggaataacacatggcctaacagggaccagtccgacggcgtgtttgggatgctgggagaaatactgcccttcgaccccgcagttgggagcgatccggagtttgcgagatacgtggcaggcgtatcccaggccatgcaacagaagagacaggctcagcatgggcgaaggccaggcaaccccagaggaaactggcccccaatggatgatgctcaccgcacttggccttttccagagtttttcaccgagggtgatggcctccacggaggatggtcgggtgctcagggcgactctgcatcaagctccgacgagacttcaagtgctaatggagacagcctgttcagtatgttctccgggcctgacctggtggcagctgtgaaacagcgcagaaaacattcatcaggcgagcaggatacctccaccctcccttccccccctctcctgaccactgtggaagacgtgaatcaggataataaaactaagacttggcccccaaaagctccctggcagcacccctccccactgccatctacattaccctctccgtccgcgcctctgtatgcggtcacgtctccaggctctcagtggaacgatacaatgcaaatgctgcagagtccagtctgggccgcaactaatgattgttccgcagccgcttttagctacgtgcagacacctcctcagccccctccgcctcccgcacataaagccgcacctaaagggttcaaggctttccccggtaagggtgaacgacgccctgcatacctcccccagtactag

SEQ ID NO: 181585 - DNA, 621 bp, Artificial Sequence
  derived and/or modified sequence
atgaaggccggatttcatttgaatccaaaggccattgaggcgagtctgcagggttgctgtagcgaagctgaggcacagcagaccggacgccgacagacccctcctcagcctatgcagtgtgagctcccaacagtcccagtccaaatcgggtctcattttctgaagggagtgtctttcaacgagtccgcagctgataaccttaagctcaaaacacacacgatgttgcagctcatgaaagaggccggatgttataatggcatcacctctagagacgattttccagtgaccgaggtgctcaatcaggtctgtccctctacatggagaggggcttgtaaaaccgcagtgcagctcctgtttgggcaagcgggactggttgtggtggacaccgcccagattgagaacaaggaggcttacgcaccccaaattagtctggaaggcagccggattgtggtccaagtgccgagcacttggtgtctgaaggaagatcccgcaactatgtcactgctgcagcgcagcctggaccctgaaaaaaccctgggactggtggacgtcctgtacaccgcagtcctcgatcttaaccggtggcgagcgggtcggctagtatacttatcctttttctag

SEQ ID NO: 181586 - DNA, 6683 bp, Artificial Sequence
  derived and/or modified sequence
gacgtaacttccggtgtacacagccggtccaaggcggtgcgctgggggccggggcgcgtcgcaggaaaggacttagaagccttacaaatacatctgtgcattcttgcttcagactttacaactgagggccagcccagtctggaagcatctcttattaatgttacaaggaaaccgctacctcagcaaacaaaaggaatggaggaggagacttacaacaaacgccatttaaaaaaaaaagaaaaacttgttttcaggaaacattagaggaaatttggagaatttcagcattgcatagaagcagccttacaggtaaacggatttgacgggcaggctctgtcaaaattctgcagaagtttgatcttccttcttaaggactttgtgtgaagtaattctttactgcttttaaattgctgttgatcagcttctgggtttttgggttctaacttttttgggtatattgaagacacagtgtattacattatattacatttttaaacgttaagttatttttctgccattgtaaatacaagtatcaaaatattcttgcaaagaagtaaacatttttctcagcaagcatatccttttagtaagagagtggaatgctaaacagttcttatccagcattttggacatcttttattttttgtcagagatcctgtctacactgaaaatattaattatataaacctgttgtctctcacctctacattggatcacatggtcacctgcctcatggaaatgccttttttaaaacttcgatttgcagaactccactatttttatacctagctacagttttgagaaagaagaatcagaaccctgacccacttacggttgctgggacaattccccctcccgcatgtattgctgcagtgcccaggacagtaaaatggactacaagcggcgcttcctgcttggcgggtccaagcagaaggtgcagcagcaccagcaatacccgatgcctgagctgggccgagcactgagtgctcccctggcatccacggccaccactgcccccctgggcagtctgaccgctgcaggcagctgccaccatgccatgccccacactactcctatcgccgacatccagcagggcatctccaagtatctggatgccctgaacgtcttctgccgtgccagtactttcctcacagatctcttcagcactgtgttcaggaactctcactactcaaaggcagccacacagctcaaagatgtgcaggagcatgtcatggaagcagccagtcggctgacctcggccataaagcctgagatcgccaagatgctaatggaacttagtgctggggctgcaaattttacggatcagaaggaattcagtctccaggacattgaggtgttggggcgatgtttcctgactgtggtgcaagtccatttccagtttttgactcatgcgttacagaaggtccagccggtggctcactcttgctttgctgaggtcatcgtgccagaaaaaaagaacagcggcagtggcggcggcttatctggcatgggccacacacctgaagtagaggaagctgtgcggtcctggcggggggctgctgaggcgacatctagactaagagaaagaggctgtgatggttgcctggcaggaattgaagttcaacaactcttttgttctcaaagtgcagcaattcctgagcaccagctaaaagaactgaacataaaaatcgacagtgctttgcaagcatataagatagctctggaaagcttaggacactgtgaatatgcaatgaaagccggcttccacctgaatccaaaggcgattgaagcaagtttgcagggctgctgcagcgaggcggaagcccagcagacggggcggaggcagacacccccgcagcccatgcagtgtgagctccccaccgtccctgtgcagataggatcgcacttcctgaagggcgtctcctttaatgagtcggccgccgacaatctgaaacttaagacgcatacaatgttacagctgatgaaggaggcaggctgctataatggaatcacatccagggatgattttcctgtgactgaagtgctgaaccaggtttgcccttccacatggcgaggtgcctgcaagacggcggtgcagctgctgtttggccaggctggactggtggtggttgacacagcacagattgagaataaagaagcctatgccccccagatcagtttagaaggctctagaatcgtggttcaagtcccatccacatggtgcctgaaagaagaccctgctaccatgtccctgctgcagagaagccttgatcctgagaagaccctgggtctagtggacgtgctctacacagctgtgctggacctaaaccgctggagggctggaagggagcaagctttaccctgcatacagatccagctgcaaagggagatctgtgattttggcaaccaggctgacctgccttctggaaatggaaacaaatcttcaggtggcctgcagaagacattctccaaactgacatcccggttcaccaagaaagcttcatgtaccagctccagcagcagcacaaattattccatccaaaataccccttccaaaaacatcttcatagctggatgttccgaagagaaggccaaaatgcctggcaatattgatacaaggttacaaagcattttgaacattggtaatttccccaggactacagacccttcacagtcagctcagaattccagtaatacagtggccaatggctttctcatggagaggcgtgagaacttcctgcatggagatgacggcaaggatgagaagggtatgaacttaccaactgatcaggaaatgcaagaggtgatagattttctctcgggctttaacatgggccagtcacatcagggctctccgttggtgacaaggcataattctgctgccacagccatggtgactgagcagaaggcaggagccatgcaaccacagcagccgtcactgcctgtgccccctccaccacgggcaccccaggctggggcacacacacctctgacaccccagccgggactggcacctcagcagcagtccccaaagcagcaacaacctcaagtccaatactaccaacacctactccagcccattggaccgcagcagcccccgccccagcctcgggcacctgggaaatgggtacatggctcatcccagcagccagcgcaggctgttggagcaggtctgtctcctcttggtcagtggcctggcatatctgatctcagttctgacttgtacagcttgggtctggtgagcagctatatggataatgtgatgtcagaggttctgggacagaagccgcagggacctagaaataacacctggcccaaccgtgaccaaagtgatggagtctttggaatgctgggagagattctgccttttgatcctgcagtgggctcagacccagagtttgcacgctatgtggcaggagtgagccaggcgatgcagcagaagcggcaggcccagcacggtcgccggccaggcaacccccggggcaactggccgcctatggatgacgcgcatcggacctggcccttccccgagttcttcacagaaggggatggcctgcacggtggctggtcgggtgctcagggagactctgccagctcgagtgatgagacatcctcagccaacggggacagcttgttctccatgttttcagggcctgacctcgttgctgctgtcaagcagagaaggaaacacagcagtggagagcaagacaccagcacgctgccctcaccacctctcctcaccacggtggaggatgtgaaccaggataacaaaaccaaaacgtggccacccaaagcaccctggcagcacccttccccgcttcccagcacgctgcccagccccagcgcaccactctatgcagtcaccagccctggcagccagtggaacgacaccatgcagatgctgcagtccccagtgtgggccgcaaccaacgactgcagtgccgctgccttctcctatgtgcagaccccaccccagcccccacccccaccagcacacaaggcagcacccaagggcttcaaggccttccctgggaagggtgagcgcaggccagcctatctgccccagtactgaccccaggccagccagcctgcctgcctgcctgcctgcccgcccagagctgtggggatgagtgtccccaccccagggccacttagctgacaccagcccctcagaggaccagtgcgccccatcccagggagggttccttggggacaagggtggttggcagctccaagcctttaaacctggcttctgaaacgatggcatcagagccctggagagccagctggagacacaggcgtctggccttcaggggcttgctagggaacctgcatgcctagtaagcgccacaggtgactctgatgcaggcgccacagccacacttgaagaaacacagctcttgggtttttagtcctgctgtgtgttgggaagacatcaggcctgaaagctgagggcataactgaccattttttggaaaccctctcctccctcctccacaccttgagtgatgaccacaccaatcactgtattttatagctttttttttcatgtaggtttttagttaaaacatctcctgcctaaaatgcattgaatattttaagataacagatatactggctggaggtttgtttaacactatctatatttaagcttatacaaaatgggcaaaatatagaatatttgtgattggaagcagtcacctggggtttctgggggtggacagttcctcgccacccagcagcaccctgggactgcggcctttcccagctttattgaagcagaatggtggaacttgtgccggaggtacactgctgaaggtgcgtggcggtggaccagccagctgctgtccatgtgcagagcaaggctgcacctgctgcccttcgatccttccacacatggccaggacactgccacaatcctcggggtgtggtcaaggggcactcagagacacctgcactagaaattgcattgacattgtgagctggctcagaagacaaaccaattaagatgtagatagaaattaatttaaggtcttttcttaaaaaaaaaatccacctcattttcagttaacatgtgccattaaatagataacatcctgtggatttagggatattttccagccagaatggatccagaagaattgaatggtgcttaaattgagaaataataataaatatatctatatagaatagacatatcccactgtatattaattgaggttacagaaagttctttatataaaacttatttaaatttttcatatttcatctttgaaaaagtctgagaaaaatccataatattttctggtatgaaagtttgacagtattaatattttttttatattttcttaaatcattaaaccattttaatatatgttaactactaataaatggtttattctttctaactccatataagcttttccagcaaagattgtaataacacatttatgttctcgtttttctacagatataagtaaatttatatataaaaataccaaaaagaggctgggcgtggtggctcacgcctgtaatcccagcactttgggaggccgaggcaggtggatcacctaaggtcaggagttcgagaccagcctggccaatatggtgaaaccccatctctactaaaaatacaaaaattagccgggtgtggtggcgtgcgcctgtagtcccagctactcgggaggctgaagcagaagaatcgcttgaacccgggaggcggaggttacagtgagctgagattgtgccactgcactccagcctgggtgacagagtgagattccgtctcaacaagaaaaaaaaaaaagaatatatatatatgtatgtatgtatgtatgtaaacacacacactaatttgagaggacccgtagggtgtctgagcccagccacctgagtttttagtactgtgttgtcaggctcttcccaggcctcaggtgttgtcttttgtgctgtgtggggatgcattgctgcctgtatttatgatcttttgccgtggttctgagcattcacctcaccatgtttacaaagaactgttttgtatatagacattttcaggcacgtgctttgcaccaaccctgcgtggctcttgtctgtgttagctgtcacggtgtgcacactaatctctgttaaagttgtctatggctgttctacttgtaagatagttttctatttccttcagtaatgtgtccacagtaccctgtatttcgagttccattatactgaagtactcatgttttaatagtgcctctccaaaggcctcaccttggacagaggtcaatccttgatgctccagcacaggtgacgtcactaattgtcactttccagtttgtttttctctattaaggaagacattttctaattgcatctccatgggctgtgagactgtgtgaagccgtttgtgtggtctccatgtaggtgctgtgttcccggcaccgccttgctctgaacactggtaattccaggtgctgcgcttggcagaggggtctcgccaaagcgcatgtgtgtgcatgtgtgaacgtgtgtgtcctttgcatggttgggcgtgggtgccttgctagggcatcagcaggacattgtgtgtatagttacaatgcttccaaactggaactctacattttgtatcttttaaagctcctataagtaaaataactattggctttattaaaaatatacatttaataata

SEQ ID NO: 181587 - DNA, 1529 bp, Artificial Sequence
  derived and/or modified sequence
gggacaattccccctcccgcatgtattgctgcagtgcccaggacagtaaaatggactacaagcggcgcttcctgcttggcgggtccaagcagaaggtgcagcagcaccagcaatacccgatgcctgagctgggccgagcactgagtgctcccctggcatccacggccaccactgcccccctgggcagtctgaccgctgcaggcagctgccaccatgccatgccccacactactcctatcgccgacatccagcagggcatctccaagtatctggatgccctgaacgtcttctgccgtgccagtactttcctcacagatctcttcagcactgtgttcaggaactctcactactcaaaggcagccacacagctcaaagatgtgcaggagcatgtcatggaagcagccagtcggctgacctcggccataaagcctgagatcgccaagatgctaatggaacttagtgctggggctgcaaattttacggatcagaaggaattcagtctccaggacattgaggtgttggggcgatgtttcctgactgtggtgcaagtccatttccagtttttgactcatgcgttacagaaggtccagccggtggctcactcttgctttgctgaggtcatcgtgccagaaaaaaagaacagcggcagtggcggcggcttatctggcatgggccacacacctgaagtagaggaagctgtgcggtcctggcggggggctgctgaggcgacatctagactaagagaaagaggctgtgatggttgcctggcaggaattgaagttcaacaactcttttgttctcaaagtgcagcaattcctgagcaccagctaaaagaactgaacataaaaatcgacagtgctttgcaagcatataagatagctctggaaagcttaggacactgtgaatatgcaatgaaagccggcttccacctgaatccaaaggcgattgaagcaagtttgcagggctgctgcagcgaggcggaagcccagcagacggggcggaggcagacacccccgcagcccatgcagtgtgagctccccaccgtccctgtgcagataggatcgcacttcctgaagggcgtctcctttaatgagtcggccgccgacaatctgaaacttaagacgcatacaatgttacagctgatgaaggaggcaggctgctataatggaatcacatccagggatgattttcctgtgactgaagtgctgaaccaggtttgcccttccacatggcgaggtgcctgcaagacggcggtgcagctgctgtttggccaggctggactggtggtggttgacacagcacagattgagaataaagaagcctatgccccccagatcagtttagaaggctctagaatcgtggttcaagtcccatccacatggtgcctgaaagaagaccctgctaccatgtccctgctgcagagaagccttgatcctgagaagaccctgggtctagtggacgtgctctacacagctgtgctggacctaaaccgctggagggctggaaggttggtatatttgtcttttttt

SEQ ID NO: 181588 - DNA, 129 bp, Artificial Sequence
  derived and/or modified sequence
atggagctgctgcaggccgagggcgccacagcccgctggcccccaggccggggctgcggccctgtgcctgctgggggcgcccggccccacgcccctcctcctcctgctgccccctgccagggcccctag

SEQ ID NO: 181589 - protein, 972 aa, Artificial Sequence
  derived and/or modified sequence
MRPEGAGMELGGGEERLPEESRREHWQLLGNLKTTVEGLVSTNSPNVWSKYGGLERLCRDMQSILYHGLIRDQACRRQTDYWQFVKDIRWLSPHSALHVEKFISVHENDQSSADGASERAVAELWLQHSLQYHCLSAQLRPLLGDRQYIRKFYTDAAFLLSDAHVTAMLQCLEAVEQNNPRLLAQIDASMFARKHESPLLVTKSQSLTALPSSTYTPPNSYAQHSYFGSFSSLHQSVPNNGSERRSTSFPLSGPPRKPQESRGHVSPAEDQTIQAPPVSVSALARDSPLTPNEMSSSTLTSPIEASWVSSQNDSPGDASEGPEYLAIGNLDPRGRTASCQSHSSNAESSSSNLFSSSSSQKPDSAASSLGDQEGGGESQLSSVLRRSSFSEGQTLTVTSGAKKSHIRSHSDTSIASRGAPESCNDKAKLRGPLPYSGQSSEVSTPSSLYMEYEGGRYLCSGEGMFRRPSEGQSLISYLSEQDFGSCADLEKENAHFSISESLIAAIELMKCNMMSQCLEEEEVEEEDSDREIQELKQKIRLRRQQIRTKNLLPMYQEAEHGSFRVTSSSSQFSSRDSAQLSDSGSADEVDEFEIQDADIRRNTASSSKSFVSSQSFSHCFLHSTSAEAVAMGLLKQFEGMQLPAASELEWLVPEHDAPQKLLPIPDSLPISPDDGQHADIYKLRIRVRGNLEWAPPRPQIIFNVHPAPTRKIAVAKQNYRCAGCGIRTDPDYIKRLRYCEYLGKYFCQCCHENAQMAIPSRVLRKWDFSKYYVSNFSKDLLIKIWNDPLFNVQDINSALYRKVKLLNQVRLLRVQLCHMKNMFKTCRLAKELLDSFDTVPGHLTEDLHLYSLNDLTATRKGELGPRLAELTRAGATHVERCMLCQAKGFICEFCQNEDDIIFPFELHKCRTCEECKACYHKACFKSGSCPRCERLQARREALARQSLESYLSDYEEEPAEALALEAAVLEAT

SEQ ID NO: 181590 - DNA, 2919 bp, Artificial Sequence
  derived and/or modified sequence
atgcggccagaaggagccggaatggagttagggggcggggaggagcgattacctgaggaatcaaggagagagcactggcagctgctggggaacctgaagactaccgttgagggcctggtgtctaccaactcccctaatgtatggtccaagtatggcggcttggaacggttgtgtcgcgacatgcagtctattttatatcatggtctgatcagggatcaggcctgccggcgacaaaccgactattggcagttcgtgaaggacattcgttggctgtctccacatagtgccctgcatgtggagaagttcatctccgtgcacgaaaatgaccagtccagcgccgatggcgccagcgagcgggcggtggctgagctttggcttcagcactccctgcagtaccactgtttgtctgcccagctgaggcctctgcttggtgatagacagtacatcagaaagttttatacagacgcagcattcttgttgtcggatgcacacgtcactgcaatgctccagtgtttggaggcagttgagcagaataacccaagactgttggctcaaattgacgcatcaatgtttgccaggaagcacgaatcccctctgctggtcaccaagtcccaatctttaactgccttaccctctagcacctacaccccccccaacagttatgcacagcactcctacttcggctccttcagttccctacaccaaagcgtgcccaacaacggctccgagaggaggtccacaagttttcctctgagcggtccacccagaaagccacaggagtctagaggacatgtctcccccgccgaggaccaaaccattcaggctccgcccgtcagcgtgtcagcactggccagggattctccactaactccaaatgagatgtcttcgtcaacgctgacttcaccaatagaggccagttgggtcagttcacaaaatgactctccgggcgatgccagcgagggccccgagtacctagccattggtaatcttgatccaagagggagaactgcgagctgccagtctcacagtagcaatgcagagagttctagctctaacctcttcagttccagtagctctcagaaacctgattctgcggccagctcgttaggagatcaggagggaggcggcgagagtcaactcagtagcgtcctgcggcgctcatctttctccgaaggtcaaaccctgacagtgacatctggcgctaagaaaagccacatccgcagccacagtgacacttctattgcgtcgcgcggagcaccagagtcatgtaatgacaaggcgaaattgcgaggccccctcccatatagcggacagagtagcgaagtatccaccccttcttctctttacatggagtacgagggaggccggtacctgtgttcgggcgaagggatgttcagaagacctagcgaaggtcagtccctcatctcttatctgtccgagcaggattttggttcatgtgccgacctggagaaagagaatgctcatttctcgatatctgagagcttgattgctgcaatagagctcatgaagtgcaatatgatgagccagtgtctggaagaggaggaggtggaagaggaggattcagacagggaaattcaggaactgaaacaaaaaatccgtctgcggcggcagcagatccggaccaagaacctactgccaatgtaccaggaggcagaacacggctcttttcgcgttacttcgtctagttcccagttcagctcccgcgattccgctcagctctccgattcaggttcagccgatgaggttgacgagttcgaaattcaagatgccgatattcgaagaaataccgccagctcaagcaagagtttcgtgagctcccagtctttctcacactgctttctgcatagcaccagcgctgaagccgtggccatgggtctgttgaagcagttcgaaggcatgcagctccctgctgcatcagagttggagtggctcgtcccagagcatgatgccccacagaagctcctcccaattcctgactctctgcccatctcaccagacgatgggcagcacgccgacatctacaagctgcggatacgggtgcgaggtaacctagagtgggctccacctcgcccacagatcattttcaatgtacaccccgctcccactaggaagattgcggttgcaaaacaaaactacagatgcgctgggtgcgggataaggacagaccccgactacatcaaaagactgcgttactgtgagtacttagggaagtatttttgtcaatgttgccatgagaatgcccagatggcaataccaagtagggttctcaggaagtgggacttcagtaagtattatgtgagcaacttcagtaaagatctgcttatcaaaatatggaacgaccccttgttcaacgtgcaggacatcaatagcgctttatacaggaaagtgaaattgctgaatcaagtccgcttgctcagggttcaattgtgccacatgaagaacatgttcaaaacctgccggttggcgaaggaattgctggattcgtttgacactgtgccaggccacctgaccgaagatctacatctgtattcccttaacgatctgacagctactagaaaaggagaattgggtcccaggctcgcggaattgacacgtgctggtgcaacccacgtcgagcgttgtatgctgtgccaagctaaggggtttatttgcgaattctgtcagaatgaggatgacattatttttccattcgaattacacaagtgtcgaacgtgtgaggaatgcaaagcctgttatcacaaggcttgtttcaaatcgggttcatgtccgaggtgtgaacgtctgcaggcaaggagagaggctctggcacggcagtcccttgagagctatctgtcagactacgaagaggagccagctgaagctctggcacttgaggccgcagtactggaggctacgtag

SEQ ID NO: 181591 - DNA, 2919 bp, Artificial Sequence
  derived and/or modified sequence
atgaggcctgagggcgccggcatggagctgggcggcggggaggagcggctgcctgaggagagccggcgggagcactggcagctgctgggcaacctgaagaccaccgtggagggcctggtgtccaccaacagccccaacgtgtggagcaaatatggaggcctggagcggctgtgccgggacatgcagagcatcctgtaccacggcctcatccgggaccaggcctgccggcggcagacagactactggcagtttgtgaaggacatccgctggctgagcccccacagcgccctgcacgtggagaagttcatctctgtgcatgaaaatgaccagagcagcgcagatggagccagcgagagagctgtggccgagctgtggctgcagcacagcctgcagtaccactgcctgagcgcccagctgcggcccctgctgggggaccggcagtacatcaggaagttctacacagatgctgccttcctgctgagtgatgcccacgtgacagccatgctgcagtgcctggaggccgtggagcagaacaacccccggctgctggcccagattgatgcctccatgtttgccaggaagcatgagagccccctgctggtgaccaagagccagagcctgacagccctgcccagcagcacctacaccccacccaacagctatgcccagcacagctacttcggcagcttcagcagcctgcaccagagcgtgcccaacaacggcagcgagcggcgcagcaccagcttccccctgagcggcccccccaggaagccccaggagagccggggccacgtgtccccagctgaggaccagaccatccaggcccctcctgtgtctgtgtctgccctggcccgggacagccccctgaccccaaatgagatgagcagcagcaccctgaccagccccatcgaggcctcctgggtgagcagccagaatgacagccctggagatgccagcgagggccctgagtacctggccatcggcaacctggacccccggggccgcacagccagctgccagagccacagcagcaatgctgagagcagcagcagcaacctcttcagcagcagcagcagccagaagccagacagcgctgccagcagcctgggggaccaggagggcggcggggagagccagctgagctctgtgctgcggcgcagcagcttcagcgagggccagaccctgactgtgaccagcggggccaagaagagccacatccgcagccacagcgacaccagcatcgccagcagaggagcccctgagagctgcaatgacaaggccaagctgcggggccccctgccctacagcggccagagcagcgaggtgtccacccccagcagcctgtacatggagtatgagggcggccgctacctgtgcagcggggagggcatgttccggcggcccagcgagggccagagcctcatctcctacctgtctgagcaggactttggcagctgtgccgacctggagaaggaaaatgcccacttcagcatcagcgagagcctgattgctgccatcgagctgatgaagtgcaacatgatgagccagtgcctggaggaggaggaggtggaggaggaggacagcgaccgggagatccaggagctgaagcagaagatccggctgcggcggcagcagatccgcaccaagaacctgctgcccatgtaccaggaggccgagcacggcagcttccgggtgaccagcagcagcagccagttcagcagccgggacagcgcccagctgagtgacagcggcagcgcagatgaggtggatgaatttgagatccaggatgctgacatcagaagaaacacagccagcagcagcaagagctttgtgagcagccagagcttcagccactgcttcctgcacagcaccagcgctgaggccgtggccatgggcctgctgaagcagtttgagggcatgcagctgcctgctgccagcgagctggagtggctggtgcctgagcatgatgccccccagaagctgctgcccatcccagacagcctgcccatcagcccagatgatggccagcacgccgacatctacaagctgcgcatccgggtgcggggcaacctggagtgggccccaccccggccccagatcatcttcaacgtgcacccagcccccaccaggaagattgctgtggccaagcagaactaccgctgtgccggctgcggcatcagaacagatcctgactacatcaagaggctgcgctactgtgagtacctgggcaagtacttctgccagtgctgccatgaaaatgcccagatggccatccccagccgggtgctgaggaagtgggacttcagcaagtactacgtgagcaacttcagcaaggacctgctgatcaagatctggaatgaccccctcttcaacgtgcaggacatcaacagcgccctgtacaggaaggtgaagctgctgaaccaggtgcggctgctgcgggtgcagctgtgccacatgaagaacatgttcaagacctgccgcctggccaaggagctgctggacagctttgacacagtgcccggccacctgacagaggacctgcacctgtacagcctgaatgacctgacagccaccaggaagggggagctgggcccccggctggccgagctgaccagggctggggccacccacgtggagcgctgcatgctgtgccaggccaagggcttcatctgtgagttctgccagaatgaagatgacatcatcttcccctttgagctgcacaagtgcaggacctgtgaggagtgcaaggcctgctaccacaaggcctgcttcaagagcggcagctgcccccgctgtgagcggctgcaggcccggcgggaggccctggcccggcagagcctggagagctacctgagtgactatgaggaggagcctgctgaggccctggccctggaggccgctgtgctggaggccacctag

SEQ ID NO: 181592 - DNA, 2919 bp, Artificial Sequence
  derived and/or modified sequence
atgcggcccgagggcgccggcatggagctgggcggcggcgaggagcgtctaccagaggaaagcagacgtgagcactggcagttgttaggcaacctgaagacaacagttgaaggactcgtcagcaccaatagcccaaatgtgtggtccaagtatggggggctcgaaagactgtgccgtgatatgcagagcattctctatcacggtttgattcgggatcaggcctgcagaagacaaactgactattggcagttcgttaaagacatccggtggctttcccctcacagcgcactgcacgtcgaaaagttcatctccgtccacgaaaacgaccagagttcagcggatggagcttctgagcgggccgtggccgagctgtggctgcagcattctctgcaataccattgcctgagtgctcagctgagacctcttctcggtgatagacagtatattcggaagttctataccgatgctgcttttcttctgtctgacgcgcacgtgaccgcaatgctacagtgcttagaggccgttgaacagaataatccacgcctgttggcgcagatagacgctagcatgtttgccaggaaacacgagtctccgctgctggtgacaaagtcccagtccctaacggccctgccgtcgagtacctacactcctcctaatagctacgctcaacactcctactttggcagtttctcctcgctccaccagtcagtgccaaacaacggttccgagcggcgctccacaagcttcccgctgagcggccctcccagaaaacctcaggagtcccggggccacgtatctcccgcggaagaccaaaccattcaggcgcctccggtgtcggtgagcgcactcgctcgcgactcccccctgacgcctaatgagatgagttcgtctaccctaaccagcccgatcgaagccagctgggtttccagccagaacgactccccgggcgatgcatcagagggtcctgagtatctggccattggcaaccttgatcctcggggcagaacagcctcatgccagagccactcctccaatgctgaatcttccagctccaatctcttctccagttcgtcttctcaaaaaccagatagcgccgcctcaagtctgggagatcaggagggtggcggggaatcacagctctcttctgtgctgaggagaagctcgttttcggaggggcagacccttacagtgacatctggagcgaagaagtcacacatcagatctcattccgatacgtcaatcgctagcagaggagcaccagaaagctgcaacgacaaggcaaagctaagaggacccctgccttattccgggcagtcatcggaggtatccacaccctcaagcttgtacatggaatatgagggtggtagatacttatgcagtggagagggcatgttccgcagaccgagtgaaggccagtccttgattagctatctttcggagcaggatttcggctcatgcgcggacttagagaaagaaaacgctcacttctccatctccgagtctttaatcgcagccatcgagctgatgaaatgtaacatgatgagtcaatgtctggaagaggaggaggtggaggaggaggactctgatcgggagatccaggagcttaaacagaagattcgtttgaggcgccagcagattcggacgaagaatctgttacctatgtatcaggaagctgagcacgggtcctttagggtgacttcttctagctcccaattttcctcccgagacagtgcgcagctgtcagattctgggagcgcagatgaagtcgacgagtttgaaattcaggatgccgacataagacggaacacagcctctagttcgaagagttttgtatcatctcagagcttttcccactgctttctccatagcaccagcgctgaagctgtggctatggggctgcttaaacagttcgaaggcatgcagctgcccgcagcgagcgaactcgagtggcttgtccctgaacatgatgccccacaaaagctgttacctatccccgattctctgcctataagtcccgacgacggccagcacgcagacatctacaaactccgcatccgcgtgcggggcaaccttgagtgggccccccccaggccacagataatctttaatgtccaccccgcacctacccggaagattgccgttgcgaagcaaaattatcggtgtgccggctgtggaattcgaactgaccccgattatatcaaaaggctaagatactgcgaatacctcggaaagtacttctgccaatgttgccatgaaaacgctcagatggccattcccagccgcgtgctgcgcaagtgggacttctcaaagtattacgtttccaatttttctaaagatctgttaataaagatctggaatgatccactgttcaacgtgcaggatatcaattcggccctgtaccggaaggtcaagctactgaaccaggtgcggctgttgagagtccagctgtgtcacatgaaaaacatgttcaagacttgcaggctcgccaaggagttactcgacagttttgatactgttcccggccacctgacggaggacttacatctttattccctgaacgacctgactgccactagaaaaggagagttaggcccccggctggctgaactgactcgcgcaggcgccactcacgtggagcggtgtatgctctgccaggccaaaggattcatttgtgagttctgccagaacgaggacgatatcattttccctttcgaattacacaaatgtcggacttgcgaggaatgcaaggcgtgctaccacaaggcttgttttaagagcggctcttgcccccggtgtgagagattgcaagccaggcgggaggctttggcgcggcagagtctggaatcctatcttagcgactacgaagaagagcccgctgaggccctggcacttgaggcggcagtgctcgaagccacttag

SEQ ID NO: 181593 - DNA, 2919 bp, Artificial Sequence
  derived and/or modified sequence
atgcgtccagagggagccggtatggagctgggcggtggcgaagaaaggttgcctgaagagtcccgaagagagcattggcagttactagggaacctcaaaacaaccgtcgaggggctggtttccactaatagtccaaacgtgtggtctaagtacggcggactagagagactttgccgggacatgcagtcaatcctctaccatggattaatacgcgatcaggcatgtaggaggcagacagactactggcagtttgtgaaagacattcgatggctgagtcctcactccgctctccacgtggagaaattcatttccgtgcacgaaaatgatcaatcctcagcagatggcgcttctgagagagccgttgccgagttgtggctccaacacagcctccagtatcattgcctgtctgcacaactgcgcccattgttgggagaccggcagtatattagaaaattttacacggacgctgcttttctactgtctgacgctcatgtgaccgctatgctgcagtgtctggaggccgtcgagcagaataacccacggttgcttgcacagatagatgcgagcatgtttgcgaggaagcatgagtcacccctactggtcactaagagtcagtctctgactgccttgccatcgtccacatacacaccacctaattcttatgctcagcatagctattttggctctttctcaagcctgcaccagtccgtccccaacaacggatccgaaaggaggtctacttctttcccattatccggaccccctcgtaaaccccaggagagtcgtggacacgtgtcacccgcagaggatcagaccattcaggctccacctgttagcgtttcggctcttgcccgtgatagtcccctgactcccaacgagatgagttcatcgactttgacatcccccatagaggctagctgggtgtcctcgcagaacgattctcccggtgatgcgagcgaaggtccagagtatctggctattgggaatctggatcctcggggaagaacagccagctgccagagccatagtagcaatgctgagtcgtcctcgtcaaacctcttctcctcaagctcctcgcagaaacctgatagcgctgccagcagcttgggcgaccaggagggcggaggcgagagccaactgtcttccgtgcttcgcagaagttctttctctgaggggcagactctgacggtgacatccggtgctaaaaaatcccacattcgcagccactcagatactagcattgcatctagaggcgctccagagtcatgcaatgataaagcaaagctaaggggacccctcccatactctggccagagttcagaggtgtctactcctagttcgctctacatggagtacgaaggcggtcggtatctatgttctggagaggggatgttccggagaccttcagaaggacagtccttaatctcctacctgtcagagcaggattttggctcttgtgcagatcttgaaaaggaaaacgctcacttctctatcagtgaatctttgatcgctgccatagagttgatgaaatgcaatatgatgagccagtgcttagaagaagaagaggtggaggaggaggactctgacagggaaattcaagaactgaaacagaagatcaggctgagacgccagcagatcaggacaaagaatttgctgcccatgtaccaggaagcagagcacggaagctttagagtcacttcttcatcatcccagttctcctcccgagactccgcccagctttccgactcgggaagtgcagacgaggttgacgagttcgagatccaggatgctgatatacgcaggaataccgcatcttccagcaagtcgtttgtaagctcccaatccttctctcattgtttcctccattccacctccgccgaggcggtcgctatgggactcttaaagcagttcgaagggatgcagctcccggctgccagcgaactagaatggctggtccccgagcatgatgcaccccagaagctcctcccaattcccgactctctacccattagcccagatgatggccagcacgccgatatctacaaactgaggatccgggttcgtgggaatctggaatgggctcctccaaggccccagattattttcaatgtgcacccggcacccaccagaaagatcgccgtagctaagcagaattatcgctgcgcgggttgtggtattaggaccgatccagattacataaaacgcctgaggtactgcgaatatctgggcaagtacttttgtcagtgctgtcatgagaacgcccaaatggcgattccttcgcgcgtgctgagaaagtgggacttttcgaagtactacgtctctaacttctccaaggatctgctaatcaaaatatggaatgaccctctcttcaatgtgcaggatataaactctgccctgtatagaaaggtcaagctgttgaaccaggtgaggcttctgcgggtacagctgtgtcacatgaagaatatgtttaaaacttgtagattagcaaaggaactgctcgactcctttgacacagtgccagggcatctcacagaggatctccacctctattccttaaatgatctgacggcgacacggaaaggcgagctggggcctagattggccgaattgactagagccggagcaacacatgtggaacgctgtatgctgtgccaagcaaaaggattcatctgtgaattttgtcagaatgaagacgatattatattcccttttgagctccataagtgccgaacatgcgaggagtgcaaggcctgctaccacaaggcatgcttcaagagcggtagttgcccacgctgcgaacgcctgcaggccaggcgagaagccctcgcgaggcaaagcctagagtcttacttaagcgactacgaagaggagcccgctgaagcactcgcccttgaagccgctgtgttagaggctacctag

SEQ ID NO: 181594 - DNA, 2919 bp, Artificial Sequence
  derived and/or modified sequence
atgcggccggagggcgcgggaatggagctcggaggcggcgaggagcgcctgcctgaggagagcaggagggagcactggcagttgctgggtaatttgaagacgacggtggagggtttggtatcaaccaacagccccaacgtctggtctaagtatggtggcttggagcggctttgcagggacatgcagagcatcctctatcacgggcttatccgtgaccaggcgtgccgccgccagacggattactggcagttcgtgaaagacatccggtggctcagtccccactcagcccttcacgtggagaagttcatcagcgtgcacgagaacgaccagagcagtgctgatggtgccagtgaacgtgctgttgccgagctgtggctgcagcacagcctgcagtaccactgcctctcagcccagctccggcccctgctcggggatagacagtatatcagaaaattctacacagatgctgccttcctgctaagtgacgctcatgtcacggccatgctgcagtgcctggaagcagtggaacagaacaacccccgcctcctggctcagatcgatgcgtccatgtttgccagaaagcacgagagcccgctcctggtgacaaagagccagagcctgacagccctgcccagttccacatacacccctccaaacagctatgctcagcattcctactttgggtccttctctagcctccaccaatccgtgcccaacaatggctcagagagaagatctacttcctttccactctctggccctccccggaaacctcaagaaagcagagggcacgtctcaccagcagaggatcaaaccatccaagcccccccagtttcagtctctgcactagccagggattcccctttgaccccaaatgaaatgagctccagtactctgaccagccccatagaggcatcctgggtcagcagccagaatgattccccaggtgatgccagtgaggggcctgagtacctggccattggcaacttggacccccgaggccggactgccagctgtcagagtcacagcagcaatgccgagagcagcagttccaatttgttctcctccagcagctcccagaagccagattctgctgcctcttccttaggggaccaggaaggaggtggggagagccagctgtccagtgtcctccgcaggtccagcttctcagaggggcagacactcactgtcaccagtggggcaaagaaaagccacattcgctcccattcggataccagcattgcctccaggggagctccagaatcctgcaatgataaggcgaagttgagaggccctttgccctactctggtcaaagcagtgaagtcagcacacccagctctctgtacatggaatatgaaggtggtcggtacctgtgctcaggggaaggcatgttccgaagaccatcagaaggacagtccctcatcagctacctctctgagcaagacttcggcagctgtgccgacctggaaaaggagaatgcccacttcagcatctcagagtccttaattgctgccatcgagctaatgaagtgcaacatgatgagccagtgcctagaggaggaggaagtggaagaggaagacagtgatagagagatccaggagctgaagcagaagatccgccttcggcgccagcaaatccgcaccaagaacctgctccccatgtaccaggaggctgagcacggaagctttcgggtcacctccagcagctcccagttcagctcacgtgattcggcacagctctctgactctggctctgctgatgaggttgatgaatttgaaatccaagatgctgacatcagaaggaacacagcctcaagcagcaaatccttcgtttcctcccagtccttctcccactgcttcctgcactccacgtctgctgaggcggtggccatggggctcctgaagcagtttgaggggatgcagcttccagccgcctcggagctggagtggcttgtcccggagcatgatgcccctcagaagctcctgcccattcctgactcactgcccatctcaccggatgacgggcagcacgctgacatctacaagctgcggattcgtgttcgtggcaacttggagtgggccccgccccggcctcagataatttttaatgttcatccagccccaacgaggaaaattgccgtggccaagcagaattaccgctgtgcaggatgtggcatccggactgaccctgattacatcaagcgactgcggtactgtgagtacctgggcaagtacttctgccagtgctgccacgagaatgcccagatggccatccccagccgggttctgcgcaagtgggacttcagcaagtactacgtcagcaacttctccaaggacctgctcattaagatctggaatgatcctctcttcaacgtgcaggacataaacagtgccctctataggaaggtcaagctgctcaatcaagtccggctgctgcgggtccagctgtgtcacatgaagaacatgttcaagacttgccgactggccaaggagcttctggattcctttgacacagtcccaggccacctgacagaggacctccacctgtactcactgaatgacctgactgcgaccaggaagggggagctggggccccggcttgctgagctcaccagggcaggggctacccatgtggagagatgcatgctctgccaagccaaaggcttcatctgtgagttctgtcagaatgaggatgacatcatctttccctttgagctccataagtgccggacctgtgaagagtgtaaagcgtgttaccataaagcctgcttcaagtctggaagctgtccgcgctgcgagcggctgcaggcccggcgggaggcactggccaggcagagcctggagtcttacctgtcagactacgaggaggagcccgcggaagcgctggccctggaagccgccgtcctggaggccacctga

SEQ ID NO: 181595 - DNA, 2919 bp, Artificial Sequence
  derived and/or modified sequence
atgagacccgagggcgccggcatggagctgggcggcggcgaggagagactgcccgaggagagcagaagagagcactggcagctgctgggcaacctgaagaccaccgtggagggcctggtgagcaccaacagccccaacgtgtggagcaagtacggcggcctggagagactgtgcagagacatgcagagcatcctgtaccacggcctgatcagagaccaggcctgcagaagacagaccgactactggcagttcgtgaaggacatcagatggctgagcccccacagcgccctgcacgtggagaagttcatcagcgtgcacgagaacgaccagagcagcgccgacggcgccagcgagagagccgtggccgagctgtggctgcagcacagcctgcagtaccactgcctgagcgcccagctgagacccctgctgggcgacagacagtacatcagaaagttctacaccgacgccgccttcctgctgagcgacgcccacgtgaccgccatgctgcagtgcctggaggccgtggagcagaacaaccccagactgctggcccagatcgacgccagcatgttcgccagaaagcacgagagccccctgctggtgaccaagagccagagcctgaccgccctgcccagcagcacctacaccccccccaacagctacgcccagcacagctacttcggcagcttcagcagcctgcaccagagcgtgcccaacaacggcagcgagagaagaagcaccagcttccccctgagcggcccccccagaaagccccaggagagcagaggccacgtgagccccgccgaggaccagaccatccaggccccccccgtgagcgtgagcgccctggccagagacagccccctgacccccaacgagatgagcagcagcaccctgaccagccccatcgaggccagctgggtgagcagccagaacgacagccccggcgacgccagcgagggccccgagtacctggccatcggcaacctggaccccagaggcagaaccgccagctgccagagccacagcagcaacgccgagagcagcagcagcaacctgttcagcagcagcagcagccagaagcccgacagcgccgccagcagcctgggcgaccaggagggcggcggcgagagccagctgagcagcgtgctgagaagaagcagcttcagcgagggccagaccctgaccgtgaccagcggcgccaagaagagccacatcagaagccacagcgacaccagcatcgccagcagaggcgcccccgagagctgcaacgacaaggccaagctgagaggccccctgccctacagcggccagagcagcgaggtgagcacccccagcagcctgtacatggagtacgagggcggcagatacctgtgcagcggcgagggcatgttcagaagacccagcgagggccagagcctgatcagctacctgagcgagcaggacttcggcagctgcgccgacctggagaaggagaacgcccacttcagcatcagcgagagcctgatcgccgccatcgagctgatgaagtgcaacatgatgagccagtgcctggaggaggaggaggtggaggaggaggacagcgacagagagatccaggagctgaagcagaagatcagactgagaagacagcagatcagaaccaagaacctgctgcccatgtaccaggaggccgagcacggcagcttcagagtgaccagcagcagcagccagttcagcagcagagacagcgcccagctgagcgacagcggcagcgccgacgaggtggacgagttcgagatccaggacgccgacatcagaagaaacaccgccagcagcagcaagagcttcgtgagcagccagagcttcagccactgcttcctgcacagcaccagcgccgaggccgtggccatgggcctgctgaagcagttcgagggcatgcagctgcccgccgccagcgagctggagtggctggtgcccgagcacgacgccccccagaagctgctgcccatccccgacagcctgcccatcagccccgacgacggccagcacgccgacatctacaagctgagaatcagagtgagaggcaacctggagtgggccccccccagaccccagatcatcttcaacgtgcaccccgcccccaccagaaagatcgccgtggccaagcagaactacagatgcgccggctgcggcatcagaaccgaccccgactacatcaagagactgagatactgcgagtacctgggcaagtacttctgccagtgctgccacgagaacgcccagatggccatccccagcagagtgctgagaaagtgggacttcagcaagtactacgtgagcaacttcagcaaggacctgctgatcaagatctggaacgaccccctgttcaacgtgcaggacatcaacagcgccctgtacagaaaggtgaagctgctgaaccaggtgagactgctgagagtgcagctgtgccacatgaagaacatgttcaagacctgcagactggccaaggagctgctggacagcttcgacaccgtgcccggccacctgaccgaggacctgcacctgtacagcctgaacgacctgaccgccaccagaaagggcgagctgggccccagactggccgagctgaccagagccggcgccacccacgtggagagatgcatgctgtgccaggccaagggcttcatctgcgagttctgccagaacgaggacgacatcatcttccccttcgagctgcacaagtgcagaacctgcgaggagtgcaaggcctgctaccacaaggcctgcttcaagagcggcagctgccccagatgcgagagactgcaggccagaagagaggccctggccagacagagcctggagagctacctgagcgactacgaggaggagcccgccgaggccctggccctggaggccgccgtgctggaggccacctag

SEQ ID NO: 181596 - protein, 828 aa, Artificial Sequence
  derived and/or modified sequence
MNSDQDVALKLAQERAEIVAKYDRGREGAEIEPWEDADYLVYKVTDRFGFLHEEELPDHNVAVERQKHLEIERTTKWLKMLKGWEKYKNTEKFHRRIYKGIPLQLRGEVWALLLEIPKMKEETRDLYSKLKHRARGCSPDIRQIDLDVNRTFRDHIMFRDRYGVKQQSLFHVLAAYSIYNTEVGYCQGMSQITALLLMYMNEEDAFWALVKLFSGPKHAMHGFFVQGFPKLLRFQEHHEKILNKFLSKLKQHLDSQEIYTSFYTMKWFFQCFLDRTPFTLNLRIWDIYIFEGERVLTAMSYTILKLHKKHLMKLSMEELVEFFQETLAKDFFFEDDFVIEQLQISMTELKRAKLDLPEPGKEDEYPKKPLGQLPPELQSWGVHHLSNGQRSVGRPSPLASGRRESGAPHRRHEHSPHPQSRTGTPERAQPPRRKSVEEESKKLKDEADFQRKLPSGPQDSSRQYNHAAANQNSNATSNIRKEFVPKWNKPSDVSATERTAKYTMEGKGRAAHPALAVTVPGPAEVRVSNVRPKMKALDAEDGKRGSTASQYDNVPGPELDSGASVEEALERAYSQSPRHALYPPSPRKHAEPSSSPSKVSNKFTFKVQPPSHARYPSQLDGEARGLAHPPSYSNPPVYHGNSPKHFPTANSSFASPQFSPGTQLNPSRRPHGSTLSVSASPEKSYSRPSPLVLPSSRIEVLPVDTGAGGYSGNSGSPKNGKLIIPPVDYLPDNRTWSEVSYTYRPETQGQSWTRDASRGNLPKYSAFQLAPFQDHGLPAVSVDSPVRYKASPAAEDASPSGYPYSGPPPPAYHYRNRDGLSIQESVLL

SEQ ID NO: 181597 - DNA, 2487 bp, Artificial Sequence
  derived and/or modified sequence
atgaacagcgaccaggacgtggccctgaagctggcccaggagagagccgagatcgtggccaagtacgacagaggcagagagggcgccgagatcgagccctgggaggacgccgactacctggtgtacaaggtgaccgacagattcggcttcctgcacgaggaggagctgcccgaccacaacgtggccgtggagagacagaagcacctggagatcgagagaaccaccaagtggctgaagatgctgaagggctgggagaagtacaagaacaccgagaagttccacagaagaatctacaagggcatccccctgcagctgagaggcgaggtgtgggccctgctgctggagatccccaagatgaaggaggagaccagagacctgtacagcaagctgaagcacagagccagaggctgcagccccgacatcagacagatcgacctggacgtgaacagaaccttcagagaccacatcatgttcagagacagatacggcgtgaagcagcagagcctgttccacgtgctggccgcctacagcatctacaacaccgaggtgggctactgccagggcatgagccagatcaccgccctgctgctgatgtacatgaacgaggaggacgccttctgggccctggtgaagctgttcagcggccccaagcacgccatgcacggcttcttcgtgcagggcttccccaagctgctgagattccaggagcaccacgagaagatcctgaacaagttcctgagcaagctgaagcagcacctggacagccaggagatctacaccagcttctacaccatgaagtggttcttccagtgcttcctggacagaacccccttcaccctgaacctgagaatctgggacatctacatcttcgagggcgagagagtgctgaccgccatgagctacaccatcctgaagctgcacaagaagcacctgatgaagctgagcatggaggagctggtggagttcttccaggagaccctggccaaggacttcttcttcgaggacgacttcgtgatcgagcagctgcagatcagcatgaccgagctgaagagagccaagctggacctgcccgagcccggcaaggaggacgagtaccccaagaagcccctgggccagctgccccccgagctgcagagctggggcgtgcaccacctgagcaacggccagagaagcgtgggcagacccagccccctggccagcggcagaagagagagcggcgccccccacagaagacacgagcacagcccccacccccagagcagaaccggcacccccgagagagcccagccccccagaagaaagagcgtggaggaggagagcaagaagctgaaggacgaggccgacttccagagaaagctgcccagcggcccccaggacagcagcagacagtacaaccacgccgccgccaaccagaacagcaacgccaccagcaacatcagaaaggagttcgtgcccaagtggaacaagcccagcgacgtgagcgccaccgagagaaccgccaagtacaccatggagggcaagggcagagccgcccaccccgccctggccgtgaccgtgcccggccccgccgaggtgagagtgagcaacgtgagacccaagatgaaggccctggacgccgaggacggcaagagaggcagcaccgccagccagtacgacaacgtgcccggccccgagctggacagcggcgccagcgtggaggaggccctggagagagcctacagccagagccccagacacgccctgtacccccccagccccagaaagcacgccgagcccagcagcagccccagcaaggtgagcaacaagttcaccttcaaggtgcagccccccagccacgccagataccccagccagctggacggcgaggccagaggcctggcccacccccccagctacagcaacccccccgtgtaccacggcaacagccccaagcacttccccaccgccaacagcagcttcgccagcccccagttcagccccggcacccagctgaaccccagcagaagaccccacggcagcaccctgagcgtgagcgccagccccgagaagagctacagcagacccagccccctggtgctgcccagcagcagaatcgaggtgctgcccgtggacaccggcgccggcggctacagcggcaacagcggcagccccaagaacggcaagctgatcatcccccccgtggactacctgcccgacaacagaacctggagcgaggtgagctacacctacagacccgagacccagggccagagctggaccagagacgccagcagaggcaacctgcccaagtacagcgccttccagctggcccccttccaggaccacggcctgcccgccgtgagcgtggacagccccgtgagatacaaggccagccccgccgccgaggacgccagccccagcggctacccctacagcggcccccccccccccgcctaccactacagaaacagagacggcctgagcatccaggagagcgtgctgctgtag

SEQ ID NO: 181598 - DNA, 2487 bp, Artificial Sequence
  derived and/or modified sequence
atgaatagcgatcaggacgttgcactgaagcttgcgcaggagagggcagaaattgtcgccaagtacgacagaggacgggagggggccgagatcgagccctgggaagacgccgattatctggtttataaggttaccgatagattcggtttcctacatgaggaggaactgcccgaccacaatgttgcggtcgagcgtcaaaaacacctggagattgagcgtacaactaagtggctgaagatgctgaaaggatgggaaaagtacaaaaatactgaaaaattccacaggagaatatataaaggaattccgctgcagctgaggggggaggtgtgggccctcctgctggaaatccccaagatgaaggaagaaacaagggacttgtactcgaagcttaagcaccgggctcgaggatgttcacccgatatccgccaaattgatttggacgtcaatagaacttttcgggaccacatcatgttcagggatagatacggcgtgaagcagcaatccctcttccatgtcctggcagcatacagcatctacaacaccgaggtagggtattgccagggcatgtcacagataactgctttgttattaatgtacatgaacgaggaagatgccttttgggccttagtaaagctgtttagcgggccaaaacatgccatgcacggttttttcgtgcaaggatttcctaaattgctccgcttccaagaacatcatgaaaagattcttaacaagtttttgtcaaaattgaagcaacaccttgatagccaggagatatacacctcgttctataccatgaaatggttcttccaatgttttttagaccgaacaccgttcacactgaaccttcgtatctgggatatctacattttcgagggggaaagggtgctgacagccatgtcctatacaatcttgaaactccataagaagcacctcatgaaattgagcatggaggaactggtagaatttttccaggagacccttgcaaaagacttcttctttgaggatgactttgtgattgagcaactgcagatctccatgacagagctgaagagagccaagctggatctgccggagcccggtaaagaagacgagtatcctaagaaaccactggggcaactaccgcccgaactgcaatcctggggagtgcatcacttgtccaacggacagcgtagtgtcgggagaccttcaccattagcttccggccgaagagagagcggtgcgccccaccgccgacacgagcattccccacatcctcagtctaggaccggcactcctgagagggctcagcccccaagacgaaagtccgtagaggaagaatccaagaagttgaaagatgaagcagacttccagcgcaagctgcccagcggccctcaggatagtagtcgtcagtataatcatgccgccgcaaaccagaattccaatgcaaccagtaacatacggaaagaatttgttcctaaatggaataaacccagcgatgtgagcgctaccgagcggacggctaagtacacaatggagggaaaaggtcgggcagctcatccagcgctggccgtgacggtcccaggtcctgcagaagtgcgggtatccaacgttagaccaaaaatgaaagctctggatgctgaggacggaaaacggggcagcacagcctcacagtacgataatgttccaggtccagaactggactcaggtgcctccgtggaggaggcattggaacgagcgtattctcagtcaccgagacacgcactgtacccaccatcccctcggaagcacgccgagccaagctcttcaccgtccaaggttagcaacaagtttacattcaaagtgcagccacccagtcacgcccgatatccgagccaactggacggagaggcccggggcctggcccatccgccctcatattctaatcctcctgtgtatcacggcaactctcccaaacattttccgactgccaactccagctttgctagcccgcagtttagccctggtacacaactcaatccctctcggagaccccacggaagtacactctcagtttccgcctcacctgagaagagctactctcggccttctccactggtactacctagcagccgaatcgaggtccttcccgtggatacaggtgcaggcggttactccggcaacagtgggtctcccaagaacggtaagctgattatcccccctgtggactacctccctgataacagaacctggtctgaggtgtcatatacctatagacccgagacccaaggccagtcctggactagggatgcctccagaggaaacctcccaaagtatagcgcttttcagctggctccattccaagaccatgggttgccggccgtatccgtggactcacccgttcgctacaaggcgagcccagcagcagaggatgcgtcgccctcgggctatccatactctggccctcctccccctgcataccactaccgaaatcgggacgggttgtctatacaggagtccgtcttactttag

SEQ ID NO: 181599 - DNA, 2487 bp, Artificial Sequence
  derived and/or modified sequence
atgaacagcgaccaggacgtggcgctaaaactggcccaggagcgcgccgagatcgtggcgaagtacgatcggggcagagagggcgctgagattgagccttgggaagacgcagactatctcgtttacaaagttacagacagattcgggtttctgcacgaggaagagttgccagatcataacgtcgcagtcgagcgccagaagcacctcgagatagagcggaccactaagtggctcaaaatgctgaaagggtgggaaaaatataagaacacggaaaaattccatcgccgtatttataaagggattccactacaactgcggggggaggtgtgggccctgctgcttgaaatccccaagatgaaagaggaaactagggatctgtattcaaagctgaagcatcgcgcaaggggctgctctcctgatatcaggcaaatagaccttgacgtgaataggaccttccgggatcatataatgttccgggatagatatggtgtaaagcagcagtctctctttcatgtgctggcagcctacagcatctataacacagaggtgggctactgccagggcatgagccagatcacggccctgctgttgatgtacatgaacgaggaagatgctttctgggccttagtcaaactgttctcaggcccaaaacacgcaatgcacgggttctttgtgcagggctttcccaagctgttgcgctttcaggagcatcacgaaaagatcctgaataaattcctgagtaaattgaagcagcatcttgactctcaggagatctacaccagcttctacactatgaaatggtttttccagtgtttcctggatcggactccattcactttgaatctgaggatctgggacatttatatcttcgagggggaaagagtgctcacagccatgtcctatactatcctgaagctccacaaaaaacacctgatgaagttatctatggaggaactcgtggaattcttccaggagaccttggcgaaagacttcttttttgaggatgacttcgttatcgagcagctgcagatctcaatgactgaactgaaaagggccaaattggatctgcctgagccggggaaggaggatgagtatccaaagaaacccctgggccagttaccacccgagctgcaaagctggggcgttcaccacctctccaatggtcagcggtccgttggccggccatcacccctcgctagcggcaggagagagagtggagctcctcacaggcgacatgaacacagcccacatccgcagtcacgcacaggcaccccagaaagagcccagccccctcgaagaaagtcggttgaggaggaatccaagaagctcaaggacgaagctgactttcagagaaaactccccagtggacctcaggatagcagcagacaatataatcatgcagcggctaatcagaacagtaatgctactagtaacattcgaaaggaatttgttcctaagtggaacaaaccatccgatgtatccgctacggaacgtactgctaaatataccatggaaggcaagggaagggctgcacacccagcgctggcagtgacagtacctggacctgccgaagtgcgcgtgagcaatgtacggcctaagatgaaagccctggatgcagaagacggcaaaagggggagtactgcgtcccagtacgataatgtgccaggccccgagctggattctggggcgtctgttgaagaggcactcgaaagagcctactcacaaagtcccagacacgccctttatccaccaagcccaaggaaacacgccgagccatccagcagcccaagtaaagtctcaaataaattcaccttcaaagttcaacccccctcccatgctcggtatccaagtcagctggatggagaagcgcgtgggctagcccatcctccttcctacagcaaccctcccgtgtaccacggcaactctcccaagcactttccgactgccaatagcagcttcgcctcacctcagttttctcctgggactcagctgaaccccagcaggagacctcacgggtcaacactgtctgtgtctgcaagtccagaaaaaagctattcacgaccatctccactcgtgctccccagttctcgaatcgaggttctccctgtggataccggagccggaggctactcagggaattcagggagccccaagaacggcaaacttattattccacctgttgattatctccccgataatagaacatggagcgaggtaagttacacttacaggcccgagacccagggccaatcctggactcgggacgccagtcgggggaacctgcccaagtactctgcattccagctggccccttttcaggaccatggtctacctgcggtttcagtcgatagccccgtgcgatataaagcctcgcctgcagctgaggacgcaagccccagtggatatccctactcgggaccgccacctcccgcctatcactaccggaaccgcgacgggttatctatccaggaatctgtacttctgtag

SEQ ID NO: 181600 - DNA, 2487 bp, Artificial Sequence
  derived and/or modified sequence
atgaacagcgaccaggatgtggccctgaagctggcccaggagcgggcagagatcgtggccaagtatgaccggggccgggagggcgctgagattgagccctgggaggatgctgactacctggtgtacaaggtgacagaccgcttcggcttcctgcacgaggaggagctgcctgaccacaacgtggccgtggagcggcagaagcacctggagattgaaagaaccaccaagtggctgaagatgctgaagggctgggagaagtacaagaacacagagaagttccaccggcgcatctacaagggcatccccctgcagctgcggggggaggtgtgggccctgctgctggagatccccaagatgaaggaggagacccgggacctgtacagcaagctgaagcaccgggcccggggctgcagcccagacatccggcagattgacctggatgtgaacagaaccttccgggaccacatcatgttccgggacagatatggagtgaagcagcagagcctcttccacgtgctggccgcctacagcatctacaacacagaggtgggctactgccagggcatgagccagatcacagccctgctgctgatgtacatgaatgaagaagatgccttctgggccctggtgaagctgttcagcggccccaagcacgccatgcacggcttctttgtgcagggcttccccaagctgctgcgcttccaggagcaccacgagaagatcctgaacaagttcctgagcaagctgaagcagcacctggacagccaggagatctacaccagcttctacaccatgaagtggttcttccagtgcttcctggacaggacccccttcaccctgaacctgcgcatctgggacatctacatctttgaaggagagcgggtgctgacagccatgagctacaccatcctgaagctgcacaagaagcacctgatgaagctgtccatggaggagctggtggagttcttccaggagaccctggccaaggacttcttctttgaagatgactttgtgattgagcagctgcagatctccatgacagagctgaagagggccaagctggacctgcctgagcccgggaaggaggatgagtaccccaagaagcccctgggccagctgcccccagagctgcagagctggggcgtgcaccacctgagcaatggccagaggtctgtgggccggcccagccccctggccagcggccggcgggagagcggggccccccacagaagacatgagcacagcccccacccccagagcaggacaggcaccccagagcgggcccagccccccaggaggaagtctgtggaggaggagagcaagaagctgaaggatgaagctgacttccagaggaagctgcccagcggcccccaggacagcagccggcagtacaaccacgccgccgccaaccagaacagcaatgccaccagcaacatcaggaaggagtttgtgcccaagtggaacaagcccagtgatgtgtctgccacagagaggacagccaagtacaccatggagggcaagggccgggccgcccacccagccctggccgtgacagtgcccggccctgctgaggtgcgggtgtccaatgtgcggcccaagatgaaggccctggatgctgaagatggcaagaggggcagcacagccagccagtatgacaacgtgcccggccctgagctggacagcggggcctctgtggaggaggccctggagcgggcctacagccagagccccaggcatgccctgtacccacccagccccaggaagcacgccgagcccagcagcagccccagcaaggtgagcaacaagttcaccttcaaggtgcagccccccagccacgcccgctaccccagccagctggatggagaggcccggggcctggcccaccccccatcctacagcaacccccctgtgtaccacggcaacagccccaagcacttccccacagccaacagcagctttgccagcccccagttcagccctggcacccagctgaaccccagccggcggccccacggcagcaccctgtctgtgtctgccagccctgagaagagctacagccggcccagccccctggtgctgcccagcagccgcatcgaggtgctgcctgtggacacaggagctgggggctacagcggcaacagcggcagccccaagaatggcaagctgatcatcccccctgtggactacctgcctgacaacagaacctggagcgaggtgtcctacacctacagacctgagacccagggccagagctggaccagagatgccagccggggcaacctgcccaagtacagcgccttccagctggcccccttccaggaccacggcctgcctgctgtgtctgtggacagccctgtgcgctacaaggccagccctgctgctgaagatgccagccccagcggctacccctacagcggccccccacctccagcctaccactacagaaacagagatggcctgagcatccaggagagcgtgctgctgtag

SEQ ID NO: 181601 - DNA, 2487 bp, Artificial Sequence
  derived and/or modified sequence
atgaacagcgaccaggacgtggccctgaagctggcccaggagcgggccgagatcgtcgcaaagtatgatagagggagggagggcgcggaaatcgaaccctgggaagatgcagattacctcgtttacaaagttacagaccgttttggcttcctgcatgaggaagagctgcctgatcataacgtcgccgtcgaacggcagaagcatctagaaatcgaaagaaccactaagtggctgaagatgctcaagggatgggaaaagtataagaacacagagaaattccataggaggatctacaagggaattccccttcagctgcggggtgaggtgtgggccctcttgttggagatccccaaaatgaaggaggagacccgggatctgtactcaaagctcaagcacagggcgaggggctgcagtcctgacatcagacagatcgacctagacgtgaacagaacgtttcgcgatcacataatgttcagggatcggtatggggtcaagcagcaatctctgttccatgtcctggccgcatactctatctacaatacagaagtaggctattgccagggcatgagtcagatcactgccctgttgctcatgtatatgaatgaggaggacgctttttgggcactggtcaagctgttcagcgggcccaagcacgcgatgcatgggttcttcgtccaagggttccctaaactcctccgcttccaggagcatcatgaaaagatcttgaacaagttcctctctaagctaaaacagcaccttgattcacaggaaatctataccagtttctatactatgaaatggttcttccagtgtttcctggacaggacacccttcacccttaacttgcgtatttgggatatttacattttcgagggcgagcgcgtcctgaccgccatgtcttatactatcctgaaactgcacaagaagcacctcatgaagctatccatggaggagctcgttgagttcttccaagagacattagctaaggacttcttttttgaggatgacttcgtcattgagcagctgcaaatatccatgacggaactgaagcgggcaaagctggaccttcccgagccaggaaaggaggacgaatatcctaaaaagccactggggcagcttccccctgaactccagtcgtggggcgttcatcacctgtccaatgggcagaggtctgtgggccgcccttcacctttggcttctggaaggcgagaatccggagcaccacaccggcgccacgagcactcacctcacccccagagccggacaggcactcctgagcgtgcacaaccccctaggagaaaatctgtggaagaggagtccaagaagttgaaggacgaagctgactttcaaaggaaactccctagcgggccacaggactcatctcgccagtataatcacgccgccgccaatcagaacagcaatgctactagcaacattcgtaaagagtttgttccaaagtggaacaagccctctgacgtgtccgctacagagcggaccgcaaagtacacaatggaaggcaaaggacgggccgcccaccctgctctggctgtgaccgttcctggacctgccgaggtgagagtcagtaacgttaggcctaagatgaaggctctggacgccgaggacgggaagcggggcagtacagcaagtcagtacgacaatgtgcctggccccgaactcgactcaggcgcctctgttgaagaggccctcgagagggcatactcgcagagcccgagacatgcactgtacccaccatccccaagaaaacatgccgaaccttcctctagtcctagtaaggtgagtaataaatttacattcaaggtccagccaccgagccacgcaaggtaccccagccagctggatggagaggctcggggactggcccacccaccatcctatagcaacccccccgtttaccacgggaattctcctaagcatttccctaccgctaacagctctttcgcaagcccacagttcagccccggtacacaactcaaccccagcaggaggcctcatgggagcaccctctctgtatctgccagtcctgagaagagctattctcgtcccagcccactggtgttaccgagctctaggattgaagtgctacctgtcgataccggcgccggcgggtactctggcaattccggctcccccaagaatggtaaactcatcattcccccggtcgattacttacccgataatcgaacctggagtgaggtgtcatatacatacagacctgagactcagggccaaagctggactcgtgatgcatccagaggtaatcttcccaaatactccgccttccagctagctccattccaggaccacggcctccccgcggtttccgtcgatagtccagtgcggtacaaggcttccccagctgccgaggacgcctcaccatccgggtacccttactccgggcctccaccacctgcttaccactaccggaatcgagacggactctcaatccaagagagcgttttgctgtag

SEQ ID NO: 181602 - DNA, 2487 bp, Artificial Sequence
  derived and/or modified sequence
atgaacagcgaccaggacgtggccctgaagctggcccaggagcgggccgagatcgtggctaagtacgaccggggacgggagggtgccgagattgaaccatgggaagacgctgactatctggtctataaggtgaccgatcggtttgggtttcttcacgaagaggagttgccagatcacaacgtggcggttgaaaggcagaaacatctcgagattgaacgcacgaccaaatggttgaagatgctaaaggggtgggaaaaatacaagaacacggagaagttccacaggaggatctacaaggggatccctttgcaattacggggagaggtgtgggcattactcttggaaatacctaagatgaaggaagagacgcgcgacctttactcaaaacttaaacaccgagctcgcggctgttcccctgacatccgccagatcgacttagacgtaaacaggacctttcgagatcacattatgtttcgggatagatacggcgtcaagcagcagtccctgttccacgtgctggccgcctattctatctataacactgaggttgggtattgccaggggatgagccagatcaccgctctcttgctgatgtatatgaacgaagaggatgcgttctgggcattggttaagctattctctggtcctaagcacgcgatgcacggcttctttgtgcaggggttcccaaagttgctcagatttcaggaacaccacgaaaagatcttaaataagttcctctccaagttgaagcagcatctcgattcacaggagatctataccagcttttatacaatgaagtggttcttccagtgcttcctcgaccgaacaccattcacccttaatttgcggatatgggatatctacatcttcgaaggagaaagggtgttaactgcaatgtcttacacaatacttaaattgcataaaaagcacctcatgaagctgagtatggaggagttggttgagttttttcaggagactctggcaaaagacttcttcttcgaggatgattttgtgatcgagcagctgcagatatccatgaccgagttgaaaagggcgaaacttgatttaccagaaccaggaaaggaggacgaatatcctaagaagccactcggtcagctccctcctgagttgcaatcttggggggtccatcatctgtccaatggacaaagatctgtaggcagacccagtccccttgcaagcgggcgtcgagagtccggggccccacatcggcgccacgagcatagcccccatcctcagtccaggaccggaacccctgagcgcgctcagcccccaagacggaagagcgtggaggaggagagtaagaaactgaaagacgaggcagactttcagagaaagctgccctctgggccccaggatagctctagacagtataaccacgcggctgccaatcaaaacagcaacgcgaccagcaatatccgcaaagaatttgtgccaaaatggaacaaacccagtgatgtctctgccaccgagaggaccgccaaatacaccatggaaggcaagggacgtgcggctcacccggccctcgctgttactgtgcccggaccggccgaggtccgtgtgtcaaacgtaaggcccaagatgaaagcacttgatgctgaggatggcaagagaggctctaccgctagccagtatgataacgtgcccggacctgagttggatagcggcgcaagcgtagaggaggctctcgagcgggcttactctcaaagtcctcggcatgccctgtacccacctagccctcgcaagcatgctgaaccttcctcttctccctccaaagtgagcaacaagttcacatttaaggtacagcccccgtctcacgctaggtatccttcacagttggatggagaagcccgcggactggctcacccacctagttatagcaacccaccggtgtaccacggcaatagccccaaacactttcctacggctaactcttcctttgcttctcctcagttctcacctgggacacagctcaaccctagccgtcgtccacacggatccaccctgtctgtatccgcatcacctgagaagtcctacagtcgacccagccctctggtgcttccgagtagtcgaatcgaggtactccctgtcgatactggagccggagggtatagcgggaacagcgggtcccctaagaatggcaagctgattattccacccgtggattatctccctgacaacaggacctggagcgaggtttcctacacatacaggccggaaactcaagggcagtcatggactagggatgcttccagaggaaaccttcccaaatacagtgcgttccagctggccccttttcaggatcacggccttcccgccgtaagtgtcgactcacctgtcaggtacaaggcctcaccggccgctgaggatgcctctccaagcgggtatccatactccggccccccgcctccagcttaccactaccggaacagagacggtctttctatacaggagtcagtcctactttag

SEQ ID NO: 181603 - DNA, 2487 bp, Artificial Sequence
  derived and/or modified sequence
atgaattcggatcaagatgtcgcactcaaattggcccaggaaagggctgagatcgtagctaagtacgatcgcggtcgcgagggggctgagatagaaccttgggaagacgccgattatttagtgtacaaagtgactgaccggtttggcttcctgcacgaggaggagctgcctgaccacaatgtcgccgtggaacgtcaaaagcatctcgagatcgaaagaactaccaagtggctgaagatgcttaaggggtgggagaagtacaagaatactgagaagtttcacagacgcatctacaagggcattcccctgcagttaaggggggaagtctgggctctgcttctggaaatacccaaaatgaaagaagaaacgcgggacctctacagcaaactaaaacaccgtgcccgtgggtgttcacctgacattcgccagatcgatctggacgtcaaccggacgttccgggatcacatcatgtttcgcgaccgatacggcgtaaagcagcagtccctgttccacgttctggccgcatacagcatttataacacggaagttgggtactgtcagggcatgagccagataaccgctcttctacttatgtacatgaacgaggaggatgccttctgggccctcgtaaagttgtttagtgggcctaaacacgctatgcatgggttctttgtgcaggggttccccaagcttctgaggtttcaagagcatcacgaaaaaatcttgaataaattcctgtcgaaactgaagcagcatctcgattctcaggagatctacacctctttctacacaatgaaatggttttttcagtgtttcctggacagaactccattcacattgaatctgcgaatctgggatatatatatcttcgaaggggaaagagtgctcaccgccatgtcctataccattctgaaattacacaaaaaacatctcatgaagctgtctatggaggagcttgtggagttcttccaagaaacccttgccaaggatttcttcttcgaggatgacttcgtgatcgagcaactccaaattagtatgactgaactcaaacgggcaaaacttgacttacctgagcctgggaaggaagacgagtacccaaagaaaccgctgggccagctgcccccagaattgcagtcctggggagtgcaccacctgtccaacgggcagagatcagtgggcaggccctcgcccctggcctctggacgcagagagtcaggggctccacataggaggcacgaacacagcccgcatccacagtcccgcactggcacccctgagagggcacagcctcctaggcggaaatcagtggaggaggaaagcaagaaactcaaggatgaggcagatttccagcgcaaactgccatctggcccacaggactcgagcaggcagtataatcacgctgcagctaatcagaacagcaacgcgacctcaaacatacgcaaggagttcgtcccaaaatggaacaaaccatccgatgtcagtgcgaccgagaggacggcaaagtacaccatggagggcaaaggaagggcggcacacccagcactcgccgtgactgtgcccggacccgctgaggtgagggtaagcaacgtgcgcccaaaaatgaaggctctggatgccgaagacggtaaaagaggtagtactgcttcgcagtatgacaatgtccccggaccagagcttgattccggggctagcgtcgaagaagccctggaaagggcctactcccagtcccctagacacgcactgtatccaccgagcccaaggaaacacgcggagcctagcagctccccgtcaaaagtatctaataaatttacattcaaggtccagcctccgtcccacgctagatacccttcacagctggacggagaggctcggggtctggcccatcccccatcttatagcaatccacccgtttatcacgggaactctccaaaacactttcccacagctaatagcagttttgccagcccccaattctcccccggtacacagctgaatcctagccgcagacctcacggctcgactttgtctgtatccgcctcaccagagaaatcctatagcaggccgtctcctctggtactgccttcttctcgaatagaagtcctgccagttgacaccggtgccggaggctattcaggcaattccggctcccccaaaaacggcaagctgattatcccgccagtggactacttaccagacaatcgcacttggtcagaggtctcgtacacttatcgtccggagacacaggggcagtcatggacacgcgacgcatccagaggcaaccttcctaaatactcagccttccagcttgctccatttcaggatcatggtctccccgctgtgtccgtggattctccagtccgttataaagcatctccggctgcggaggacgcttcgcctagtggctatccatactcaggaccccctccacctgcttaccactatcgtaatcgagacggcctgtctattcaggagtcggtgctgctgtag

SEQ ID NO: 181604 - DNA, 2487 bp, Artificial Sequence
  derived and/or modified sequence
atgaatagtgatcaggacgttgccctgaagctggcgcaggaacgggctgagatcgtggccaagtacgacagggggagagagggagctgagatcgaaccatgggaggacgcagattacctggtgtacaaagtgactgaccgctttggctttctccacgaggaagagcttcccgaccacaacgtagctgtggagaggcagaagcatttagaaattgagagaaccacgaagtggctgaaaatgctgaaaggctgggaaaagtataaaaacaccgaaaaatttcatcggagaatatataaagggatccccctgcagcttaggggcgaggtgtgggcactgcttctcgagatccctaagatgaaggaagaaactagagacctatacagtaaactcaaacatagagccagaggctgctcaccagacatccggcaaattgacttggacgtcaatagaaccttccgggatcacataatgtttcgcgataggtatggggtgaaacaacaatccctgtttcacgtcctggcggcatattctatctataatactgaggttggctattgtcaagggatgtcacagattaccgctcttttgctgatgtacatgaacgaagaagatgctttctgggccctggtgaagctcttttccggccctaaacacgctatgcacgggttcttcgtgcaaggatttcctaaattactcaggttccaggaacaccatgaaaagattttaaataagttcttgtcaaaactgaagcaacatctggattctcaggagatttatacctctttttataccatgaagtggttcttccagtgcttcctcgaccgaactccttttaccctgaatttgcggatctgggacatttacatcttcgagggcgagagggtgctgacagctatgtcctacacaattttgaagctgcacaaaaaacatctgatgaagttgagcatggaagagttagtcgagtttttccaggagaccctggctaaggattttttcttcgaggatgactttgtgattgaacagttgcaaatcagcatgaccgagctcaagcgagctaaactggacctgcccgagcccggaaaagaggacgaatatccgaagaagcccctggggcagcttccccctgaacttcaatcctggggggtacatcatctctccaacggccagaggagtgttgggagacctagcccgctggcctccggcagacgtgaaagcggtgcaccacatagaagacatgagcactcgccacaccctcaatctcgcaccggcactccagaacgtgcacagcctcctaggcgaaaatccgttgaggaggagagcaaaaaactgaaggacgaggccgacttccagaggaagctgccaagcggccctcaggactcatcaaggcaatataaccacgccgctgcgaaccaaaatagtaatgccactagcaacattagaaaagagttcgtaccaaagtggaataagccatccgatgtctcagccactgaacgaactgccaaatacaccatggaaggcaagggtagagccgcacaccctgcactcgctgtgaccgtgcccggacctgccgaggttcgcgtatcaaacgtaaggccaaaaatgaaagcactcgacgctgaggacgggaaacggggatcgaccgcctcccagtatgataacgtacccggacctgaactggattccggggcttccgtagaagaggccttggagagggcctattcacagtccccaagacacgccctgtatcctccatctcccaggaaacatgcagagcctagctcctcgccctctaaagtatctaacaagtttaccttcaaggtgcagccgccatcgcacgcaaggtatccaagccagctggacggagaagctagggggttagcccatccacccagctactccaatcccccagtttaccacggcaacagccccaaacattttcctacagcaaactcctctttcgccagccctcagtttagtcccggaacacagttaaacccaagtcgccgtccacatgggagcacgctttctgtgagtgcatcccctgagaagtcttatagcaggccctcccccctggtgcttccaagctccagaatagaggtccttcccgtcgacaccggcgctggtggatactccgggaactctggctcacctaaaaatggaaaattgataattcctcccgtggactatcttcctgataatagaacttggtccgaagtttcttacacctaccgccctgagacgcaggggcaatcatggaccagggacgcatccagaggcaaccttcccaaatacagcgcctttcagctggccccatttcaggatcacggactacctgcggtgtccgtggattcgcccgtcaggtataaagcaagtccggctgccgaagatgcttctccaagtgggtatccctactccggaccaccccctccagcgtaccactatcggaaccgggacggcctgagcatccaggaatcggttctcctttag

SEQ ID NO: 181605 - DNA, 4811 bp, Artificial Sequence
  derived and/or modified sequence
cggccgctgcggtgacggttggcggcggccggtgaggcgggcggggccggaggcgcggaggcggggtcccgggcgagccgccctgggaggcgggggccgtttccatagcggcggcaggaggtgtcgcgccggggaacttcctggttcccgggctcggcttcgccgggatcctcttggaagggaaacaatggggcggagggcactgcggtagccgccgccgccgccgcgccgcgccgcgccggatctgctcggccgcccgggaccgccagctctgtccgctgcccacagcctagcagtcgggaccgtactgaggacatgtattcctctgagaaaccttggacagcagattttggtttaatatctgattgggacaacattcagacccatttccagtcatgaattcagaccaggatgtagcactcaaacttgcccaggagcgagctgaaatagttgctaaatatgacagaggacgagaaggtgcagagattgaaccttgggaagatgctgattaccttgtttacaaagtcacagatagatttggctttttacatgaggaggagctcccagatcataatgtggctgtggaacggcaaaagcacctggaaattgaaagaactaccaaatggctgaaaatgctgaaaggatgggaaaaatacaagaacactgaaaagtttcataggcgaatttacaaaggaataccactccagctcagaggtgaagtctgggccctccttcttgagatccctaaaatgaaagaagaaacaagggacctgtatagtaaattaaaacacagagcacggggctgttcacctgacatcagacaaatagacctggatgtcaaccgcacatttcgggaccacattatgtttagagacagatatggtgttaagcaacaatccttattccatgtgcttgctgcctattctatttataacacggaagtcgggtattgtcaggggatgagccagatcacagctttactcctcatgtatatgaacgaggaagatgccttctgggccctggtcaaactcttctcaggccctaaacatgccatgcatggcttttttgtccaaggttttcctaaactcttgaggtttcaagaacatcatgaaaaaatactgaacaaatttctgtccaagcttaagcaacacttggattctcaagaaatctacacaagtttttacacaatgaaatggttttttcagtgtttccttgatcgtactccctttacactaaacctcagaatatgggatatctacatctttgaaggagaacgagttcttactgctatgtcttacaccatcttaaaattacacaaaaaacatctaatgaaattgtccatggaagaacttgtagaattttttcaggagaccctggcaaaggattttttctttgaagatgattttgtgatagagcaacttcagatttctatgacagaactaaagcgggcaaagttagaccttccagaacctggtaaagaggatgaatatccaaagaagcccttggggcagcttccacctgaacttcagtcttggggcgtccatcacttgagcaacggacagaggagcgtgggccggccgagcccgctggccagcggcaggagggagagcggggcgccccacaggaggcacgagcactccccgcacccccagagcaggaccgggacgcccgagagagcacagccgccaagacggaaatcggtggaggaggagagcaaaaagcttaaagatgaggcagattttcaaagaaaactcccatcgggtccacaggacagttccaggcaatataatcacgcagctgccaaccaaaatagcaacgccacttcaaatatcaggaaggagtttgtgcccaaatggaataaaccgtcagacgtctcagctacagagagaactgccaaatacaccatggaaggcaaaggtcgagcagcgcaccccgcgctcgcagttaccgtcccaggtcctgccgaggtgcgggtgtcaaacgtgcggccaaagatgaaggccctggatgctgaggacgggaagcggggctccactgcatcgcagtacgacaacgtgccaggcccggagctggacagcggcgcttccgtggaggaggcgctggaaagggcttactcccagagcccccggcatgccctttaccctcctagcccgagaaagcacgctgagccaagttctagtccatcaaaagtatccaacaagtttacttttaaagtacagcctccaagtcatgcacgatatccgtcccagctagatggggaagcccgagggctagctcatcccccctcctacagcaatccccccgtttaccacggaaactctcccaaacacttccctactgccaacagcagctttgcttctccacagtttagccctgggactcaactgaatccttccaggagacctcatggttctactctttccgtcagtgcttctccggagaaatcttacagccgcccaagcccccttgtactgccgtctagtcgaatagaagtcctccctgttgacactggtgctgggggatattcgggcaattcagggtcaccaaagaatggaaaattgatcattccaccagtggattacttgccagataacagaacatggtcagaagttagttatacatacagacctgagacgcagggacaatcatggacccgagatgctagccgtggcaatttaccaaaatactcagcctttcaactcgcaccctttcaggaccatggcctccctgcagtttctgtagatagtcccgtgagatataaagcttcaccggccgcagaagatgccagtccatctggatatccatattcagggcccccgcctccagcctaccactacaggaatcgggacgggctttccatccaagagtcagtgttgctgtgagatttgacgtgtacttgctaaagacgagagagaaaccacgtgaaacctacattgctatgttcataattgccaaagcagtatttatactattgtaaacaactcgcacatctctcctgtctgttagtagtaagaatacagggaaatgtcttcagccccacgtagatgctgcttaagatgagcgtttcaattgcatcatcactgacctgttagaatttaacccggaaacatcgcaatagcatttagggatgcacgcacagtggtaatttattactcagttccggttatgtttttctccaaaacctgaacatttttactctgttggctcattctattttgactaatgttacaaagtactgaaaaaactgtagaatagatatttttaaggctatatgtagtgtatgtgtcttttaatagatataggcatctgttcatccacatttgaacacagagctaaagaaacgttttttaaaaaactacttttaatccagatccatggaataatatgtaattcttgttttccttgtcttttagtccagtttttctttttccctctcatatatttgtaacctgggtcctaaactgactgaagagtttgtcctgactttattaattgcagtctcacagaatgctcatcattctccttcagctgttgccattttctttcaatctgaaaattaaagacattggagagaaaggctaaccacttaatggtgcttaaaaatcggggcacttaaaataagtttacggccaaaggtgcagcagtgcttatcacatccacatactaagagattggtcttagtgcgtttgtgccctttgttctggtctgactcttgcgaatctcagagcaggagaagttgcagcttactgatccctcagtgctcacagtactcatgtggggcagccacactaactgcattagcagtgtggttacttctttcttctgcctcgactcacatggcttctccccacgaaggtcccagggtggccatttatacaatccatttctgtcctctttatggaatgtagtcgacggatattgctgcacctcatcaggccattacattgtccatgttaaaattataaaaatgatcctagtttttcataggagtctaggattttgatcttttaaaaaatacagtgtgatttcatgcttttgaacatctttttttcattgaaacaaattcaagttcttggcttaaaaaaaaattagtgatgtctttaaaaaatattctgttacactacagataccaaaacactgacaaagatttaggcactccaagagagtatgacttcgtgtttaattggggagcttgttttcaacattgcttatatttgaatagtagaaaacccgacattgatgtttcttcctgttgcaaggtggggctttaaactttcaaggtacaaaagtatgtcttttaaaatggaagtaacgtttgtttagctagtgaatgtgacaatatattttatgtatataatgagtctaatgtaattttgatcaacttggtaatgatgttattaaatagcaaaacaagtgcagtgtattaaagctaaacactacattgaaacgcaaacaaaattctggtgaaataactgggctgttgatgcaggtcaggtggaagctgagaaataaatgtatataaatatgtagctgaggatattaattcccattatataaccataattctgtgacttgtaataaaccaagctgtacaatttagtttataatagcagtatctgagctgctccaaaatatatatatcaacagtggtaaatactgtagatttttatatatatatatatatatatatatatatatgcaaaaaatatatatatacacacaagcactattttcttatgtcatttatgacattttttatctgtatacttttttgatgtgattgttttttaacatgctaaaagtaataagta

SEQ ID NO: 181606 - DNA, 4739 bp, Artificial Sequence
  derived and/or modified sequence
gagccgccctgggaggcgggggccgtttccatagcggcggcaggaggtgtcgcgccggggaacttcctggttcccgggctcggcttcgccgggatcctcttggaagggaaacaatggggcggagggcactgcggtagccgccgccgccgccgcgccgcgccgcgccggatctgctcggccgcccgggaccgccagctctgtccgctgcccacagcctagcagtcgggaccgtactgaggacatgtattcctctgagaaaccttggacagcagattttggtttaatatctgattgggacaacattcagacccatttccagtcatgaattcagaccaggatgtagcactcaaacttgcccaggagcgagctgaaatagttgctaaatatgacagaggacgagaaggtgcagagattgaaccttgggaagatgctgattaccttgtttacaaagtcacagatagatttggctttttacatgaggaggagctcccagatcataatgtggctgtggaacggcaaaagcacctggaaattgaaagaactaccaaatggctgaaaatgctgaaaggatgggaaaaatacaagaacactgaaaagtttcataggcgaatttacaaaggaataccactccagctcagaggtgaagtctgggccctccttcttgagatccctaaaatgaaagaagaaacaagggacctgtatagtaaattaaaacacagagcacggggctgttcacctgacatcagacaaatagacctggatgtcaaccgcacatttcgggaccacattatgtttagagacagatatggtgttaagcaacaatccttattccatgtgcttgctgcctattctatttataacacggaagtcgggtattgtcaggggatgagccagatcacagctttactcctcatgtatatgaacgaggaagatgccttctgggccctggtcaaactcttctcaggccctaaacatgccatgcatggcttttttgtccaaggttttcctaaactcttgaggtttcaagaacatcatgaaaaaatactgaacaaatttctgtccaagcttaagcaacacttggattctcaagaaatctacacaagtttttacacaatgaaatggttttttcagtgtttccttgatcgtactccctttacactaaacctcagaatatgggatatctacatctttgaaggagaacgagttcttactgctatgtcttacaccatcttaaaattacacaaaaaacatctaatgaaattgtccatggaagaacttgtagaattttttcaggagaccctggcaaaggattttttctttgaagatgattttgtgatagagcaacttcagatttctatgacagaactaaagcgggcaaagttagaccttccagaacctggtaaagaggatgaatatccaaagaagcccttggggcagcttccacctgaacttcagtcttggggcgtccatcacttgagcaacggacagaggagcgtgggccggccgagcccgctggccagcggcaggagggagagcggggcgccccacaggaggcacgagcactccccgcacccccagagcaggaccgggacgcccgagagagcacagccgccaagacggaaatcggtggaggaggagagcaaaaagcttaaagatgaggcagattttcaaagaaaactcccatcgggtccacaggacagttccaggcaatataatcacgcagctgccaaccaaaatagcaacgccacttcaaatatcaggaaggagtttgtgcccaaatggaataaaccgtcagacgtctcagctacagagagaactgccaaatacaccatggaaggcaaaggtcgagcagcgcaccccgcgctcgcagttaccgtcccaggtcctgccgaggtgcgggtgtcaaacgtgcggccaaagatgaaggccctggatgctgaggacgggaagcggggctccactgcatcgcagtacgacaacgtgccaggcccggagctggacagcggcgcttccgtggaggaggcgctggaaagggcttactcccagagcccccggcatgccctttaccctcctagcccgagaaagcacgctgagccaagttctagtccatcaaaagtatccaacaagtttacttttaaagtacagcctccaagtcatgcacgatatccgtcccagctagatggggaagcccgagggctagctcatcccccctcctacagcaatccccccgtttaccacggaaactctcccaaacacttccctactgccaacagcagctttgcttctccacagtttagccctgggactcaactgaatccttccaggagacctcatggttctactctttccgtcagtgcttctccggagaaatcttacagccgcccaagcccccttgtactgccgtctagtcgaatagaagtcctccctgttgacactggtgctgggggatattcgggcaattcagggtcaccaaagaatggaaaattgatcattccaccagtggattacttgccagataacagaacatggtcagaagttagttatacatacagacctgagacgcagggacaatcatggacccgagatgctagccgtggcaatttaccaaaatactcagcctttcaactcgcaccctttcaggaccatggcctccctgcagtttctgtagatagtcccgtgagatataaagcttcaccggccgcagaagatgccagtccatctggatatccatattcagggcccccgcctccagcctaccactacaggaatcgggacgggctttccatccaagagtcagtgttgctgtgagatttgacgtgtacttgctaaagacgagagagaaaccacgtgaaacctacattgctatgttcataattgccaaagcagtatttatactattgtaaacaactcgcacatctctcctgtctgttagtagtaagaatacagggaaatgtcttcagccccacgtagatgctgcttaagatgagcgtttcaattgcatcatcactgacctgttagaatttaacccggaaacatcgcaatagcatttagggatgcacgcacagtggtaatttattactcagttccggttatgtttttctccaaaacctgaacatttttactctgttggctcattctattttgactaatgttacaaagtactgaaaaaactgtagaatagatatttttaaggctatatgtagtgtatgtgtcttttaatagatataggcatctgttcatccacatttgaacacagagctaaagaaacgttttttaaaaaactacttttaatccagatccatggaataatatgtaattcttgttttccttgtcttttagtccagtttttctttttccctctcatatatttgtaacctgggtcctaaactgactgaagagtttgtcctgactttattaattgcagtctcacagaatgctcatcattctccttcagctgttgccattttctttcaatctgaaaattaaagacattggagagaaaggctaaccacttaatggtgcttaaaaatcggggcacttaaaataagtttacggccaaaggtgcagcagtgcttatcacatccacatactaagagattggtcttagtgcgtttgtgccctttgttctggtctgactcttgcgaatctcagagcaggagaagttgcagcttactgatccctcagtgctcacagtactcatgtggggcagccacactaactgcattagcagtgtggttacttctttcttctgcctcgactcacatggcttctccccacgaaggtcccagggtggccatttatacaatccatttctgtcctctttatggaatgtagtcgacggatattgctgcacctcatcaggccattacattgtccatgttaaaattataaaaatgatcctagtttttcataggagtctaggattttgatcttttaaaaaatacagtgtgatttcatgcttttgaacatctttttttcattgaaacaaattcaagttcttggcttaaaaaaaaattagtgatgtctttaaaaaatattctgttacactacagataccaaaacactgacaaagatttaggcactccaagagagtatgacttcgtgtttaattggggagcttgttttcaacattgcttatatttgaatagtagaaaacccgacattgatgtttcttcctgttgcaaggtggggctttaaactttcaaggtacaaaagtatgtcttttaaaatggaagtaacgtttgtttagctagtgaatgtgacaatatattttatgtatataatgagtctaatgtaattttgatcaacttggtaatgatgttattaaatagcaaaacaagtgcagtgtattaaagctaaacactacattgaaacgcaaacaaaattctggtgaaataactgggctgttgatgcaggtcaggtggaagctgagaaataaatgtatataaatatgtagctgaggatattaattcccattatataaccataattctgtgacttgtaataaaccaagctgtacaatttagtttataatagcagtatctgagctgctccaaaatatatatatcaacagtggtaaatactgtagatttttatatatatatatatatatatatatatatatgcaaaaaatatatatatacacacaagcactattttcttatgtcatttatgacattttttatctgtatacttttttgatgtgattgttttttaacatgctaaaagtaataagtata

SEQ ID NO: 181607 - protein, 2186 aa, Artificial Sequence
  derived and/or modified sequence
MAGERTRRFTRSLLRPGQAAELRHSAASAAAVAVSSRQQQRQEKPRLLEPLDYETVIEELEKTYRNDPLQDLLFFPSDDFSAATVSWDIRTLYSTVPEDAEHKAENLLVKEACKFYSSQWHVVNYKYEQYSGDIRQLPRAEYKPEKLPSHSFEIDHEDADKDEDTTSHSSSKGGGGAGGTGVFKSGWLYKGNFNSTVNNTVTVRSFKKRYFQLTQLPDNSYIMNFYKDEKISKEPKGCIFLDSCTGVVQNNRLRKYAFELKMNDLTYFVLAAETESDMDEWIHTLNRILQISPEGPLQGRRSTELTDLGLDSLDNSVTCECTPEETDSSENNLHADFAKYLTETEDTVKTTRNMERLNLFSLDPDIDTLKLQKKDLLEPESVIKPFEEKAAKRIMIICKALNSNLQGCVTENENDPITNIEPFFVSVALYDLRDSRKISADFHVDLNHAAVRQMLLGASVALENGNIDTITPRQSEEPHIKGLPEEWLKFPKQAVFSVSNPHSEIVLVAKIEKVLMGNIASGAEPYIKNPDSNKYAQKILKSNRQFCSKLGKYRMPFAWAVRSVFKDNQGNVDRDSRFSPLFRQESSKISTEDLVKLVSDYRRADRISKMQTIPGSLDIAVDNVPLEHPNCVTSSFIPVKPFNMMAQTEPTVEVEEFVYDSTKYCRPYRVYKNQIYIYPKHLKYDSQKCFNKARNITVCIEFKNSDEESAKPLKCIYGKPGGPLFTSAAYTAVLHHSQNPDFSDEVKIELPTQLHEKHHILFSFYHVTCDINAKANAKKKEALETSVGYAWLPLMKHDQIASQEYNIPIATSLPPNYLSFQDSASGKHGGSDIKWVDGGKPLFKVSTFVVSTVNTQDPHVNAFFQECQKREKDMSQSPTSNFIRSCKNLLNVEKIHAIMSFLPIILNQLFKVLVQNEEDEITTTVTRVLTDIVAKCHEEQLDHSVQSYIKFVFKTRACKERTVHEELAKNVTGLLKSNDSTTVKHVLKHSWFFFAIILKSMAQHLIDTNKIQLPRPQRFPESYQNELDNLVMVLSDHVIWKYKDALEETRRANHSVARFLKRCFTFMDRGYVFKMVNNYISMFSSGDLKTLCQYKFDFLQEVCQHEHFIPLCLPIRSANIPDPLTPSESTQELHASDMPEYSVTNEFCRKHFLIGILLREVGFALQEDQDVRHLALAVLKNLMAKHSFDDRYREPRKQAQIASLYMPLYGMLLDNMPRIYLKDLYPFTVNTSNQGSRDDLSTNGGFQSQTAIKHANSVDTSFSKDVLNSIAAFSSIAISTVNHADSRASLASLDSNPSTNEKSSEKTDNCEKIPRPLSLIGSTLRFDKLDQAETRSLLMCFLHIMKTISYETLIAYWQRAPSPEVSDFFSILDVCLQNFRYLGKRNIIRKIAAAFKFVQSTQNNGTLKGSNPSCQTSGLLSQWMHSTSSHEGHKQHRSQTLPIIRGKNALSNPKLLQMLDNTMTSNSNEIDIVHHVDTEANIATEVCLTILDLLSLFTQTHQRQLQQCDCQNSLMKRVFDTYMLFFQVNQSATALKHVFASLRLFVCKFPSAFFQGPADLCGSFCYEVLKCCNHRSRSTQTEASALLYFFMRKNFEFNKQKSIVRSHLQLIKAVSQLIADAGIGGSRFQHSLAITNNFANGDKQMKNSNFPAEVKDLTKRIRTVLMATAQMKEHEKDPEMLVDLQYSLANSYASTPELRRTWLESMAKIHARNGDLSEAAMCYIHIAALIAEYLKRKGYWKVEKICTASLLSEDTHPCDSNSLLTTPSGGSMFSMGWPAFLSITPNIKEEGAMKEDSGMQDTPYNENILVEQLYMCVEFLWKSERYELIADVNKPIIAVFEKQRDFKKLSDLYYDIHRSYLKVAEVVNSEKRLFGRYYRVAFYGQGFFEEEEGKEYIYKEPKLTGLSEISQRLLKLYADKFGADNVKIIQDSNKVNPKDLDPKYAYIQVTYVTPFFEEKEIEDRKTDFEMHHNINRFVFETPFTLSGKKHGGVAEQCKRRTILTTSHLFPYVKKRIQVISQSSTELNPIEVAIDEMSKKVSELNQLCTMEEVDMIRLQLKLQGSVSVKVNAGPMAYARAFLEETNAKKYPDNQVKLLKEIFRQFADACGQALDVNERLIKEDQLEYQEELRSHYKDMLSELSTVMNEQITGRDDLSKRGVDQTCTRVISKATPALPTVSISSSAEV

SEQ ID NO: 181608 - DNA, 6561 bp, Artificial Sequence
  derived and/or modified sequence
atggctggcgagcggacccgacgctttaccaggagcctgctgcgcccaggtcaggccgctgagctgagacattcagctgcttcagctgccgccgtggctgtgagtagtcggcaacaacaacgccaagagaagccacggctcctggaacctcttgattacgagacagtcatcgaagagctcgagaaaacgtaccgaaacgacccactgcaggacttgctctttttcccaagtgatgatttttccgccgcgacagtctcgtgggacatccggactctgtattccaccgttcctgaagacgcagaacacaaggctgagaatttgttggtgaaagaggcgtgcaaattctattcgtcacagtggcatgtggttaactacaagtacgaacagtatagtggagatatccgtcagttgccccgcgctgagtacaagcctgagaagctcccgtcgcactcattcgagatcgatcacgaggatgcagataaggatgaagacaccacatcccactctagcagtaaaggcggggggggcgcaggaggcaccggtgtttttaagagtggttggctgtacaaaggtaactttaacagcactgtgaacaacaccgtaacggtgcgttctttcaagaagaggtacttccagctgacacagctgcccgacaactcctacatcatgaacttttataaggacgagaaaatttctaaagaacccaaaggttgcattttcctggactcctgtaccggagtggtgcagaataatcggctgcgaaagtatgcattcgagctgaagatgaacgatctgacatacttcgtgttggctgcagaaacagagtccgacatggacgaatggatacacacactgaatcgaattctgcagattagcccagagggccctctgcagggaagacgctccacagaactgacagacctgggccttgatagcctggataattctgtgacctgcgagtgcacccctgaggaaactgacagcagtgagaataatctgcacgctgatttcgcaaaatatctcactgagacagaggatacagtcaagactaccaggaacatggagcgtctcaatctcttctcccttgatccagacatcgacactcttaaactacagaaaaaagacttgctggagccagagagcgtaatcaagcctttcgaggagaaggccgcaaagcggattatgatcatctgcaaggccctaaactccaacctgcaagggtgcgttacagaaaacgagaacgatcccatcaccaacatcgaaccctttttcgtgtccgtggccctctatgatctgcgagacagtcgtaagatctctgctgactttcacgtggacctgaaccacgccgcagtacgccagatgctgctcggagcaagcgtcgcactggaaaatggaaatatcgataccatcacaccgcggcagagcgaggaacctcatatcaaaggattacccgaggagtggctgaagttccctaaacaggcagtgttttctgtcagcaaccctcactcagagattgtgctggtggcaaaaattgaaaaagtgctgatgggtaacatcgcatctggggccgagccatacataaagaatcccgacagtaacaagtacgctcagaagatccttaagtctaacagacaattttgcagcaaactgggaaaatacagaatgccctttgcttgggccgtcagatctgtcttcaaggacaatcagggaaacgtcgatcgggacagcagatttagccctcttttccgccaggaatctagtaagatctctacagaagacttagtaaagttagtcagcgattataggagggcagataggatatcaaagatgcaaaccattccgggcagtctggacattgccgtcgacaacgtgccgttagagcacccaaactgcgtcacaagttccttcatccctgtgaagccttttaatatgatggcccagacggagccaactgtggaagtggaggagttcgtatatgattcaacaaagtattgccgcccctatagggtgtataaaaatcagatttatatttatccaaagcacctcaaatacgacagtcagaagtgctttaataaagcccggaacatcacagtgtgtattgagttcaagaacagtgatgaggagtcagccaagcctctcaagtgcatttacggaaaacccgggggccccctgtttacatccgcagcctacactgccgtgctgcaccatagccaaaatcctgattttagcgatgaggtcaagatcgaacttcctacgcagctgcatgaaaagcaccacatcctgttctctttttaccatgtaacttgcgatatcaacgccaaggctaacgcgaagaagaaagaggctctggagactagcgtgggttacgcctggctcccactgatgaagcacgaccagatagctagccaggaatacaacattcctatcgctactagtctaccaccaaactacttgtcattccaagacagtgcctcaggcaaacatggtgggtccgatatcaagtgggtggatggcgggaaacccctgtttaaggtgagtacctttgtggtatcaacagttaatactcaagatccacacgtgaatgccttctttcaagaatgtcaaaagagggagaaggatatgagtcaatcaccaacctcaaactttattcggagctgtaaaaatctgctaaatgtcgagaagattcacgccattatgagtttccttccaattatcctcaatcaattgttcaaagtccttgtgcaaaacgaggaagatgagataaccactacagtgactagagttttaaccgatatagtcgccaaatgtcatgaagaacagctggaccacagtgtccagtcctatataaagttcgtttttaaaacgcgtgcatgcaaagagaggaccgtccacgaagagctggcgaaaaatgtaaccggattactgaaaagcaatgattcaactacggtcaaacacgtgctcaagcactcatggttttttttcgcgattattctaaagagcatggctcagcatttaattgacactaacaaaatccagctacccaggccacagcgattccccgagagctaccagaacgagctggacaacctagtgatggtcctctccgatcatgtgatatggaaatacaaagatgctctggaagaaacaagacgggctaaccatagtgtagcccgctttctgaaacggtgtttcacatttatggacagagggtatgtctttaagatggtgaacaactacatcagcatgttctcctctggggacctgaagacactgtgtcagtataagtttgatttcctgcaagaagtgtgtcagcatgaacacttcattccattgtgcttgccaatcaggtccgcgaacatccctgatcccctgactcccagcgagtcgactcaggaattacacgcttcggatatgccagaatactcagtgacaaacgaattctgcaggaaacattttctcattggaatccttctgcgggaagtggggttcgcattacaggaggatcaggacgtgcgtcatttagctcttgcagtcctgaaaaacctcatggctaagcatagttttgatgacaggtacagggagccacggaagcaggctcagattgcatccctgtacatgcccctctatgggatgctactggacaacatgccccgaatttacctcaaagacctctaccctttcacagtaaacacatcaaatcaaggatccagggacgacctaagcacgaatggcggctttcagtctcaaaccgccataaagcacgccaattcagtggacacctcctttagcaaggacgtccttaacagtatcgcagcattcagcagcattgccatctcaaccgttaaccatgctgacagcagagccagtcttgcaagcctggattccaatccttctactaacgaaaaatctagtgaaaaaactgacaactgtgagaaaatcccccgaccgctctccctgatcggatcaacacttagattcgacaaattagaccaggcagagacccggtctttactgatgtgtttccttcacattatgaagaccatttcttacgagacgctgatagcctactggcagcgggcaccatcccccgaagtgtctgattttttcagcatcctggacgtatgtctgcagaacttccgttatcttggcaaaagaaacataattcgaaagatcgcagccgccttcaaattcgtgcagagtacccagaataatggtactctcaaagggtcgaatcctagttgtcagactagtggtttactgtcacagtggatgcactcaacttcatcacatgaaggtcataagcaacaccgcagccagacgctgcccattatccggggtaaaaacgcactctctaatcctaaattgctgcaaatgctcgataacactatgacatccaactctaatgagattgacatcgtgcaccacgtggacactgaagccaacatcgctactgaagtctgccttactattttagacctgttgagtctctttacacaaacacaccagcgacaacttcagcagtgtgactgccaaaacagcctcatgaaacgcgtcttcgatacctatatgctgttttttcaagtcaaccagtctgccacggccttgaagcatgtgtttgcatcactgcgcctctttgtgtgcaaatttccctcggccttttttcagggccccgccgatctttgcgggagtttctgctatgaggtcctcaaatgttgcaaccatcgatctagatccacccaaaccgaagctagcgcccttctgtactttttcatgagaaaaaacttcgagttcaataaacagaaatcaatcgtgcggtcgcacctgcagttgataaaggcggtcagccagttgatcgccgacgctggcatcggaggcagtcgttttcagcactccctcgcgataacaaataacttcgcgaatggggataagcagatgaaaaattcgaacttccccgccgaggtgaaagatctgacgaagcgtatacgaacggtgctcatggcgacagcccaaatgaaggagcatgaaaaagaccctgagatgctggtcgacctgcagtattcattggcaaatagctatgcctccactcccgaactgagacggacttggctggaaagtatggcaaaaattcatgcaagaaatggtgacctgagtgaagctgccatgtgttatatccacattgccgccctcatagcagagtatttgaaacgcaagggctattggaaagttgagaagatttgcaccgcatcacttcttagcgaagatacacacccctgcgatagcaacagtctcctaactacgccgagcgggggttctatgttttccatgggctggccggccttccttagcatcacaccgaatatcaaagaggagggagcaatgaaagaggactctgggatgcaggacactccctataacgaaaatatcttagtggagcagctgtacatgtgcgtagaatttctgtggaagtcggagaggtatgagctcattgccgacgtcaacaaacccataatcgccgtcttcgaaaagcagagggactttaagaaactgtcagatctctattacgatattcatagaagttacctcaaggtggccgaggtagtcaacagcgagaagcgcctttttggccgatattaccgtgtcgccttttacggccagggattttttgaagaagaagagggaaaagaatacatttataaagagcccaagcttaccggtctgagcgaaatctcccagcggctgttgaagctgtatgcggacaaattcggagcggacaatgtaaaaatcatccaggatagcaacaaagtcaatcctaaggacctcgaccctaaatatgcctatattcaggttacatatgtgacaccattctttgaggagaaagaaatcgaagaccggaaaaccgattttgaaatgcaccataacattaaccgtttcgtgtttgaaaccccatttaccctgtctgggaagaaacatggcggtgtggccgagcagtgtaaaagaaggactatcctgactacatctcacttgtttccgtacgtcaaaaaacgtattcaggtcatcagccaaagtagcaccgagctcaaccctatcgaagtggctatcgatgaaatgtccaaaaaggtgtctgaactcaatcaactgtgtaccatggaggaggtggacatgattaggctgcagttgaagttgcaggggtccgtgagcgttaaggttaacgctgggcctatggcgtacgcccgcgccttcctcgaggagactaatgccaagaaatatcctgataaccaggtaaaactcctgaaggaaattttcagacagtttgcggatgcatgtgggcaggccctggatgtgaatgagcggctgatcaaggaggaccagctggagtatcaagaggaacttcgctcccactataaggacatgctctcagaactcagcaccgttatgaacgagcagatcacaggacgggatgacttgagtaagcgtggggtcgaccaaacatgcacgcgcgtgatttcaaaggccacaccagcgctccccactgttagcatctcatccagcgctgaggtttag

SEQ ID NO: 181609 - DNA, 6561 bp, Artificial Sequence
  derived and/or modified sequence
atggccggggagaggacccggcgcttcaccaggagcctgctgcggcccggccaggccgctgagctgcggcacagcgctgccagcgctgctgctgtggccgtgagcagccggcagcagcagaggcaggagaagccccggctgctggagcccctggactatgaaacagtgattgaggagctggagaagacctacagaaatgaccccctgcaggacctgctcttcttccccagtgatgacttctctgctgccaccgtgtcctgggacatccgcaccctgtacagcacagtgcctgaagatgctgagcacaaggccgagaacctgctggtgaaggaggcctgcaagttctacagcagccagtggcacgtggtgaactacaagtatgagcagtacagcggggacatccggcagctgcccagggctgagtacaagccagagaagctgcccagccacagctttgaaattgaccatgaagatgctgacaaggatgaggacaccaccagccacagcagcagcaagggcggcggcggggccggcggcaccggggtcttcaagagcggctggctgtacaagggcaacttcaacagcacagtgaacaacacagtgacagtgcgctccttcaagaagcgctacttccagctgacccagctgcctgacaacagctacatcatgaacttctacaaggatgagaagatcagcaaggagcccaagggctgcatcttcctggacagctgcacaggagtggtgcagaacaaccggctgaggaaatatgcctttgagctgaagatgaatgacctgacctactttgtgctggccgctgagacagaaagtgacatggatgagtggatccacaccctgaaccgcatcctgcagatcagccctgagggccccctgcagggccgccgcagcacagagctgacagacctgggcctggacagcctggacaacagcgtgacctgtgagtgcaccccagaggagacagacagcagcgagaacaacctgcatgctgactttgccaagtacctgacagaaacagaagatactgtgaagaccaccaggaacatggagcggctgaacctcttcagcctggaccctgacatcgacaccctgaagctgcagaagaaggacctgctggagcctgagagcgtcatcaagccctttgaggagaaggccgccaagaggatcatgatcatctgcaaggccctgaacagcaacctgcagggctgtgtgacagaaaatgaaaatgaccccatcaccaacatcgagcccttctttgtgtctgtggccctgtatgacctgcgggacagcaggaagatctctgctgacttccacgtggacctgaaccacgccgctgtgcggcagatgctgctgggcgcctctgtggccctggagaatggaaatattgacaccatcaccccccggcagagcgaggagccccacatcaagggcctgcctgaggagtggctgaagttccccaagcaggccgtgttttctgtgagcaacccccacagcgagatcgtgctggtggccaagattgagaaggtgctgatgggcaacatcgccagcggggctgagccctacatcaagaacccagacagcaacaagtatgcccagaagatcctgaagagcaaccggcagttctgcagcaagctgggcaagtacaggatgccctttgcctgggccgtgcgctctgtgttcaaggacaaccagggcaatgtggaccgggacagccgcttcagccccctcttccggcaggagagcagcaagatcagcacagaggacctggtgaagctggtgtctgactaccgccgggctgaccgcatcagcaagatgcagaccatccctggcagcctggacattgctgtggacaacgtgcccctggagcaccccaactgtgtgaccagcagcttcatccctgtgaagcccttcaacatgatggcccagacagagcccaccgtggaggtggaggagtttgtgtatgacagcaccaagtactgccggccctacagagtgtacaagaaccagatctacatctaccccaagcacctgaagtatgacagccagaagtgcttcaacaaggccaggaacatcaccgtgtgcatcgagttcaagaacagtgatgaggagagcgccaagcccctgaagtgcatctacggcaagccaggcggccccctcttcaccagcgctgcctacacagctgtgctgcaccacagccagaacccagacttcagtgatgaggtgaagattgagctgcccacccagctgcacgagaagcaccacatcctcttctccttctaccacgtgacctgtgacatcaatgccaaggccaatgccaagaagaaggaggccctggagacctctgtgggctacgcctggctgcccctgatgaagcatgaccagatcgccagccaggagtacaacatccccatcgccaccagcctgccccccaactacctgtccttccaggacagcgccagcggcaagcacggcggcagtgacatcaagtgggtggatggcggcaagcccctcttcaaggtgtccacctttgtggtgtccacagtgaacacccaggacccccacgtgaatgccttcttccaggagtgccagaagcgggagaaggacatgagccagagccccaccagcaacttcatccgcagctgcaagaacctgctgaatgtggagaagatccacgccatcatgtccttcctgcccatcatcctgaaccagctgttcaaggtgctggtgcagaatgaggaggatgagatcaccaccaccgtgaccagggtgctgacagacatcgtggccaagtgccacgaggagcagctggaccacagcgtgcagagctacatcaagtttgtgttcaagacccgggcctgcaaggagaggacagtgcatgaggagctggccaagaatgtgacaggcctgctgaagagcaatgacagcaccaccgtgaagcacgtgctgaagcacagctggttcttctttgccatcatcctgaagtccatggcccagcacctgattgacaccaacaagatccagctgccccggccccagcgcttccctgagagctaccagaatgagctggacaacctggtgatggtgctgagtgaccacgtgatctggaagtacaaggatgccctggaggagacccggcgggccaaccacagcgtggcccgcttcctgaagcgctgcttcaccttcatggaccggggctacgtgttcaagatggtgaacaactacatctccatgttcagcagcggggacctgaagaccctgtgccagtacaagtttgacttcctgcaggaggtgtgccagcacgagcacttcatccccctgtgcctgcccatccgcagcgccaacatcccagaccccctgaccccatctgagagcacccaggagctgcacgccagtgacatgcctgagtacagcgtgaccaatgagttctgcaggaagcacttcctgattggcatcctgctgcgggaggtgggctttgccctgcaggaggaccaggatgtgcgccacctggccctggccgtgctgaagaacctgatggccaagcacagctttgatgaccgctaccgggagcccaggaagcaggcccagatcgccagcctgtacatgcccctgtatggcatgctgctggacaacatgccccgcatctacctgaaggacctgtaccccttcaccgtgaacaccagcaaccagggcagcagagatgacctgagcaccaatggaggcttccagagccagacagccatcaagcacgccaacagcgtggacaccagcttcagcaaggatgtgctgaacagcattgctgccttcagcagcatcgccatcagcacagtgaaccacgccgacagccgggccagcctggccagcctggacagcaaccccagcaccaatgagaagagcagcgagaagacagacaactgtgagaagatcccccggcccctgagcctcatcggcagcaccctgcgctttgacaagctggaccaggccgagaccaggagcctgctgatgtgcttcctgcacatcatgaagaccatctcctatgagaccctcatcgcctactggcagagggcccccagccctgaggtgtctgacttcttcagcatcctggatgtgtgcctgcagaacttccgctacctgggcaagaggaacatcatcaggaagattgctgctgccttcaagtttgtgcagagcacccagaacaacggcaccctgaagggcagcaaccccagctgccagaccagcggcctgctgagccagtggatgcacagcaccagcagccatgagggccacaagcagcacaggagccagaccctgcccatcatccggggcaagaatgccctgagcaaccccaagctgctgcagatgctggacaacaccatgaccagcaacagcaatgaaattgacatcgtgcaccacgtggacacagaggccaacatcgccacagaggtgtgcctgaccatcctggacctgctgagcctcttcacccagacccaccagaggcagctgcagcagtgtgactgccagaacagcctgatgaagagggtgtttgacacctacatgctgttcttccaggtgaaccagagcgccacagccctgaagcacgtgtttgccagcctgcggctgtttgtgtgcaagttccccagcgccttcttccagggccctgctgacctgtgtggcagcttctgctatgaggtgctgaagtgctgcaaccacaggagccgcagcacccagacagaggccagcgccctgctgtacttcttcatgaggaagaactttgagttcaacaagcagaagagcatcgtgcgcagccacctgcagctgatcaaggctgtgtcccagctgattgctgatgctggcattggaggcagccgcttccagcacagcctggccatcaccaacaactttgccaacggggacaagcagatgaagaacagcaacttccctgctgaggtgaaggacctgaccaagaggatcagaacagtgctgatggccacagcccagatgaaggagcacgagaaggaccctgagatgctggtggacctgcagtacagcctggccaacagctatgccagcaccccagagctgcggaggacctggctggagagcatggccaagatccacgccagaaatggagacctgtctgaggccgccatgtgctacatccacatcgccgccctgattgctgagtacctgaagaggaagggctactggaaggtggagaagatctgcacagccagcctgctgtctgaggacacccacccctgtgacagcaacagcctgctgaccacccccagcggcggctccatgttctccatgggctggccagccttcctgagcatcacccccaacatcaaggaggagggcgccatgaaggaggacagcggcatgcaggacaccccctacaatgaaaacatcctggtggagcagctgtacatgtgtgtggagttcctgtggaagtcagaaagatatgagctgattgctgatgtgaacaagcccatcatcgctgtgtttgagaagcagagggacttcaagaagctgagtgacctgtactatgacatccacaggagctacctgaaggtggccgaggtggtgaacagcgagaagaggctgtttggccgctactacagagtggccttctacggccagggcttctttgaggaggaggagggcaaggagtacatctacaaggagcccaagctgaccggcctgtctgagatcagccagaggctgctgaagctgtatgctgacaagtttggagctgacaacgtgaagatcatccaggacagcaacaaggtgaaccccaaggacctggaccccaagtatgcctacatccaggtgacctacgtgacccccttctttgaggagaaggagattgaggacaggaagacagactttgagatgcaccacaacatcaacagatttgtgtttgagacccccttcaccctgagcggcaagaagcacggcggcgtggccgagcagtgcaagaggaggaccatcctgaccaccagccacctgttcccctacgtgaagaagaggatccaggtgatcagccagagcagcacagagctgaaccccatcgaggtggccattgatgagatgagcaagaaggtgtctgagctgaaccagctgtgcaccatggaggaggtggacatgatccggctgcagctgaagctgcagggctctgtgtctgtgaaggtgaatgccggccccatggcctatgcccgggccttcctggaggagaccaatgccaagaagtacccagacaaccaggtgaagctgctgaaggagatcttccggcagtttgctgatgcctgtggccaggccctggatgtgaatgaaagactcatcaaggaggaccagctggagtaccaggaggagctgcggagccactacaaggacatgctgtctgagctgagcacagtgatgaatgagcagatcaccggcagagatgacctgagcaagaggggcgtggaccagacctgcaccagggtcatcagcaaggccaccccagccctgcccaccgtgtccatcagcagcagcgctgaggtgtag

SEQ ID NO: 181610 - DNA, 6561 bp, Artificial Sequence
  derived and/or modified sequence
atggccggcgagcggacccggcggttcacccggagcctgctgcggcccggccaggccgccgagttgaggcacagtgccgcttcggcggcagccgtcgccgtgtcaagcagacagcagcagcgtcaagagaaaccaaggctcctcgaaccgctggactacgagaccgtcatcgaagagctggagaagacatacagaaacgaccccctgcaggacctgctcttctttccctcagacgacttttctgccgccacagtgtcttgggacattcgcacgctgtacagcactgtgcccgaagacgccgaacataaggcggaaaacctgctggttaaagaagcttgcaaattctactcatcacagtggcacgtggtgaattacaagtacgaacaatacagcggcgacattcgacagctgcctcgtgcggagtacaagcccgagaaacttcccagccatagctttgagattgatcatgaggacgcagacaaagatgaagacaccacttctcacagcagttctaagggtggagggggcgccggaggaacaggcgtgtttaaaagcggatggctctacaaggggaacttcaatagcacagtcaacaacacagttactgttcgaagctttaaaaaacgctacttccagttgacacagctgcctgacaattcttacataatgaacttctataaggacgagaaaatatcaaaagagccaaagggttgcatcttcctcgattcgtgtaccggggtggtacagaataatagactccgaaagtacgcctttgagctcaagatgaatgacttgacctatttcgtccttgccgccgagacagaaagcgatatggatgaatggatccacaccctgaatcggattctgcagatctcacctgagggcccactgcaaggtaggagatctactgagctgacggatttgggcctggactcattagataattccgtgacctgcgaatgcaccccagaagaaaccgacagctctgagaataacctccatgcagattttgctaaatacctcacagagacagaagacactgtaaaaacgacaagaaacatggaacgtctaaacctcttttcactggacccagatatcgacactctgaaattacagaagaaggatctcttggaacccgagagtgtaataaaacccttcgaagagaaggctgcaaaaaggattatgattatttgcaaggcattgaacagtaatctgcagggctgtgtgactgagaacgagaacgaccccattacaaatattgaaccattttttgtttcagtcgccttgtacgatctaagggacagtaggaaaatctccgcagacttccatgtggacctcaaccatgccgcggtccgccaaatgttgctgggggccagtgtcgcactggaaaatggaaacattgacaccatcaccccgcgacagtcggaggaacctcacatcaagggcttgcctgaagaatggttaaaattccccaagcaggctgtgttctcagtttccaaccctcactccgagattgtgctcgtcgccaagatcgagaaggtcttaatgggcaacatcgcctctggggcagaaccttatataaagaaccctgactctaacaaatacgcccagaagatcctcaagtctaatagacagttctgcagcaaactcggcaaatatcggatgcccttcgcgtgggcagtacgtagcgtgttcaaagataatcagggcaatgtggaccgagattcacgtttctcccccctgtttcgccaggagtcatccaagataagcacagaagacctagtcaagctggtgtccgattacaggcgcgcagataggatttctaagatgcagactatacctgggtccttggatatcgcggtggacaatgtcccactcgagcaccccaattgtgtgacctctagtttcatccctgttaagcctttcaatatgatggcacaaactgagcctaccgtggaggtcgaagagttcgtgtacgattcaacaaagtactgccggccataccgggtatacaagaatcagatatatatctatcccaaacaccttaagtacgatagccagaagtgtttcaacaaagcccggaatatcactgtatgtattgagtttaagaatagcgatgaggagagcgccaagccgctgaaatgcatttacggtaagcctgggggccccctgttcacttctgccgcttacactgctgtgctgcatcactcccagaaccctgatttcagtgacgaggtcaagatagagctacctactcagctgcacgagaaacaccatatcttattctcattttatcacgtcacttgcgacattaacgccaaggcgaacgcaaaaaaaaaggaggctctggagaccagtgtgggttacgcttggctccctttgatgaaacacgaccagatagcatctcaagaatataatatacccatcgccacgtccctccctccgaactatctgtccttccaggattccgctagcgggaaacacggcggctccgatattaaatgggtggatgggggcaagcccctgtttaaagtgtcaactttcgtggtgagcacagtgaacacccaggacccgcacgtgaatgcctttttccaggagtgccagaagcgtgagaaagatatgagccagtcacccacctctaacttcattcgcagttgcaagaatctgctcaacgtcgaaaagattcacgccataatgagttttcttcctattattttgaaccaattgttcaaggtcttagtgcagaacgaagaggatgaaattaccaccactgtaactcgagttctaacagacatagtggccaagtgtcacgaggaacagttggatcactccgttcaaagctacattaaattcgtgttcaaaaccagagcgtgtaaggaaaggacagtgcatgaggagcttgctaaaaatgtcaccgggctactgaaatcaaacgacagcactaccgtgaagcatgtgctgaaacattcctggttttttttcgccataattttgaaatcgatggctcagcacttaatcgacactaataagatccagcttcccagacctcagcgctttcctgagtcctatcagaatgaattggataacctggttatggttctgagcgatcacgttatctggaagtacaaagacgctctagaagaaactcggagagccaaccacagcgttgcccgattcctcaagcggtgtttcacgtttatggatcggggatatgtgtttaagatggtgaacaactatatttccatgttcagcagcggagatctgaaaacactgtgccaatataagttcgactttctgcaagaggtgtgtcaacatgagcattttattccactctgtctgcccattcgctccgccaatattcctgacccactgactccttctgaatccactcaggaactgcacgctagcgacatgcccgaatactccgtgactaacgagttctgtagaaaacacttcctaattggaatattgctgcgcgaagtcggtttcgcactccaggaagaccaggatgttagacacctcgccctggctgtcctcaagaatctgatggccaagcactcttttgatgaccggtatcgcgaacctaggaaacaggctcagatcgcaagtctctatatgccgctctacggtatgctccttgacaatatgcctcggatctacttgaaagatctctatcccttcacagtgaacacttccaatcagggcagccgggatgatctatctaccaatggcggttttcagagtcagaccgcgatcaaacacgcaaattctgtcgatacctccttctcaaaggacgtattaaatagtatagccgccttctctagtattgcaattagcacagtcaaccacgcagattccagggcatctttagcgtcactcgactcgaatccttctactaacgagaagtccagtgagaaaacagataactgcgaaaaaatcccccgtcccctctctttgatcggatcgacattgcggttcgataaactagatcaggcagaaaccagatcacttctaatgtgttttctgcacatcatgaagaccattagctacgaaacgctcattgcttactggcagcgcgccccatcacccgaagtgtcagacttcttcagtatcctggatgtctgcctgcagaactttagatatttgggcaaaaggaatataatcaggaagattgctgcagcctttaaatttgtccaaagtacccagaataacgggaccctcaagggatccaacccgagctgccagacaagtgggttgttgagccagtggatgcattccacaagtagtcatgaaggacacaagcagcataggagtcagacactgcccattatcagaggcaagaatgccctgagcaacccaaagctcttgcagatgctggacaacaccatgacaagcaactctaacgaaattgatattgtacatcatgtggacaccgaggcgaatatagccacagaggtgtgcctgaccattctcgatctgctaagcctttttactcagacacaccagcggcaattgcagcagtgtgattgtcagaactcactgatgaagagagtctttgacacttacatgctgtttttccaggtaaatcaatctgctaccgcactgaaacatgtttttgcaagtttgaggttattcgtgtgtaaattcccatcagcatttttccaggggccagctgacctctgtggcagcttctgctatgaggtcctcaagtgctgtaaccaccgctccaggagtacccaaacagaggcctcggctctcttgtatttctttatgcgcaagaacttcgagtttaacaaacagaaaagcatcgtgcgatcccacctccaactcatcaaggctgtaagtcaactgatcgctgacgccggcatcggggggtccagattccaacatagtcttgccatcaccaacaactttgccaacggagacaaacaaatgaagaactccaatttccctgccgaggtgaaggacctgacgaaacgcattcgaaccgtgcttatggcgactgcgcagatgaaggaacatgaaaaggatcccgagatgctcgtcgatctgcaatacagccttgccaactcgtacgcttcaacgcctgagctgcggagaacgtggctggaatcaatggctaagatccacgcccgaaatggcgatctgtcagaggcagctatgtgttatatacacatcgcagcccttatcgccgaatatcttaagcggaaggggtactggaaagtcgagaagatatgcacagccagtttgttatctgaggacactcatccctgtgacagcaatagcctgctcacgacaccatccgggggcagcatgtttagcatggggtggccagcattcctctctattacaccaaacattaaggaagagggggcgatgaaggaggatagtggtatgcaggacactccatataatgaaaacattctcgtggagcagctgtacatgtgcgttgagtttttgtggaaaagtgagcggtatgaactgatcgcggacgtcaataagcccatcatcgccgtattcgagaagcaacgggatttcaagaaactcagtgacttgtactatgacattcataggagctatttgaaggttgcggaggtagtgaatagcgaaaagcgcctctttggcaggtactaccgcgttgccttttatggccagggtttctttgaagaagaggaaggaaaagaatatatctataaagaaccgaagttgaccggactctctgaaattagtcagcgtctcctgaagttgtacgcagataagttcggcgcagacaacgttaagatcattcaggattcaaacaaagtgaaccctaaagatctggacccaaagtatgcctacatccaggtgacttatgttaccccttttttcgaagagaaggagatagaggaccgaaaaacagattttgagatgcaccacaacatcaaccgcttcgtctttgaaaccccctttacgctgagtggtaaaaaacacgggggcgtggcggaacaatgtaagaggagaacaatactgaccactagccacctgttcccatacgtcaaaaagcgcatacaggttatttctcagagctccacagagctgaatcctattgaggtggccattgacgagatgtcaaagaaagtatcagagctgaaccagttgtgcaccatggaggaggtagatatgataaggcttcagctgaagctacagggcagcgtcagcgtcaaagtgaacgcggggcccatggcctacgcaagagcctttcttgaggaaactaacgcaaagaagtacccagataaccaggtgaagttactcaaggaaatattcaggcagttcgcagatgcttgcggacaggccttggacgtgaatgaaaggctaataaaggaggatcaactagaataccaggaggagctgcggagccattataaagatatgctgagcgaactctcgaccgtgatgaacgaacagatcaccggcagagatgacttgtctaagcgtggagtagaccaaacatgtacccgtgtgattagtaaagctactccagcgttaccaaccgtgtcaatctcttcctcagcggaagtgtag

SEQ ID NO: 181611 - DNA, 6561 bp, Artificial Sequence
  derived and/or modified sequence
atggccggtgaacgcacacggcgatttacccgaagtctcttgcgtccgggtcaggcagcagagctcagacactccgccgcttccgcagctgccgtggcagtgtcctcgagacagcagcagcggcaggaaaaaccccgtctgctcgaacctctggattacgagacagttatagaagagctagagaagacctacaggaacgatcctttacaggacctgctgtttttcccatccgatgatttctccgccgcaactgtgagttgggatatccgaacactgtatagcacagtgccggaagatgctgagcacaaagcagagaatcttctggtgaaagaggcttgtaagttctactccagccaatggcatgtcgtcaattacaagtatgaacaatattctggcgacatacgacaactgcctcgcgctgaatacaaaccagaaaagctcccatcccacagcttcgagatcgaccacgaagatgctgataaagacgaggacacaacttctcactccagctccaagggcggtggtggagcgggaggaacaggcgtatttaaaagcggttggctgtacaagggaaactttaactccaccgtgaacaacacagtcactgtacggagctttaagaagaggtattttcagctgactcagctccccgataacagctacatcatgaatttctataaagatgaaaaaatcagcaaggagcctaaaggctgtattttcctcgactcttgcaccggcgtcgtccagaacaataggctgcgcaagtatgcttttgagttgaaaatgaacgacctaacctactttgtcctcgccgctgaaacggaaagtgacatggatgagtggattcatactctaaacagaatcctccagatcagcccagaaggtccactccaagggagacgttccaccgaattgactgatctgggactcgattcgctggataactcagtcacttgtgaatgcactcccgaggagaccgatagcagtgagaacaacttgcacgctgactttgctaagtatttgactgagacagaggatactgttaaaacaaccaggaatatggaacgcctaaacttgttctcacttgatcccgatatcgacacgctgaaactgcagaaaaaggacctcttagagcctgaaagcgtcattaagccatttgaggaaaaagcagcaaagcgtatcatgatcatttgcaaggctctaaattcaaacctacaaggatgtgtgaccgagaacgagaacgatcctattacaaatatagagcctttctttgtgtctgtggcactttatgacctgagagacagccggaagatatctgcagacttccacgtggacttaaaccacgcggctgtgcgccaaatgctgctcggtgcaagtgttgccctggagaacgggaacattgacaccataacaccgagacagtctgaagagcctcacatcaaagggctgcccgaggagtggttaaagttcccgaaacaggcagtctttagcgtgtcaaacccccactccgagatagtactagtggccaaaatcgagaaagtgctgatgggaaacatcgcctccggtgcggaaccctatatcaagaatcccgacagtaataaatacgcccagaagatccttaaatccaatcggcagttttgcagcaaacttgggaagtaccgcatgcctttcgcgtgggcagtgagatcagttttcaaggacaaccagggaaacgtggaccgggacagtagatttagcccgctctttagacaggaatcgtcaaaaattagcacagaagaccttgtcaagctggtgtcagactatcggcgagctgacaggatatccaagatgcaaacaattcctggaagcttagatattgctgtggataacgtgccactggagcacccaaattgcgtgacttcatcctttatcccagttaaaccttttaacatgatggctcaaacggaacccaccgtcgaggtggaagagtttgtttatgattccaccaagtactgcaggccttatcgcgtgtataagaaccagatttacatctatcccaagcatctcaagtacgattcccagaaatgttttaacaaagcaagaaatattacagtctgtattgaattcaaaaacagcgatgaagaatctgccaaaccacttaaatgtatctacggcaaacctggaggtccactgttcacttctgccgcatatacagcggtcctgcatcacagtcagaatcccgacttcagcgatgaggtgaaaatagagctgccaacgcagctgcatgaaaagcaccacatcttattctcgttctatcatgtgacctgtgatattaacgccaaagccaatgctaagaaaaaagaggccctggagacttccgttgggtatgcttggctgcctttaatgaaacacgaccagatcgccagccaggaatataacattccaatcgccacctcactaccaccaaactatttatccttccaagattccgcctctggcaagcacggcggttcagatattaaatgggtggacggcggaaaacccttattcaaggtgtcaacttttgtggtttcaaccgtgaacacgcaggacccacacgtcaatgcgttcttccaagaatgtcagaagagagaaaaggacatgagccagagcccaactagcaactttataagaagctgcaaaaatctcctgaatgtagaaaagattcatgctatcatgtcttttttgcctattatcctgaaccagctttttaaggtcctcgtccaaaatgaagaggacgaaatcacaacgacagtcacccgggtactcactgacatcgtggctaagtgccacgaagagcaactggaccattcagtgcaaagctacattaagtttgtattcaaaactagagcttgcaaggagcggacagtgcacgaagaattggctaagaacgtaacgggccttctgaagtctaacgattcaaccacggtgaagcacgtgctgaagcactcctggttctttttcgccatcatactgaagtcgatggctcagcacttgatcgataccaacaagatccaactccccaggccccagagattccccgagagttaccagaatgaattggacaatctggttatggttctcagcgaccacgtgatttggaaatacaaggacgcactggaggaaacccgaagggccaatcacagcgtcgcaaggtttctcaagaggtgctttacttttatggacagggggtatgtgttcaagatggtcaacaactatatatccatgttctcttccggcgacctgaagaccctctgccagtataagttcgatttcttacaagaggtatgccaacatgagcacttcatccccctttgtctgccaatccgaagtgcaaatatccctgatccactgacacctagcgagtcaacccaggagttgcacgcttccgacatgccagagtactccgtgaccaacgagttttgcaggaaacatttcttgataggcattctcctgcgcgaagttggctttgccctacaagaagatcaggacgttagacacctagctttggctgttcttaaaaacctaatggctaagcactcattcgatgatcgttacagggagccacggaaacaagctcaaattgcatctctttacatgcccctctacggaatgttgctggacaacatgccgaggatctatcttaaggacttgtatccttttactgtcaataccagcaatcaaggtagtagggacgatctctctaccaatggcggatttcagtctcagacggcaataaagcatgcaaatagcgtggacacgtctttctctaaggacgttctgaattctatagcagcattctctagcatagccatctcaactgtgaaccacgctgacagccgggcttcacttgcatcccttgattcaaacccttccactaatgagaaaagctctgagaaaaccgacaattgtgagaaaattcctcgtccactgtcgctcatagggagcacattaaggtttgacaagctggaccaggcagagacccgttcccttctcatgtgtttcctgcatatcatgaagacgattagctacgaaaccctaattgcatactggcagagagcgccttctccagaagtcagcgacttcttctccatactcgatgtgtgcctgcagaactttaggtatctagggaaacggaacatcattcgaaagatcgccgctgcatttaagttcgtccaaagcactcagaacaacgggactttgaaaggatcaaacccttcatgtcagacctctggcctgctgtcacagtggatgcactctactagttctcatgagggacacaagcagcataggtctcagacactacctattataagaggcaagaatgcactgagtaacccaaaactgctccagatgctggataacactatgacatccaatagcaacgaaatcgatatcgtgcaccatgttgacactgaggccaacattgcaacggaagtgtgcctgactattctggatcttctgtccctgtttacacaaacacaccagagacaactacaacagtgcgattgccagaattctttaatgaaaagggtgttcgatacctacatgctgttctttcaagtgaaccaatcagccaccgcgctgaagcatgtgtttgcctccctaagactgttcgtgtgcaaatttccaagcgcatttttccagggccctgccgatctttgcggttcgttctgctatgaggttctgaaatgctgtaatcaccgctctcgctcgacacagaccgaagcctctgcgctgctgtatttcttcatgaggaaaaactttgagtttaacaaacaaaaaagtatcgtccgcagccatctgcaactgattaaggccgtgtctcagctgatcgccgacgccggaatcgggggtagtcgattccagcactccctagccataacgaacaacttcgccaatggggataagcagatgaagaactccaactttccagctgaagtgaaagatttaacaaagcgaattcgaacggtcctgatggccacagcacagatgaaagaacatgaaaaggaccctgaaatgcttgtcgatctgcagtacagccttgctaattcctatgcatctactccggaactgcgccgaacatggctcgagtctatggcaaaaattcatgctaggaacggagatctctctgaggctgcgatgtgctatatccacatcgcagcgctgatcgccgaatatcttaaacgaaagggctattggaaagtggagaaaatttgcacggccagtctgctaagcgaggacacacatccatgcgacagtaattcactgcttactacaccatcagggggatccatgttctctatgggctggccagccttcctctcaataacgcctaacatcaaagaggagggagctatgaaagaagattccggcatgcaagatacaccttacaatgaaaatatcctggtagagcagctgtatatgtgcgtggaattcctgtggaagtcagagaggtatgaactaatcgccgacgtaaacaaacctattatagccgtattcgaaaagcagagggactttaagaaactgtctgacttgtactatgatattcacagatcatatctaaaggtggccgaagtcgtcaacagcgaaaaacgtctatttggtcggtactacagagtcgccttttacggacaggggttctttgaggaagaggagggcaaggagtatatctataaggagccaaagctgacggggctcagcgagatcagccaacgactgctgaagttgtacgcagataaattcggcgcagacaatgtgaaaattatccaggactctaacaaagtgaatccgaaggacctggatcctaagtacgcttatattcaggtgacatatgtcactccatttttcgaagaaaaggaaatagaggatagaaagacagactttgagatgcaccacaatattaatcgcttcgtgtttgagacaccatttactctgagcggaaagaagcacgggggtgtcgccgaacagtgtaaacgcaggaccatccttactaccagtcacttatttccctatgttaaaaaaagaatccaagtcatcagccaaagttcaacggaacttaatccaatagaagtagcgatcgacgagatgagtaagaaggtgtcagaattaaatcagctctgtacaatggaggaggtggacatgatccggttgcagctcaagctgcaagggtccgtcagcgtgaaggtgaatgcgggtccgatggcctacgcaagagcttttctggaagagacaaatgccaaaaagtatccagataaccaggtcaaactgcttaaggaaattttccgtcagttcgccgatgcctgcggccaggccctagacgtgaatgagcggctcatcaaagaggatcagctcgaataccaagaggagctgagatctcactataaggacatgctgagtgagttgtctactgtgatgaatgaacagatcacaggcagggacgatctgagtaaaaggggcgtggaccagacctgtacaagggtcatttccaaggccacccccgctctgccaactgtgagtatctcctcctctgcagaggtctag

SEQ ID NO: 181612 - DNA, 6561 bp, Artificial Sequence
  derived and/or modified sequence
atggccggcgagagaaccagaagattcaccagaagcctgctgagacccggccaggccgccgagctgagacacagcgccgccagcgccgccgccgtggccgtgagcagcagacagcagcagagacaggagaagcccagactgctggagcccctggactacgagaccgtgatcgaggagctggagaagacctacagaaacgaccccctgcaggacctgctgttcttccccagcgacgacttcagcgccgccaccgtgagctgggacatcagaaccctgtacagcaccgtgcccgaggacgccgagcacaaggccgagaacctgctggtgaaggaggcctgcaagttctacagcagccagtggcacgtggtgaactacaagtacgagcagtacagcggcgacatcagacagctgcccagagccgagtacaagcccgagaagctgcccagccacagcttcgagatcgaccacgaggacgccgacaaggacgaggacaccaccagccacagcagcagcaagggcggcggcggcgccggcggcaccggcgtgttcaagagcggctggctgtacaagggcaacttcaacagcaccgtgaacaacaccgtgaccgtgagaagcttcaagaagagatacttccagctgacccagctgcccgacaacagctacatcatgaacttctacaaggacgagaagatcagcaaggagcccaagggctgcatcttcctggacagctgcaccggcgtggtgcagaacaacagactgagaaagtacgccttcgagctgaagatgaacgacctgacctacttcgtgctggccgccgagaccgagagcgacatggacgagtggatccacaccctgaacagaatcctgcagatcagccccgagggccccctgcagggcagaagaagcaccgagctgaccgacctgggcctggacagcctggacaacagcgtgacctgcgagtgcacccccgaggagaccgacagcagcgagaacaacctgcacgccgacttcgccaagtacctgaccgagaccgaggacaccgtgaagaccaccagaaacatggagagactgaacctgttcagcctggaccccgacatcgacaccctgaagctgcagaagaaggacctgctggagcccgagagcgtgatcaagcccttcgaggagaaggccgccaagagaatcatgatcatctgcaaggccctgaacagcaacctgcagggctgcgtgaccgagaacgagaacgaccccatcaccaacatcgagcccttcttcgtgagcgtggccctgtacgacctgagagacagcagaaagatcagcgccgacttccacgtggacctgaaccacgccgccgtgagacagatgctgctgggcgccagcgtggccctggagaacggcaacatcgacaccatcacccccagacagagcgaggagccccacatcaagggcctgcccgaggagtggctgaagttccccaagcaggccgtgttcagcgtgagcaacccccacagcgagatcgtgctggtggccaagatcgagaaggtgctgatgggcaacatcgccagcggcgccgagccctacatcaagaaccccgacagcaacaagtacgcccagaagatcctgaagagcaacagacagttctgcagcaagctgggcaagtacagaatgcccttcgcctgggccgtgagaagcgtgttcaaggacaaccagggcaacgtggacagagacagcagattcagccccctgttcagacaggagagcagcaagatcagcaccgaggacctggtgaagctggtgagcgactacagaagagccgacagaatcagcaagatgcagaccatccccggcagcctggacatcgccgtggacaacgtgcccctggagcaccccaactgcgtgaccagcagcttcatccccgtgaagcccttcaacatgatggcccagaccgagcccaccgtggaggtggaggagttcgtgtacgacagcaccaagtactgcagaccctacagagtgtacaagaaccagatctacatctaccccaagcacctgaagtacgacagccagaagtgcttcaacaaggccagaaacatcaccgtgtgcatcgagttcaagaacagcgacgaggagagcgccaagcccctgaagtgcatctacggcaagcccggcggccccctgttcaccagcgccgcctacaccgccgtgctgcaccacagccagaaccccgacttcagcgacgaggtgaagatcgagctgcccacccagctgcacgagaagcaccacatcctgttcagcttctaccacgtgacctgcgacatcaacgccaaggccaacgccaagaagaaggaggccctggagaccagcgtgggctacgcctggctgcccctgatgaagcacgaccagatcgccagccaggagtacaacatccccatcgccaccagcctgccccccaactacctgagcttccaggacagcgccagcggcaagcacggcggcagcgacatcaagtgggtggacggcggcaagcccctgttcaaggtgagcaccttcgtggtgagcaccgtgaacacccaggacccccacgtgaacgccttcttccaggagtgccagaagagagagaaggacatgagccagagccccaccagcaacttcatcagaagctgcaagaacctgctgaacgtggagaagatccacgccatcatgagcttcctgcccatcatcctgaaccagctgttcaaggtgctggtgcagaacgaggaggacgagatcaccaccaccgtgaccagagtgctgaccgacatcgtggccaagtgccacgaggagcagctggaccacagcgtgcagagctacatcaagttcgtgttcaagaccagagcctgcaaggagagaaccgtgcacgaggagctggccaagaacgtgaccggcctgctgaagagcaacgacagcaccaccgtgaagcacgtgctgaagcacagctggttcttcttcgccatcatcctgaagagcatggcccagcacctgatcgacaccaacaagatccagctgcccagaccccagagattccccgagagctaccagaacgagctggacaacctggtgatggtgctgagcgaccacgtgatctggaagtacaaggacgccctggaggagaccagaagagccaaccacagcgtggccagattcctgaagagatgcttcaccttcatggacagaggctacgtgttcaagatggtgaacaactacatcagcatgttcagcagcggcgacctgaagaccctgtgccagtacaagttcgacttcctgcaggaggtgtgccagcacgagcacttcatccccctgtgcctgcccatcagaagcgccaacatccccgaccccctgacccccagcgagagcacccaggagctgcacgccagcgacatgcccgagtacagcgtgaccaacgagttctgcagaaagcacttcctgatcggcatcctgctgagagaggtgggcttcgccctgcaggaggaccaggacgtgagacacctggccctggccgtgctgaagaacctgatggccaagcacagcttcgacgacagatacagagagcccagaaagcaggcccagatcgccagcctgtacatgcccctgtacggcatgctgctggacaacatgcccagaatctacctgaaggacctgtaccccttcaccgtgaacaccagcaaccagggcagcagagacgacctgagcaccaacggcggcttccagagccagaccgccatcaagcacgccaacagcgtggacaccagcttcagcaaggacgtgctgaacagcatcgccgccttcagcagcatcgccatcagcaccgtgaaccacgccgacagcagagccagcctggccagcctggacagcaaccccagcaccaacgagaagagcagcgagaagaccgacaactgcgagaagatccccagacccctgagcctgatcggcagcaccctgagattcgacaagctggaccaggccgagaccagaagcctgctgatgtgcttcctgcacatcatgaagaccatcagctacgagaccctgatcgcctactggcagagagcccccagccccgaggtgagcgacttcttcagcatcctggacgtgtgcctgcagaacttcagatacctgggcaagagaaacatcatcagaaagatcgccgccgccttcaagttcgtgcagagcacccagaacaacggcaccctgaagggcagcaaccccagctgccagaccagcggcctgctgagccagtggatgcacagcaccagcagccacgagggccacaagcagcacagaagccagaccctgcccatcatcagaggcaagaacgccctgagcaaccccaagctgctgcagatgctggacaacaccatgaccagcaacagcaacgagatcgacatcgtgcaccacgtggacaccgaggccaacatcgccaccgaggtgtgcctgaccatcctggacctgctgagcctgttcacccagacccaccagagacagctgcagcagtgcgactgccagaacagcctgatgaagagagtgttcgacacctacatgctgttcttccaggtgaaccagagcgccaccgccctgaagcacgtgttcgccagcctgagactgttcgtgtgcaagttccccagcgccttcttccagggccccgccgacctgtgcggcagcttctgctacgaggtgctgaagtgctgcaaccacagaagcagaagcacccagaccgaggccagcgccctgctgtacttcttcatgagaaagaacttcgagttcaacaagcagaagagcatcgtgagaagccacctgcagctgatcaaggccgtgagccagctgatcgccgacgccggcatcggcggcagcagattccagcacagcctggccatcaccaacaacttcgccaacggcgacaagcagatgaagaacagcaacttccccgccgaggtgaaggacctgaccaagagaatcagaaccgtgctgatggccaccgcccagatgaaggagcacgagaaggaccccgagatgctggtggacctgcagtacagcctggccaacagctacgccagcacccccgagctgagaagaacctggctggagagcatggccaagatccacgccagaaacggcgacctgagcgaggccgccatgtgctacatccacatcgccgccctgatcgccgagtacctgaagagaaagggctactggaaggtggagaagatctgcaccgccagcctgctgagcgaggacacccacccctgcgacagcaacagcctgctgaccacccccagcggcggcagcatgttcagcatgggctggcccgccttcctgagcatcacccccaacatcaaggaggagggcgccatgaaggaggacagcggcatgcaggacaccccctacaacgagaacatcctggtggagcagctgtacatgtgcgtggagttcctgtggaagagcgagagatacgagctgatcgccgacgtgaacaagcccatcatcgccgtgttcgagaagcagagagacttcaagaagctgagcgacctgtactacgacatccacagaagctacctgaaggtggccgaggtggtgaacagcgagaagagactgttcggcagatactacagagtggccttctacggccagggcttcttcgaggaggaggagggcaaggagtacatctacaaggagcccaagctgaccggcctgagcgagatcagccagagactgctgaagctgtacgccgacaagttcggcgccgacaacgtgaagatcatccaggacagcaacaaggtgaaccccaaggacctggaccccaagtacgcctacatccaggtgacctacgtgacccccttcttcgaggagaaggagatcgaggacagaaagaccgacttcgagatgcaccacaacatcaacagattcgtgttcgagacccccttcaccctgagcggcaagaagcacggcggcgtggccgagcagtgcaagagaagaaccatcctgaccaccagccacctgttcccctacgtgaagaagagaatccaggtgatcagccagagcagcaccgagctgaaccccatcgaggtggccatcgacgagatgagcaagaaggtgagcgagctgaaccagctgtgcaccatggaggaggtggacatgatcagactgcagctgaagctgcagggcagcgtgagcgtgaaggtgaacgccggccccatggcctacgccagagccttcctggaggagaccaacgccaagaagtaccccgacaaccaggtgaagctgctgaaggagatcttcagacagttcgccgacgcctgcggccaggccctggacgtgaacgagagactgatcaaggaggaccagctggagtaccaggaggagctgagaagccactacaaggacatgctgagcgagctgagcaccgtgatgaacgagcagatcaccggcagagacgacctgagcaagagaggcgtggaccagacctgcaccagagtgatcagcaaggccacccccgccctgcccaccgtgagcatcagcagcagcgccgaggtgtag

SEQ ID NO: 181613 - DNA, 7260 bp, Artificial Sequence
  derived and/or modified sequence
aaggttggcgcggggaagaccggcgggaggcgcgccccgggcccgcggcgcgattggcgtgaccggcgatggccggtgagcggacccgcaggttcacccggagcctgttgagacctgggcaggcggccgagctccggcacagcgccgcgtccgccgccgcggtggcagtcagcagccggcagcagcagcggcaagaaaagcctaggcttctcgagcctttggattatgagactgtcattgaagaacttgaaaagacctaccggaatgatcctcttcaagatctcttgttcttccccagtgatgacttttcagcagccacagtttcctgggatatccgcacgttgtactcaacagtacctgaagatgcagagcacaaggcagaaaatttactggttaaggaggcttgtaaattttatagttcccagtggcatgtggtaaactacaaatatgaacaatattctggagacattcgacagctaccccgagcagaatacaaaccagagaagcttccttcacattcctttgagattgaccatgaagatgctgataaggatgaagataccacttcccactcgtcttccaaggggggtggaggagcgggaggaactggtgttttcaagtccggctggctctacaaggggaattttaacagcaccgtgaacaacaccgttactgttcggtcattcaaaaagcgctacttccagctgactcagttaccagataactcctacattatgaacttttacaaagatgagaaaatatccaaagaacccaaaggatgcatctttttggattcctgtacaggagtggtgcagaataacagactaagaaaatatgcctttgaattgaaaatgaatgatctgacctattttgtgctggcagctgaaacagagtcagatatggatgaatggatccacaccctcaaccgcattctgcaaatcagtcctgaggggcccctccaagggaggaggagcacagagctcactgatctgggtctggattcgctggataattctgtaacttgtgaatgcacgccagaggaaacagattcttcagagaacaacctacacgcagactttgcaaagtacctcacagaaacagaagatactgtaaaaacaactcgaaacatggagaggctaaatctgttctctctagatccagacatagataccttgaaacttcaaaaaaaagatctcttggaacctgagtctgtgatcaaaccatttgaagaaaaagctgccaagagaatcatgatcatctgtaaagccctcaactcaaatcttcagggatgtgttacggagaatgaaaatgatccgataacgaatattgagcctttttttgtgagtgtggcactttatgacctcagagacagcaggaagatttctgctgattttcatgtggatctaaaccatgctgctgtcagacagatgctcttgggggcttctgtggctttggaaaatggcaacatcgacaccatcactccaagacaatcagaagaacctcacatcaagggacttccagaggaatggctaaaatttccaaagcaggctgtattttctgtaagcaatccacattctgaaattgttttggtggccaaaatcgaaaaagtcttgatgggaaacattgcaagtggtgccgaaccttatattaagaacccagactccaacaagtatgcacaaaagatactaaaatccaacagacaattctgcagcaaattgggaaaataccgtatgccttttgcttgggcagtaagatcagtatttaaggacaaccagggaaatgtggacagagactcaagattttcaccattgtttagacaagaaagtagcaagatttcaactgaggacctagttaaactagtatcagattatagaagggccgacagaataagcaaaatgcagaccattcctggaagcctggatattgctgttgacaacgttcccttggagcatccaaattgtgtaacatcgtcctttatccctgtcaagcctttcaacatgatggctcaaacagaacccacagtggaggtggaagaatttgtttacgattcaacaaagtattgtcggccttacagagtatataaaaatcaaatttatatttaccccaaacacctcaagtatgatagccagaaatgcttcaacaaggcacggaatataactgtgtgcattgaattcaaaaattcagatgaagaaagtgccaagcccctgaagtgtatttatggaaaacctggagggcccctcttcacctcagccgcctacacagcagttctgcaccactctcagaatccggatttctcagatgaggtgaaaattgagctaccaacacaactccatgagaaacaccatattttgttttctttttatcacgtcacctgtgacatcaatgcaaaagctaatgccaaaaagaaggaggctctggaaacgtcagttggatatgcttggcttcctctgatgaaacacgatcagatagcttctcaagagtacaacatcccaatagcaacaagtctgcctcctaattatttaagctttcaagattctgcaagtggaaagcatggtgggagtgacattaaatgggttgatggtggcaaaccacttttcaaagtgtcgacatttgttgtatcaacagtaaatactcaggatccacatgtgaatgcatttttccaagagtgccaaaaaagagagaaagatatgtctcagtcacctacctcaaatttcatccgctcttgtaagaacttattgaatgtggaaaagattcatgcaatcatgagttttctgcctataattttgaatcagctcttcaaagttctggtacagaatgaggaagatgaaataactacaactgtcaccagggttctgaccgacattgtggccaagtgccatgaggagcagctggatcattctgtccagtcatatattaagttcgtgttcaagaccagggcatgcaaggagaggactgtacatgaggaactggctaaaaatgtgactggtcttttgaaatcaaatgactcaacaacagtaaagcatgtcctaaagcattcctggttcttctttgcaattatcctaaaatcgatggcacagcacttgattgacacaaataaaatccagcttccccggcctcagagatttcctgaatcttaccaaaatgaattggacaatcttgtcatggtcctatccgaccatgtgatttggaaatacaaggatgcacttgaagaaacaagaagggcaaaccacagcgttgccagatttctcaagcgctgctttacatttatggaccgagggtatgtgtttaagatggtcaacaattacatcagcatgttctcctccggtgaccttaagaccttgtgccagtataaatttgattttcttcaagaagtatgtcaacatgaacactttatccctttgtgtctgcccataagatcagcaaacattccagatcctttgacaccttcagaatcgactcaagagttacatgcatcagatatgcctgaatattcagtcacaaatgaattttgtcgcaaacacttcttaatcggaattctgctccgagaagttggctttgccctgcaggaagaccaagatgtcagacacttagctttagctgtcctaaaaaatctaatggctaagcattcatttgatgatcgatacagagagccaagaaagcaggcccagatagcaagtttatacatgcccctgtacggcatgctcctggacaatatgccaaggatttatctgaaggacctgtatccttttactgtcaatacatctaatcaggggtctagagatgatctaagcaccaatggaggatttcaaagccagacagctatcaaacatgcaaactctgtggatacatcattttctaaagatgttttaaattccatagcagcattttcatcaatagctatttctacagtaaaccatgctgactccagagcatctttagcaagtcttgactccaatccaagtaccaatgagaagagcagtgagaagacggacaactgtgaaaagatcccaagacccttgtctttgattggctcaactcttcgatttgacaagttagatcaagcagaaaccaggagtctcctgatgtgttttcttcacattatgaaaacgatttcgtacgagactctgattgcctactggcagagagctcccagcccagaggtgtccgacttcttcagcatcttggacgtttgtcttcaaaatttcagatacctaggaaaacgcaacataataagaaaaattgctgctgcatttaaatttgtgcagtccacccagaacaatggaactctcaaaggatccaatccttcctgccagacatcaggtctcttgtcacaatggatgcactccacttccagtcatgaaggccataagcagcacagatcacaaactttacctataattcgaggcaaaaatgcactttctaaccccaaactcttacagatgttagacaataccatgaccagcaactccaatgaaatagacatcgtgcatcatgtagacactgaggccaatatagctacggaggtttgcctcactattctggacctgttatccctcttcacacagactcatcagagacaactccaacaatgtgactgtcaaaattcattgatgaaaagggtctttgatacctacatgctctttttccaagtcaatcagtcagccacagcgctgaagcatgtgtttgcctccttgagactgtttgtatgcaagtttccttcagcgttctttcaagggcctgctgacctctgtggatcattctgttacgaagtcctaaaatgctgtaaccacaggtcacggtcaactcagacagaagcctcagcccttctgtactttttcatgaggaagaattttgaatttaacaagcagaagtcaattgtccggtcccacttacaactcatcaaagctgtgagccagttaatagccgatgctgggattggaggctctcggtttcaacattcgcttgcaattaccaataatttcgccaatggagataagcaaatgaaaaacagcaatttcccagcagaggtgaaggacctgactaagcgtataaggactgttttgatggccacagctcagatgaaggagcacgagaaggaccccgagatgctggtggatctccagtacagcctggcaaactcctacgcaagcactcctgaactacgcaggacctggctggaaagtatggccaagattcatgccagaaacggagatttatctgaggctgccatgtgttacatccatattgctgctctcattgcagagtatctgaaaagaaagggttactggaaagtggaaaagatttgcacagcatccctgctctcggaggatacccacccctgtgatagcaactcattactaacaactcccagtggaggaagcatgttctctatgggatggccagcttttttgagcattacaccaaacattaaggaagaaggagcgatgaaagaggattctggaatgcaagatacaccatacaatgagaatatcctggtggagcagctatacatgtgtgtggagtttctctggaagtctgagcgatatgaactcattgctgatgtcaacaagcccatcattgctgtctttgagaaacaacgagacttcaaaaaattgtcagatctctactacgacattcatcggtcatatctgaaagtggcagaggtggtgaattcggagaagcggctgtttggtcgctactatcgtgtggcattttatgggcagggcttttttgaagaagaagaaggtaaagagtatatttataaagagcctaagctgacaggtctgtccgagatttcccaaagattactcaagctctatgcagataaatttggagcagacaatgtgaagataatccaggattccaacaaggtaaaccccaaggatttggaccccaaatatgcctacatccaggtgacctatgtgacgccgttctttgaggaaaaggaaatcgaagaccggaagacagatttcgaaatgcaccacaacatcaaccgctttgtcttcgagacacccttcacgctgtcgggcaagaagcacggtggggtggcggagcagtgcaagcggcggacgatcctgacaacgagtcacctgttcccctacgtgaagaagagaatacaagtaattagccaatcgagcacagaactgaatccaattgaagtggcaattgacgagatgtccaagaaggtttctgagcttaatcagctttgcacaatggaagaagtggacatgatcagactgcagctcaaactgcaaggaagtgtcagcgtgaaggttaatgctgggccaatggcctatgcacgagcttttcttgaagaaaccaatgcaaagaagtaccctgacaaccaagtaaagcttttgaaggagatcttcaggcaatttgcagatgcatgtgggcaggcccttgacgtgaatgagcgcctcatcaaagaggaccagctggagtaccaggaagaactgaggtcccactacaaggacatgctcagcgaactctccacagtcatgaatgagcagattacgggcagggacgacctgtcaaagcgcggagtggaccaaacctgcactcgagtaattagcaaagcaactccggccctacccacggtctccatctcatctagtgctgaagtctgagggctctgcagcatcagacccacctctaagagaactttctgaatttgcagctaatctcggggaagagaaagataggtttaatttatttgaagttttcatggtgttaatatttttgtttacctcgctagcttcagaattttgccaacctctgaatttgcacattttgtataatttttttttctttgagcagtgttgatcaagccaggttgaatatttgccatgaaattccagtgaatgtgtagctcaaatgcaaaccctaagtttgctgtcagttattgtatggtcagtaccccagtcctagtacacatattttaaaggttaaagtgaatgtttttgtaacatttaagcatatttcagatgtaaataaaagattgtaaaatatacggtttttaccaaatttaaaagatcctttttagttaatactatgacagtactaaaaatatatgaataacatttcagataccattatattaaaatatttgtgtatgtgtacaaaagcgttgataaatactaatctttaaagtttgtggagttcctttatttgtaatatatgtgctcttaaaagcaatgggatgtgaaattatgaaagtattttattgttcatagaaataaaaaacacagttactttgca

SEQ ID NO: 181614 - protein, 883 aa, Artificial Sequence
  derived and/or modified sequence
MASPGAGRAPPELPERNCGYREVEYWDQRYQGAADSAPYDWFGDFSSFRALLEPELRPEDRILVLGCGNSALSYELFLGGFPNVTSVDYSSVVVAAMQARHAHVPQLRWETMDVRKLDFPSASFDVVLEKGTLDALLAGERDPWTVSSEGVHTVDQVLSEVGFQKGTRQLLGSRTQLELVLAGASLLLAALLLGCLVALGVQYHRDPSHSTCLTEACIRVAGKILESLDRGVSPCEDFYQFSCGGWIRRNPLPDGRSRWNTFNSLWDQNQAILKHLLENTTFNSSSEAEQKTQRFYLSCLQVERIEELGAQPLRDLIEKIGGWNITGPWDQDNFMEVLKAVAGTYRATPFFTVYISADSKSSNSNVIQVDQSGLFLPSRDYYLNRTANEKVLTAYLDYMEELGMLLGGRPTSTREQMQQVLELEIQLANITVPQDQRRDEEKIYHKMSISELQALAPSMDWLEFLSFLLSPLELSDSEPVVVYGMDYLQQVSELINRTEPSILNNYLIWNLVQKTTSSLDRRFESAQEKLLETLYGTKKSCVPRWQTCISNTDDALGFALGSLFVKATFDRQSKEIAEGMISEIRTAFEEALGQLVWMDEKTRQAAKEKADAIYDMIGFPDFILEPKELDDVYDGYEISEDSFFQNMLNLYNFSAKVMADQLRKPPSRDQWSMTPQTVNAYYLPTKNEIVFPAGILQAPFYARNHPKALNFGGIGVVMGHELTHAFDDQGREYDKEGNLRPWWQNESLAAFRNHTACMEEQYNQYQVNGERLNGRQTLGENIADNGGLKAAYNAYKAWLRKHGEEQQLPAVGLTNHQLFFVGFAQVWCSVRTPESSHEGLVTDPHSPARFRVLGTLSNSRDFLRHFGCPVGSPMNPGQLCEVW

SEQ ID NO: 181615 - DNA, 2652 bp, Artificial Sequence
  derived and/or modified sequence
atggccagccccggcgccggcagagccccccccgagctgcccgagagaaactgcggctacagagaggtggagtactgggaccagagataccagggcgccgccgacagcgccccctacgactggttcggcgacttcagcagcttcagagccctgctggagcccgagctgagacccgaggacagaatcctggtgctgggctgcggcaacagcgccctgagctacgagctgttcctgggcggcttccccaacgtgaccagcgtggactacagcagcgtggtggtggccgccatgcaggccagacacgcccacgtgccccagctgagatgggagaccatggacgtgagaaagctggacttccccagcgccagcttcgacgtggtgctggagaagggcaccctggacgccctgctggccggcgagagagacccctggaccgtgagcagcgagggcgtgcacaccgtggaccaggtgctgagcgaggtgggcttccagaagggcaccagacagctgctgggcagcagaacccagctggagctggtgctggccggcgccagcctgctgctggccgccctgctgctgggctgcctggtggccctgggcgtgcagtaccacagagaccccagccacagcacctgcctgaccgaggcctgcatcagagtggccggcaagatcctggagagcctggacagaggcgtgagcccctgcgaggacttctaccagttcagctgcggcggctggatcagaagaaaccccctgcccgacggcagaagcagatggaacaccttcaacagcctgtgggaccagaaccaggccatcctgaagcacctgctggagaacaccaccttcaacagcagcagcgaggccgagcagaagacccagagattctacctgagctgcctgcaggtggagagaatcgaggagctgggcgcccagcccctgagagacctgatcgagaagatcggcggctggaacatcaccggcccctgggaccaggacaacttcatggaggtgctgaaggccgtggccggcacctacagagccacccccttcttcaccgtgtacatcagcgccgacagcaagagcagcaacagcaacgtgatccaggtggaccagagcggcctgttcctgcccagcagagactactacctgaacagaaccgccaacgagaaggtgctgaccgcctacctggactacatggaggagctgggcatgctgctgggcggcagacccaccagcaccagagagcagatgcagcaggtgctggagctggagatccagctggccaacatcaccgtgccccaggaccagagaagagacgaggagaagatctaccacaagatgagcatcagcgagctgcaggccctggcccccagcatggactggctggagttcctgagcttcctgctgagccccctggagctgagcgacagcgagcccgtggtggtgtacggcatggactacctgcagcaggtgagcgagctgatcaacagaaccgagcccagcatcctgaacaactacctgatctggaacctggtgcagaagaccaccagcagcctggacagaagattcgagagcgcccaggagaagctgctggagaccctgtacggcaccaagaagagctgcgtgcccagatggcagacctgcatcagcaacaccgacgacgccctgggcttcgccctgggcagcctgttcgtgaaggccaccttcgacagacagagcaaggagatcgccgagggcatgatcagcgagatcagaaccgccttcgaggaggccctgggccagctggtgtggatggacgagaagaccagacaggccgccaaggagaaggccgacgccatctacgacatgatcggcttccccgacttcatcctggagcccaaggagctggacgacgtgtacgacggctacgagatcagcgaggacagcttcttccagaacatgctgaacctgtacaacttcagcgccaaggtgatggccgaccagctgagaaagccccccagcagagaccagtggagcatgaccccccagaccgtgaacgcctactacctgcccaccaagaacgagatcgtgttccccgccggcatcctgcaggcccccttctacgccagaaaccaccccaaggccctgaacttcggcggcatcggcgtggtgatgggccacgagctgacccacgccttcgacgaccagggcagagagtacgacaaggagggcaacctgagaccctggtggcagaacgagagcctggccgccttcagaaaccacaccgcctgcatggaggagcagtacaaccagtaccaggtgaacggcgagagactgaacggcagacagaccctgggcgagaacatcgccgacaacggcggcctgaaggccgcctacaacgcctacaaggcctggctgagaaagcacggcgaggagcagcagctgcccgccgtgggcctgaccaaccaccagctgttcttcgtgggcttcgcccaggtgtggtgcagcgtgagaacccccgagagcagccacgagggcctggtgaccgacccccacagccccgccagattcagagtgctgggcaccctgagcaacagcagagacttcctgagacacttcggctgccccgtgggcagccccatgaaccccggccagctgtgcgaggtgtggtag

SEQ ID NO: 181616 - DNA, 3445 bp, Artificial Sequence
  derived and/or modified sequence
atggcctctccaggggcaggtagggcgcctccggagttaccggagcggaactgcgggtaccgcgaagtcgagtactgggatcagcgctaccaaggcgcagccgattctgccccctacgattggttcggggacttctcctccttccgtgccctcctagagccggagctgcggcccgaggaccgtatccttgtgctaggttgcgggaacagtgccctgagctacgagctgttcctcggaggcttccctaatgtgaccagtgtggactactcatcagtcgtggtggctgccatgcaggctcgccatgcccatgtgccgcagctgcgctgggagaccatggatgtgcggaagctggacttccccagtgcttcttttgatgtggtgctcgagaagggcacgctggatgccctgctggctggggaacgagatccctggaccgtgtcctctgaaggtgtccacactgtggaccaggtgttgagtgaggtgggattccagaaggggacaagacagctgttaggctcacgcacgcagctggagctggtcttagcaggtgcctctctactgctggctgcactgcttctgggctgccttgtggccctaggggtccagtaccacagagacccatcccacagcacctgccttacagaggcctgcattcgagtggctggaaaaatcctggagtccctggaccgaggggtgagcccctgtgaggacttttaccagttctcctgtgggggctggattcggaggaaccccctgcccgatgggcgttctcgctggaacaccttcaacagcctctgggaccaaaaccaggccatactgaagcacctgcttgaaaacaccaccttcaactccagcagtgaagctgagcagaagacacagcgcttctacctatcttgcctacaggtggagcgcattgaggagctgggagcccagccactgagagacctcattgagaagattggtggttggaacattacggggccctgggaccaggacaactttatggaggtgttgaaggcagtagcagggacctacagggccaccccattcttcaccgtctacatcagtgccgactctaagagttccaacagcaatgttatccaggtggaccagtctgggctctttctgccctctcgggattactacttaaacagaactgccaatgagaaagtgctcactgcctatctggattacatggaggaactggggatgctgctgggtgggcggcccacctccacgagggagcagatgcagcaggtgctggagttggagatacagctggccaacatcacagtgccccaggaccagcggcgcgacgaggagaagatctaccacaagatgagcatttcggagctgcaggctctggcgccctccatggactggcttgagttcctgtctttcttgctgtcaccattggagttgagtgactctgagcctgtggtggtgtatgggatggattatttgcagcaggtgtcagagctcatcaaccgcacggaaccaagcatcctgaacaattacctgatctggaacctggtgcaaaagacaacctcaagcctggaccgacgctttgagtctgcacaagagaagctgctggagaccctctatggcactaagaagtcctgtgtgccgaggtggcagacctgcatctccaacacggatgacgcccttggctttgctttggggtccctcttcgtgaaggccacgtttgaccggcaaagcaaagaaattgcagaggggatgatcagcgaaatccggaccgcatttgaggaggccctgggacagctggtttggatggatgagaagacccgccaggcagccaaggagaaagcagatgccatctatgatatgattggtttcccagactttatcctggagcccaaagagctggatgatgtttatgacgggtacgaaatttctgaagattctttcttccaaaacatgttgaatttgtacaacttctctgccaaggttatggctgaccagctccgcaagcctcccagccgagaccagtggagcatgaccccccagacagtgaatgcctactaccttccaactaagaatgagatcgtcttccccgctggcatcctgcaggcccccttctatgcccgcaaccaccccaaggccctgaacttcggtggcatcggtgtggtcatgggccatgagttgacgcatgcctttgatgaccaagggcgcgagtatgacaaagaagggaacctgcggccctggtggcagaatgagtccctggcagccttccggaaccacacggcctgcatggaggaacagtacaatcaataccaggtcaatggggagaggctcaacggccgccagacgctgggggagaacattgctgacaacggggggctgaaggctgcctacaatgcttacaaagcatggctgagaaagcatggggaggagcagcaactgccagccgtggggctcaccaaccaccagctcttcttcgtgggatttgcccaggtgtggtgctcggtccgcacaccagagagctctcacgaggggctggtgaccgacccccacagccctgcccgcttccgcgtgctgggcactctctccaactcccgtgacttcctgcggcacttcggctgccctgtcggctcccccatgaacccagggcagctgtgtgaggtgtggtagacctggatcaggggagaaatggccagctgtcaccagacctggggcagctctcctgacaaagctgtttgctcttgggttgggaggaagcaaatgcaagctgggctgggtctagtccctcccccccacaggtgacatgagtacagaccctcctcaatcaccacattgtgcctctgctttgggggtgcccctgcctccagcagagcccccaccattcactgtgacatctttccgtgtcaccctgcctggaagaggtctgggtggggaggccagttcccataggaaggagtctgcctcttctgtccccaggctcactcagcctggcggccatggggcctgccgtgcctgccccactgtgacccacaggcctgggtggtgtacctcctggacttctccccaggctcactcagtgcgcacttaggggtggactcagctctgtctggctcaccctcacgggctacccccacctcaccctgtgctccttgtgccactgctcccagtgctgctgctgaccttcactgacagctcctagtggaagcccaagggcctctgaaagcctcctgctgcccactgtttccctgggctgagaggggaagtgcatatgtgtagcgggtactggttcctgtgtcttagggcacaagccttagcaaatgattgattctccctggacaaagcaggaaagcagatagagcagggaaaaggaagaacagagtttatttttacagaaaagagggtgggagggtgtggtcttggcccttataggaccctgtgccaataaacagacatgcatccgtca

SEQ ID NO: 181617 - DNA, 2652 bp, Artificial Sequence
  derived and/or modified sequence
atggcttcaccgggcgcagggcgcgctccacccgaactgcctgagcggaattgtggctaccgcgaggtggaatattgggatcaacgataccaaggggccgcagattcagcaccctacgattggtttggtgatttctctagcttcagggcactgctggaacctgagctccgcccagaggataggatcctagtgctaggatgcggtaactctgctctgagttacgaactgttcctggggggcttccccaatgttacctcagtggactattcttcagtggtggttgcggccatgcaggcgcggcacgcccacgtcccacagctgcggtgggagactatggatgtcagaaaattggattttccttcagcatcttttgatgtcgtgctggaaaagggaaccctcgacgccctgctcgccggagagagagacccctggaccgtgagctcagagggagtccacactgtggatcaggttttatctgaggtgggtttccaaaaggggactagacaactgctcggttctagaactcaactcgagctagtcctggcaggcgccagcctcttactggcagccttgctgctgggctgcctcgtggccttgggagtgcagtatcatcgcgaccccagtcattccacatgcctgaccgaggcgtgtattagagtagcaggaaagattctggagagtcttgacagaggtgtttcaccatgcgaagacttctatcagttctcctgcggaggctggatcaggcggaatcctctgcccgatggaaggagcaggtggaacactttcaatagtctgtgggaccaaaaccaggcaatcctcaagcacctgctggaaaacaccaccttcaattcaagctcagaggcggagcagaagacgcaacgtttttacctatcctgcctacaggttgaaagaatcgaagagctgggggctcaaccattgagagacctaatcgaaaaaattggaggctggaacattacaggtccctgggatcaggataatttcatggaagtgctgaaggctgtcgcaggcacataccgcgccaccccgtttttcacagtatacattagcgctgacagcaagtccagtaacagcaacgtgatacaagtcgaccagtctgggttatttttgcctagccgggactactatctcaatcgtaccgctaacgaaaaagtcctcacagcatatttggactatatggaagagcttggtatgctgctgggaggacggccgactagcaccagggagcagatgcagcaggtgctggaactggaaattcagttggcaaatataacagtaccccaggatcagcggagggacgaagaaaaaatctaccacaagatgtccatatccgagctacaggcccttgctccctccatggactggctcgaattcctttcatttctgctgtcacctctcgaactttccgatagcgaacccgtggtcgtttacggcatggattacctccagcaggtttccgagttgatcaataggacagagccatccatactgaacaactatctcatatggaacctcgtccagaaaaccacttccagcctggaccgcaggtttgaatccgcacaggagaagttgctggaaacgctttacggcacaaaaaagtcatgtgtgcccaggtggcagacgtgcatttctaataccgacgacgcactcggctttgctctagggtcgctctttgtaaaggcgacattcgatagacagagtaaagagattgcagaaggaatgattagcgaaatccgcactgccttcgaggaagcgctaggtcaacttgtgtggatggatgaaaaaacccgccaggcagctaaggaaaaggccgacgctatctacgatatgatcggcttcccggattttattctggagcctaaggagctcgatgatgtgtacgacgggtatgagatctctgaggatagtttctttcaaaacatgctgaatttatacaattttagtgccaaggtgatggcggaccagttgaggaagcctccatctagagatcagtggtctatgaccccccagacagtgaatgcgtattacttgccaacaaagaatgagattgtatttcccgccgggattctgcaggcaccattttacgccaggaatcacccgaaggccctgaactttgggggaataggagtcgtgatgggtcacgaactgacacacgcgttcgacgatcaaggcagagaatatgataaagaagggaatcttcgtccctggtggcagaatgaatcactggcagcttttaggaaccatactgcttgcatggaagagcagtacaaccagtaccaggtgaacggtgagcggctcaatggacgacagactctgggagagaatatcgcagataatgggggacttaaagcggcctacaatgcctataaggcctggcttcgtaaacacggtgaggaacagcagttgccagccgtggggctgactaaccatcagctgttctttgtggggttcgctcaggtgtggtgcagcgtcaggacccctgaatcttctcatgaagggctggtgacagacccgcattcgcctgccagatttcgggtgctgggcacgttatccaacagccgggactttctccgacactttggatgcccggtgggtagtcctatgaatcctgggcagttatgtgaggtttggtag

SEQ ID NO: 181618 - DNA, 2652 bp, Artificial Sequence
  derived and/or modified sequence
atggccagccctggggccggccgggcccctcctgagctgcctgagaggaactgtggctaccgggaggtggagtactgggaccagcgctaccagggcgctgctgacagcgccccctatgactggtttggagacttcagcagcttccgggccctgctggagcctgagctgcggccagaagatcgcatcctggtgctgggctgcggcaacagcgccctgtcctatgagctgttcctgggcggcttccccaacgtgacctctgtggactacagctctgtggtggtggccgccatgcaggcccggcatgcccacgtgccccagctgcgctgggagaccatggatgtgaggaagctggacttccccagcgccagctttgatgtggtgctggagaagggcaccctggatgccctgctggccggggagcgggacccctggacagtgagcagcgagggcgtgcacacagtggaccaggtgctgtctgaggtgggcttccagaagggcacccggcagctgctgggcagcaggacccagctggagctggtgctggccggggccagcctgctgctggccgccctgctgctgggctgcctggtggccctgggcgtgcagtaccaccgggaccccagccacagcacctgcctgacagaggcctgcatccgggtggccggcaagatcctggagagcctggacagaggagtgagcccctgtgaggacttctaccagttcagctgtggcggctggatcagaagaaaccccctgcctgatggccgcagccgctggaacaccttcaacagcctgtgggaccagaaccaggccatcctgaagcacctgctggagaacaccaccttcaacagcagcagcgaggccgagcagaagacccagcgcttctacctgagctgcctgcaggtggagagaattgaggagctgggcgcccagcccctgcgggacctgattgagaagattggaggctggaacatcaccggcccctgggaccaggacaacttcatggaggtgctgaaggctgtggccggcacctaccgggccacccccttcttcaccgtgtacatctctgctgacagcaagagcagcaacagcaatgtcatccaggtggaccagagcggcctcttcctgcccagccgggactactacctgaacagaacagccaatgagaaggtgctgacagcctacctggactacatggaggagctgggcatgctgctgggcggccggcccaccagcacccgggagcagatgcagcaggtgctggagctggagatccagctggccaacatcaccgtgccccaggaccagaggagagatgaggagaagatctaccacaagatgagcatcagcgagctgcaggccctggcccccagcatggactggctggagttcctgtccttcctgctgagccccctggagctgagtgacagcgagcctgtggtggtgtatggcatggactacctgcagcaggtgtctgagctgatcaacagaacagagcccagcatcctgaacaactacctgatctggaacctggtgcagaagaccaccagcagcctggacagaagatttgaaagtgcccaggagaagctgctggagaccctgtatggcaccaagaagagctgtgtgccccgctggcagacctgcatcagcaacacagatgatgccctgggctttgccctgggcagcctgtttgtgaaggccacctttgaccggcagagcaaggagattgctgagggcatgatcagcgagatcagaacagcctttgaggaggccctgggccagctggtgtggatggatgagaagacccggcaggccgccaaggagaaggcagatgccatctatgacatgattggcttcccagacttcatcctggagcccaaggagctggatgatgtgtatgatggctatgagatcagcgaggacagcttcttccagaacatgctgaacctgtacaacttcagcgccaaggtgatggctgaccagctgaggaagccacccagccgggaccagtggagcatgaccccccagacagtgaatgcctactacctgcccaccaagaatgaaattgtgtttcctgctggcatcctgcaggcccccttctacgccaggaaccaccccaaggccctgaactttggaggcatcggcgtggtgatgggccacgagctgacccacgcctttgatgaccagggccgggagtatgacaaggagggcaacctgcggccctggtggcagaatgaaagcctggccgccttcaggaaccacacagcctgcatggaggagcagtacaaccagtaccaggtgaatggagagcggctgaatggccggcagaccctgggggagaacattgctgacaatggaggcctgaaggccgcctacaatgcctacaaggcctggctgaggaagcacggggaggagcagcagctgcctgctgtgggcctgaccaaccaccagctgttctttgtgggctttgcccaggtgtggtgcagcgtgaggaccccagagagcagccatgagggcctggtgacagacccccacagccctgcccgcttccgggtgctgggcaccctgagcaacagccgggacttcctgcggcacttcggctgccctgtgggcagccccatgaaccctggccagctgtgtgaggtgtggtag

SEQ ID NO: 181619 - DNA, 2652 bp, Artificial Sequence
  derived and/or modified sequence
atggccagccccggcgccggccgggccccccccgagctgcccgagaggaactgcggctaccgggaagtggaatattgggaccagcgttaccaaggcgcggcagactcagctccttatgattggttcggcgacttttcgtcgtttcgagctctgttggagcctgaactgaggccagaagatcggatcctggtcctgggctgtggaaatagtgcgttgtcctatgagctgtttctggggggcttccctaacgttacttccgtggactactcgtccgttgtggtcgccgccatgcaagcccgtcatgcccacgttcctcagctgaggtgggaaactatggacgtgaggaagctcgacttcccaagcgcaagcttcgacgtggtgttggagaagggcaccctagatgcactgctcgcgggcgagcgggatccttggactgtgtcatcagagggggtccacacagttgatcaagttctctctgaagtgggatttcagaaggggaccagacagcttctcggctctcggacacagctcgaattagtccttgcaggggcctctctgctgctggcggccctactgttgggctgtctggtggcactgggggtccagtatcatcgagaccccagccactctacatgtctgactgaagcctgcattcgtgttgcaggaaagatcctggaatctctggacaggggagtgtccccctgcgaagatttctatcagttcagctgtggcgggtggatccgtagaaatcctctgcctgacggcagaagccgatggaacacattcaatagcttgtgggaccagaatcaggccattctgaaacacttattggaaaacaccaccttcaacagctcatctgaggcagaacagaaaacgcaaaggttctacttgagctgtctgcaagtggaaaggatcgaggaactgggcgcacagcctcttagagacttgatcgagaaaatcggtggctggaacatcacaggtccctgggatcaggataatttcatggaagtgctaaaggccgtggccggaacttatagggcaactccgttctttacagtttacatctctgccgattcaaagtcctcaaacagtaatgtgattcaggtggatcagtccggtctgtttctgccctcccgggattactacctcaatcgcaccgccaacgagaaagtccttactgcatacctggattacatggaggagctgggcatgctcttaggggggcgtccaacttcaacccgggagcagatgcagcaggtgttggagcttgagattcagctggccaacatcactgtgcctcaagaccagaggcgggacgaagagaaaatatatcacaagatgagtatatctgagcttcaggctctggcccctagtatggactggctggagtttctttcttttctgctaagtcctctggagctaagtgacagcgagccagtggtcgtttatggtatggactacctgcagcaggtgtccgaactcattaatcgtacggagccatctatactgaataactacctgatttggaatctggttcaaaaaaccacatcatcactcgatcgccggttcgagtctgcccaggagaagctgctggaaacattatatggcaccaaaaaatcatgcgtcccccgctggcaaacctgcatttccaacacggatgacgccctgggattcgctctggggtcactttttgtgaaggccacattcgataggcagtcaaaagagatcgctgaagggatgatctctgagattcggacagcctttgaggaggcccttggccagttggtttggatggacgaaaagaccaggcaagcagcaaaagaaaaggcagatgcgatttacgatatgattgggttcccggacttcattcttgagccaaaggaactggacgatgtgtatgacggctacgagatttctgaagattccttttttcagaacatgttgaacctttataatttttctgctaaagttatggccgaccagctgaggaaacccccaagccgtgatcaatggagcatgactccccagaccgtgaatgcttactacctccccacaaagaatgagatcgttttcccagcaggaattctgcaagctcctttttatgcgcgtaatcatcctaaggccttgaactttggtgggatcggggtagtaatgggccatgaattgacccatgctttcgatgaccaagggcgggaatatgacaaggagggaaatttaagaccctggtggcagaacgagagcctggccgcatttagaaaccacactgcctgcatggaggagcagtacaatcagtatcaggtgaacggcgagcgccttaacgggcgccagacgctgggtgagaatattgcagacaatggcggcctgaaggcagcgtataacgcatacaaggcttggttgcgaaagcatggcgaagaacagcagctgccagccgtaggcctgaccaatcaccagctcttcttcgtcggattcgcacaggtgtggtgctctgttcgcactcccgaatcctctcatgaagggctcgtaaccgacccccactcgcctgcccgatttagggtccttgggactctatcaaactcccgcgattttctccggcactttggctgtccagtagggtcccccatgaatcccggccagctgtgcgaagtgtggtag

SEQ ID NO: 181620 - DNA, 2652 bp, Artificial Sequence
  derived and/or modified sequence
atggcaagcccaggggctggcagagcccctcccgaattacctgaacggaattgcggttacagagaggtggagtactgggaccagcgctaccagggggctgctgacagcgcgccatacgactggttcggagacttctctagctttagagcgctcctcgagcctgagttgcgacctgaagatcgcattctagtcctggggtgtggtaattccgccctatcatacgaattattcctggggggtttccccaatgttacaagtgtggattatagctccgttgtagttgctgcaatgcaggccagacacgcccacgtgccacagctgcgatgggagacaatggacgtgagaaaactggactttccctccgcctcgtttgatgtggtcctggagaagggcacactagacgcattgctggctggcgaaagagacccctggaccgtttcttcagaaggggtgcatactgtggatcaggtactatcagaggtgggctttcagaaaggcacccggcagctccttggttcccgcacccaacttgagctcgtgttagcaggggcatcgctcctcctggccgctctgctcttaggctgcctcgtcgccctaggagtgcagtatcaccgagatcctagtcactcaacatgtctgactgaggcgtgtattagagttgccggtaagatattggaatcactggaccgaggggttagcccctgcgaggacttttaccagttctcttgcgggggatggatccgtaggaacccactgcccgacggacgctcgaggtggaacacttttaacagcttatgggaccagaatcaggcaattcttaagcaccttctggaaaataccacctttaacagctccagcgaggccgagcagaaaacgcaaaggttttaccttagctgcttgcaagtcgagagaatcgaggagctgggtgcacagcctctgcgcgatctcatcgagaaaatcggaggatggaacattacgggcccttgggatcaggacaacttcatggaggtgttaaaagcagttgccggaacataccgagcaacccccttcttcacggtatatatttcagctgattccaaatccagtaattccaacgtgattcaggtggaccagtctggtctgttcctcccatctagggactattacttgaaccggaccgcaaatgaaaaggttctgacggcttacctcgactacatggaagagctgggaatgcttctgggtgggagacccacctccactcgagaacagatgcagcaggtcctcgaacttgagattcagctggccaatatcacagtgccccaggatcagcgcagggatgaggagaagatttaccacaaaatgagcataagcgagcttcaggctctcgctccgtctatggactggttagagttcttgtcctttctcctgagtccgctcgaactgagcgatagtgaaccggtagtggtctatggtatggactaccttcagcaagtgtccgagctgatcaatcgaacagaaccaagtatcctgaacaactatttaatctggaacctcgtgcaaaaaacaactagcagccttgatagacgattcgagtcagcccaggaaaagctgttagagaccctgtacggtactaagaagagctgtgtgcctagatggcagacatgcatctctaacacagatgacgccttagggtttgcactcggcagcctcttcgtcaaggccacatttgatcgccagagcaaggaaatagccgagggtatgattagtgagatccgcactgcctttgaagaagcactgggtcagctggtctggatggatgaaaagacacgtcaggcggctaaagagaaggcagatgctatttatgacatgatcggctttcctgacttcattctggagcccaaggagttggacgacgtgtacgacggctacgagattagcgaggattccttctttcaaaatatgctgaatctgtacaacttcagtgcaaaggtgatggccgaccagctgcggaagccccctagccgggaccagtggagtatgacccctcagaccgtcaacgcttactatttgccaactaagaatgaaatagtcttccccgcaggcatcttgcaggcaccattttatgctcggaatcatcctaaggccctcaacttcggtggaatcggagtcgttatgggccatgagctgacgcacgcgttcgacgaccagggcagggaatatgataaagaagggaacttgcgcccatggtggcagaacgagagtctggcagcatttcgcaatcatacggcctgtatggaagaacaatataaccagtatcaagtcaatggggaaaggctgaacggccgtcagacactcggggaaaatatcgctgataatggtgggctgaaagctgcatacaatgcgtacaaagcctggcttcggaaacatggcgaggagcagcagctgcccgcagtgggacttaccaatcaccagctgttcttcgttggattcgcacaggtatggtgtagcgtgcgcaccccagaaagctcgcatgagggactggtgacggatcctcattccccagccagatttagggtgctaggcacactaagtaatagcagggacttcctgaggcattttgggtgtccggtgggcagtcccatgaatcccggtcagctttgtgaagtttggtag

SEQ ID NO: 181621 - protein, 506 aa, Artificial Sequence
  derived and/or modified sequence
MPSKTKYNLVDDGHDLRIPLHNEDAFQHGICFEAKYVGSLDVPRPNSRVEIVAAMRRIRYEFKAKNIKKKKVSIMVSVDGVKVILKKKKKLLLLQKKEWTWDESKMLVMQDPIYRIFYVSHDSQDLKIFSYIARDGASNIFRCNVFKSKKKSQAMRIVRTVGQAFEVCHKLSLQHTQQNADGQEDGESERNSNSSGDPGRQLTGAERASTATAEETDIDAVEVPLPGNDVLEFSRGVTDLDAVGKEGGSHTGSKVSHPQEPMLTASPRMLLPSSSSKPPGLGTETPLSTHHQMQLLQQLLQQQQQQTQVAVAQVHLLKDQLAAEAAARLEAQARVHQLLLQNKDMLQHISLLVKQVQELELKLSGQNAMGSQDSLLEITFRSGALPVLCDPTTPKPEDLHSPPLGAGLADFAHPAGSPLGRRDCLVKLECFRFLPPEDTPPPAQGEALLGGLELIKFRESGIASEYESNTDESEERDSWSQEELPRLLNVLQRQELGDGLDDEIAV

SEQ ID NO: 181622 - DNA, 1521 bp, Artificial Sequence
  derived and/or modified sequence
atgccgagcaagactaagtataacctggtagatgacggacatgatttgaggatccccctgcacaatgaggatgctttccagcacggcatttgtttcgaggctaaatatgtgggatccctagacgtgccccgcccgaactctcgggtagagatagttgcagccatgcgacgtatcagatacgaattcaaagcaaaaaacatcaagaaaaagaaagtcagtataatggtgtcagtcgacggagtcaaagttattttgaaaaagaagaagaagctgctgctgctgcagaagaaggagtggacttgggacgaatcaaagatgctcgtgatgcaggatccaatttaccgtatattttacgtctctcatgacagtcaggatctcaagatatttagttatatagcccgggacggggcctccaacatcttcagatgtaatgtattcaaatcaaaaaagaaatcccaggcaatgcggattgtccggacggtgggccaggcgtttgaagtgtgtcacaagttaagcctgcagcacacgcagcagaacgcagacgggcaagaggacggcgaaagcgagcgcaactctaactctagcggcgaccccggcagacaattgaccggcgccgaaagagcttctacggctaccgcagaagaaacagacatcgacgcagtcgaggtacctctgcccggaaacgacgttctagagttctctcggggtgtcactgatctggacgccgttggaaaggaaggaggttcccacaccggctcgaaggtgtcacatccccaggaacctatgctcaccgcctcccctcggatgctgctgccttcttcttcgtcgaagcctcccggtcttgggacagagacgcccctgagcactcaccaccaaatgcagctgctgcagcagctattgcagcagcagcaacagcagacacaggtggccgtggctcaggtgcatctgctcaaagatcaattagcagcagaagctgccgcgcgcctcgaagctcaggcacgggttcatcagcttctgctacagaataaggacatgctgcagcacatcagcctcttagtcaaacaggtgcaggaactggaactgaagttgtccggacagaatgccatggggtcacaggacagtctgctggagatcaccttccgctcaggcgccctaccagtcctgtgcgatcctaccaccccgaagcccgaggatctgcatagccccccactaggagccggactcgcagactttgctcaccctgctggaagtcccctgggacggcgggattgtctcgtcaagttggaatgctttcggtttctccccccagaggataccccaccacccgctcagggtgaagcattgctgggcggcttagaactgatcaagttccgagaatccggcattgccagtgagtacgaaagtaacaccgacgaaagcgaagagagagactcttggagtcaagaagaactacccaggctgttaaatgttttgcagagacaggaacttggcgatggactggacgatgaaatcgcagtatag

SEQ ID NO: 181623 - DNA, 1521 bp, Artificial Sequence
  derived and/or modified sequence
atgcccagcaagaccaagtacaacctggtggatgatggccatgacctgcgcatccccctgcacaatgaagatgccttccagcacggcatctgctttgaggccaagtatgtgggcagcctggatgtgccccggcccaacagccgggtggagatcgtggccgccatgaggcgcatccgctatgagttcaaggccaagaacatcaagaagaagaaggtgtccatcatggtgtctgtggatggagtgaaggtgatcctgaagaagaagaagaagctgctgctgctgcagaagaaggagtggacctgggatgagagcaagatgctggtgatgcaggaccccatctaccgcatcttctacgtgtcccatgacagccaggacctgaagatcttctcctacatcgccagagatggagccagcaacatcttccgctgcaatgtgttcaagagcaagaagaagagccaggccatgagaattgtgaggacagtgggccaggcctttgaggtgtgccacaagctgagcctgcagcacacccagcagaatgctgatggccaggaggatggagagagcgagaggaacagcaacagcagcggggaccccggccggcagctgactggagctgagcgggccagcacagccacagctgaggagacagacattgatgctgtggaggtgcccctgcctggaaatgatgtgctggagttcagccggggcgtgacagacctggatgctgtgggcaaggagggcggcagccacacaggcagcaaggtgagccacccccaggagcccatgctgacagccagccccaggatgctgctgcccagcagcagcagcaagcccccaggcctgggcacagagacccccctgagcacccaccaccagatgcagctgctgcagcagctgctgcagcagcagcagcagcagacccaggtggccgtggcccaggtgcacctgctgaaggaccagctggccgctgaggccgccgcccggctggaggcccaggcccgggtgcaccagctgctgctgcagaacaaggacatgctgcagcacatcagcctgctggtgaagcaggtgcaggagctggagctgaagctgagcggccagaatgccatgggcagccaggacagcctgctggagatcaccttccgcagcggggccctgcctgtgctgtgtgaccccaccacccccaagccagaggacctgcacagcccccccctgggcgccggcctggccgactttgcccaccctgctggcagccccctgggcagaagagactgcctggtgaagctggagtgcttccgcttcctgcccccagaggacaccccacctccagcccagggcgaggccctgctgggcggcctggagctgatcaagttccgggagagcggcatcgcctctgaatatgagagcaacacagatgaaagtgaggagcgggacagctggagccaggaggagctgccccggctgctgaatgtgctgcagaggcaggagctgggagatggcctggatgatgaaattgctgtgtag

SEQ ID NO: 181624 - DNA, 1521 bp, Artificial Sequence
  derived and/or modified sequence
atgcccagcaagaccaagtacaacctggtggacgacggccacgacttgcggatccccctccataatgaggatgcctttcagcacggaatctgttttgaggcaaaatatgtgggttccctggatgtgcctagacccaattcccgcgtggagatcgtcgctgccatgcggcgaattcgctatgagttcaaagctaagaacattaagaaaaagaaggtgagcatcatggtctccgtggacggcgtcaaggtgatactgaagaagaagaaaaagctcttgcttctgcagaaaaaggagtggacgtgggacgagagcaaaatgcttgtaatgcaagaccccatatatcggatcttttatgtctctcacgatagccaggacctaaagatcttcagctatatcgccagagatggcgcttccaacatttttcggtgtaatgtgtttaagagcaagaagaaatcacaggccatgaggatagttcggactgtcggacaggcatttgaagtatgccacaaattgtccctgcaacacacacaacaaaatgccgacgggcaggaagacggcgaaagcgaaagaaattccaactcttccggagacccaggccggcagctgacaggggccgagagagcaagcactgcaactgccgaggagactgatatagatgcagtcgaagtaccactgcccggcaatgatgtgctggagttttctcgaggggtgaccgatctggacgctgtcggaaaggagggtggatcccacactggaagtaaagtgtcccatcctcaagagcccatgctcaccgcctccccccgcatgttactcccttcatcctcttctaagccacctggacttgggacagagaccccactatccacacatcaccagatgcagctactgcagcagctgctgcagcaacagcagcagcaaacacaagtggccgtggctcaggtacacctgctcaaggatcagctggctgctgaagcagcagctcgactcgaagcccaggcccgagtgcaccaactgctactacaaaataaggacatgttgcagcacatctctctgttggtgaaacaggttcaggagctcgaacttaaattatcagggcagaatgcaatgggctcccaggattcactcctcgaaattaccttccgctccggtgcgctgccagtgttgtgcgatcccacaacacctaaacccgaggacttacactccccacctctgggtgcgggactggccgattttgcccatccagcaggtagcccactgggccggagggattgccttgtcaaactggagtgttttaggtttcttccgcccgaggataccccgccacctgcgcagggggaagctctgctgggcggcctagaactgatcaagtttcgagagtccggcatcgcttcggaatacgaatcaaacaccgacgaaagcgaggagcgcgatagctggtcccaggaagaactccccaggctcctcaatgtgttgcaacgacaggaactgggcgacgggcttgatgatgaaattgcagtgtag

SEQ ID NO: 181625 - DNA, 4931 bp, Artificial Sequence
  derived and/or modified sequence
cgtcgccttttcttcttcgtcccgggcggtgcgttccactgctctggggccggcgccgcgcccagtcccgcttcgggccgcaagccccaccgctcccctccccgggcaggggcgccgcgcagcccgctcccgccgccacctcctcccctgccgccctcctagccggcaggaattgcgcgaccacagcgccgctcgcgtcgcccgcatcagctcagcccgctgccgctcggccctcggcaccgctccgggtccggccgccgcgcggccagggctccccctgcccagcgctcccaggccccgccacgcgtcgccgcgcccagctccagtctcccctccccggggtctcgccagccccttcctgcagccgccgcctccgaaggagcgggtccgccgcgggtaaccatgcctagcaaaaccaagtacaaccttgtggacgatgggcacgacctgcggatccccttgcacaacgaggacgccttccagcacggcatctgctttgaggccaagtacgtaggaagcctggacgtgccaaggcccaacagcagggtggagatcgtggctgccatgcgccggatacggtatgagtttaaagccaagaacatcaagaagaagaaagtgagcattatggtttcagtggatggagtgaaagtgattctgaagaagaagaaaaagcttcttttattgcagaaaaaggaatggacgtgggatgagagcaagatgctggtgatgcaggaccccatctacaggatcttctatgtctctcatgattcccaagacttgaagatcttcagctatatcgctcgagatggtgccagcaatatcttcaggtgtaacgtctttaaatccaagaagaagagccaagctatgagaatcgttcggacggtggggcaggcctttgaggtctgccacaagctgagcctgcagcacacgcagcagaatgcagatggccaggaagatggagagagcgagaggaacagcaacagctcaggagacccaggccgccagctcactggagccgagagggcctccacggccactgcagaggagactgacatcgatgcggtggaggtcccacttccagggaatgatgtcctggaattcagccgaggtgtgactgatctagatgctgtagggaaggaaggaggctctcacacaggctccaaggtttcgcacccccaggagcccatgctgacagcctcacccaggatgctgctcccttcttcttcctcgaagcctccaggcctgggcacagagacaccgctgtccactcaccaccagatgcagctcctccagcagctcctccagcagcagcagcagcagacacaagtggctgtggcccaggtacacttgctgaaggaccagttggctgctgaggctgcggcgcggctggaggcccaggctcgcgtgcatcagcttttgctgcagaacaaggacatgctccagcacatctccctgctggtcaagcaggtgcaagagctggaactgaagctgtcaggacagaacgccatgggctcccaggacagcttgctggagatcaccttccgctccggagccctgcccgtgctctgtgaccccacgacccctaagccagaggacctgcattcgccgccgctgggcgcgggcttggctgactttgcccaccctgcgggcagccccttaggtaggcgcgactgcttggtgaagctggagtgctttcgctttcttccgcccgaggacaccccgcccccagcgcagggcgaggcgctcctgggcggtctggagctcatcaagttccgagagtcaggcatcgcctcggagtacgagtccaacacggacgagagcgaggagcgcgactcgtggtcccaggaggagctgccgcgcctgctgaatgtcctgcagaggcaggaactgggcgacggcctggatgatgagatcgccgtgtaggtgccgagggcgaggagatggaggcggcggcgtggctggaggggccgtgtctggctgctgcccgggtaggggatgcccagtgaatgtgcactgccgaggagaatgccagccagggcccgggagagtgtgaggtttcaggaaagtattgagattctgctttggagggtaaagtggggaagaaatcggattcccagaggtgaatcagctcctctcctacttgtgactagagggtggtggaggtaaggccttccagagcccatggcttcaggagagggtctctctccaggactgccaggctgctggaggacctgcccctacctgctgcatcgtcaggctcccacgctttgtccgtgatgcccccctaccccctcactctccccgtctccatggtcccgaccaggaagggaagccatcggtaccttctcaggtactttgtttctggatatcacgatgctgcgagttgcctaaccctccccctacctttatgagaggaattccttctccaggcccttgctgagattgtagagattgagtgctctggaccgcaaaagccaggctagtccttgtagggtgagcatggaattggaatgtgtcacagtggataagcttttagaggaactgaatccaaacattttctccagccggacattgaatgttgctacaaagggagccttgaagctttaacatggttcaggcccttggtgtgagagcccagggggaggacagcttgtctgctgctccaaatcacttagatctgattcctgttttgaaagtcctgccctgccttcctcctgcctgtagcccagcccatctaaatggaagctgggaattgcccctcacctcccctgtgtcctgtccagctgaagcttttgcagcactttacctctctgaaagccccagaggaccagagcccccagccttacctctcaacctgtcccctccactgggcagtggtggtcagtttttactgcaaaaaaaaaaaaagaaaaaagagaaagaaaaaaaagaatgaatgcaagctgatagctgagactgtgagactgtttttgtccactcttctgaatcactgccacttgggtcagggaccacagccattgccacccttggcccatctctctgcgtgcgtgccttgagcacacatataaaaagtgccatgtgcaattgtcttatcttttatgatctaggctttgcctagggatcactactccttaacgggctggctggggcaatgaggaaaagctcctttgctcctgtaaggccataagtggctgttaacagattttcaaatgcctgaagagattgctgagacctgctagagtcatatgttcggggaattaagtctttatcctagacaacaaggtacagatgcaaactgcagtgttattggagggtcaatcggcaaggatatgattatcccaaaatggagttcatcgaccctagctttcctttagattatatataaataaaagtgcagtcctcttctaatggccacagttggttttcttgtagcccagaaagtccaaattaaaggaaataaattcagttttatgttagccttccttggtgcatcagggtgtcagtggaaataggatcaggtggtgtgtgtgtgtgtgttttgtgtgtgtgtgtacacatgtgtttatatatacatgtgtgagggaaagtgtgtacatatatgtaggattgtaaccagacggaaaagaacgaggatctccagggtgtttgaatcagcaacagatttgtgttttctaacatgcatttagttggagaggcatggttctgtttgttttgttttgatctaatttgccattggaaataggtacagttacacagagaaggaagaaccaggaaagtgagatccatgaaactaaatgagcagctgtcagaatccagtgtggctgagcctacctagcttatgaaatctaacccagggttccctgagtccaagaccacttagattattaagattttgaacgtccagaggagtgaaaagtctgttttctgacgtaagccggagctgaggataaagccagaggccagtggattaggtgtatggaatgtggatggagagggcttgtgtgggatgtggccagggagtgggtgaggaaggccgcttctaaatggcctgtaaaaacttgagattggatagacgaaaggaaatggagaaattaaagaattggagaaactagttatctgtgttgctgactttgggacccatccaagactcctgcccttggggtgttccatggtggtttcttcctgcctgggcgccaccctttccccagttcaggccctccctggaggactagtttgtgtattggtatcctccccagtggacccaaaccagcgcatacttggtgtgtggagatgggagacaaaggacagatctaggagccttgaaggatcaccagccaccgaccctccatcagggccaactgggcaggaaagggaacattgcagacctgatttcccgacgatgtcaccctgtcctccctccttgcttcttgctctgctaactcaactctgccttcctctttttcattcttctactctgccctatatggaggacaaatggacaccaggggtgctaaccttattggtgcctgccccagcctaccccaggtgccagcagactctcgtgcacaggaggctcccacagttatggagccaggaaagaatttctctgcactggatggactgtatattgagattaaaaattatattccttatattcctgcttatatcaatgctctctctgtaaaacctcttcctagcctcatttctctcaactgatcttgtttaggcgttgtattccttttatttactctttgcttgactgcttcctcctaaccctctacccactagcactctacttcctaaagctgttgtgtcattaactctgttggatcaactctctgggaaaagattctgttaatgtaagtgcacttactccctggatgttgtcactagtctagtggcttttgctaaataaacctttcttatttcta

SEQ ID NO: 181626 - DNA, 1521 bp, Artificial Sequence
  derived and/or modified sequence
atgcccagtaagaccaagtacaatctggtggatgacgggcacgatcttcgaatcccactccacaatgaggacgcctttcaacacggaatatgctttgaggccaagtacgttgggagcttagatgtgcctcgcccaaacagtagggtggagattgtggccgctatgcgcagaatcagatatgaatttaaagccaagaatatcaaaaaaaagaaagtgtccatcatggtttccgtggacggagtgaaggtaatcctgaagaagaagaagaaattgcttctcctgcagaaaaaagaatggacttgggacgaaagcaaaatgcttgtgatgcaggatcccatttaccgtatcttttatgtctcacacgactctcaggacctgaagatttttagctacattgctcgggatggcgctagcaacatttttaggtgtaacgtgttcaagtccaagaagaaatcccaggcaatgagaatcgtgcggactgtgggccaggcttttgaggtatgccacaaattgtctttgcaacatacacaacagaacgcagacgggcaggaagacggcgaaagtgaacgcaactccaattcctccggtgatccgggaagacagttgacgggcgctgagagagcctcgacggcgacggcagaagaaactgatatcgatgctgttgaggtcccactgcccggtaatgatgttctggaattctcacgtggggtaactgaccttgatgccgtaggtaaggaggggggaagccacaccggcagcaaggttagccatcctcaagagcccatgctcaccgcgtccccaagaatgctactacctagtagcagcagcaagccacctgggttgggtacggagactcctctatccacccaccatcagatgcagctgcttcaacagcttttgcaacaacagcagcaacagacccaggtggcagtggctcaggtgcatcttctgaaagaccagcttgccgctgaggcagctgccaggcttgaggcacaggctagggtccatcagctgctgttacagaataaggacatgcttcaacatatttcccttctggtgaagcaggttcaggagctagagctgaagttgagtggccaaaatgctatgggctctcaggacagcctgctcgaaataacattccgatccggagcgctgcccgtgctgtgtgacccgactactccaaaaccagaagatctgcactccccgccactgggagcaggtctggccgatttcgctcacccggcaggctctcctctgggtagaagagattgcctggtcaaactagagtgttttaggtttctccctccagaagataccccgccacccgcacaaggtgaggctctactggggggactggagttaattaagtttcgtgagtccgggatcgcgtccgagtacgaatccaacacagacgaatcggaggagcgggactcttggagccaggaagagctcccgagactgctcaacgtattgcaaaggcaggagcttggtgatggtctggatgacgagattgctgtatag

SEQ ID NO: 181627 - DNA, 1521 bp, Artificial Sequence
  derived and/or modified sequence
atgcccagcaagaccaagtacaacctggtggacgacggccacgacctgagaatccccctgcacaacgaggacgccttccagcacggcatctgcttcgaggccaagtacgtgggcagcctggacgtgcccagacccaacagcagagtggagatcgtggccgccatgagaagaatcagatacgagttcaaggccaagaacatcaagaagaagaaggtgagcatcatggtgagcgtggacggcgtgaaggtgatcctgaagaagaagaagaagctgctgctgctgcagaagaaggagtggacctgggacgagagcaagatgctggtgatgcaggaccccatctacagaatcttctacgtgagccacgacagccaggacctgaagatcttcagctacatcgccagagacggcgccagcaacatcttcagatgcaacgtgttcaagagcaagaagaagagccaggccatgagaatcgtgagaaccgtgggccaggccttcgaggtgtgccacaagctgagcctgcagcacacccagcagaacgccgacggccaggaggacggcgagagcgagagaaacagcaacagcagcggcgaccccggcagacagctgaccggcgccgagagagccagcaccgccaccgccgaggagaccgacatcgacgccgtggaggtgcccctgcccggcaacgacgtgctggagttcagcagaggcgtgaccgacctggacgccgtgggcaaggagggcggcagccacaccggcagcaaggtgagccacccccaggagcccatgctgaccgccagccccagaatgctgctgcccagcagcagcagcaagccccccggcctgggcaccgagacccccctgagcacccaccaccagatgcagctgctgcagcagctgctgcagcagcagcagcagcagacccaggtggccgtggcccaggtgcacctgctgaaggaccagctggccgccgaggccgccgccagactggaggcccaggccagagtgcaccagctgctgctgcagaacaaggacatgctgcagcacatcagcctgctggtgaagcaggtgcaggagctggagctgaagctgagcggccagaacgccatgggcagccaggacagcctgctggagatcaccttcagaagcggcgccctgcccgtgctgtgcgaccccaccacccccaagcccgaggacctgcacagcccccccctgggcgccggcctggccgacttcgcccaccccgccggcagccccctgggcagaagagactgcctggtgaagctggagtgcttcagattcctgccccccgaggacacccccccccccgcccagggcgaggccctgctgggcggcctggagctgatcaagttcagagagagcggcatcgccagcgagtacgagagcaacaccgacgagagcgaggagagagacagctggagccaggaggagctgcccagactgctgaacgtgctgcagagacaggagctgggcgacggcctggacgacgagatcgccgtgtag

SEQ ID NO: 181628 - protein, 807 aa, Artificial Sequence
  derived and/or modified sequence
MMDSPFLELWQSKAVSIREQLGLGDRPNDSYCYNSAKNSTVLQGVTFGGIPTVLLIDVSCFLFLILVFSIIRRRFWDYGRIALVSEADSESRFQRLSSTSSSGQQDFENELGCCPWLTAIFRLHDDQILEWCGEDAIHYLSFQRHIIFLLVVVSFLSLCVILPVNLSGDLLDKDPYSFGRTTIANLQTDNDLLWLHTIFAVIYLFLTVGFMRHHTQSIKYKEENLVRRTLFITGLPRDARKETVESHFRDAYPTCEVVDVQLCYNVAKLIYLCKEKKKTEKSLTYYTNLQVKTGQRTLINPKPCGQFCCCEVLGCEWEDAISYYTRMKDRLLERITEEERHVQDQPLGMAFVTFQEKSMATYILKDFNACKCQSLQCKGEPQPSSHSRELYTSKWTVTFAADPEDICWKNLSIQGLRWWLQWLGINFTLFLGLFFLTTPSIILSTMDKFNVTKPIHALNNPIISQFFPTLLLWSFSALLPSIVYYSTLLESHWTKSGENQIMMTKVYIFLIFMVLILPSLGLTSLDFFFRWLFDKTSSEASIRLECVFLPDQGAFFVNYVIASAFIGNGMELLRLPGLILYTFRMIMAKTAADRRNVKQNQAFQYEFGAMYAWMLCVFTVIVAYSITCPIIAPFGLIYILLKHMVDRHNLYFVYLPAKLEKGIHFAAVNQALAAPILCLFWLYFFSFLRLGMKAPATLFTFLVLLLTILVCLAHTCFGCFKHLSPLNYKTEEPASDKGSEAEAHMPPPFTPYVPRILNGLASERTALSPQQQQQQTYGAIHNISGTIPGQCLAQSATGSVAAAPQEA

SEQ ID NO: 181629 - protein, 118 aa, Artificial Sequence
  derived and/or modified sequence
MMDSPFLELWQSKAVSIREQLGLGDRPNDSYCYNSAKNSTVLQGVTFGGIPTVLLIDVSCFLFLILVFSIIRRRFWDYGRIALVSEADSESRFQRLSSTSSSGQQDFENELGCCPWLT

SEQ ID NO: 181630 - protein, 82 aa, Artificial Sequence
  derived and/or modified sequence
MKDRLLERITEEERHVQDQPLGMAFVTFQEKSMATYILKDFNACKCQSLQCKGEPQPSSHSRELYTSKWTVTFAADPEDICW

SEQ ID NO: 181631 - DNA, 2424 bp, Artificial Sequence
  derived and/or modified sequence
atgatggacagccccttcctggagctgtggcagagcaaggccgtgagcatcagagagcagctgggcctgggcgacagacccaacgacagctactgctacaacagcgccaagaacagcaccgtgctgcagggcgtgaccttcggcggcatccccaccgtgctgctgatcgacgtgagctgcttcctgttcctgatcctggtgttcagcatcatcagaagaagattctgggactacggcagaatcgccctggtgagcgaggccgacagcgagagcagattccagagactgagcagcaccagcagcagcggccagcaggacttcgagaacgagctgggctgctgcccctggctgaccgccatcttcagactgcacgacgaccagatcctggagtggtgcggcgaggacgccatccactacctgagcttccagagacacatcatcttcctgctggtggtggtgagcttcctgagcctgtgcgtgatcctgcccgtgaacctgagcggcgacctgctggacaaggacccctacagcttcggcagaaccaccatcgccaacctgcagaccgacaacgacctgctgtggctgcacaccatcttcgccgtgatctacctgttcctgaccgtgggcttcatgagacaccacacccagagcatcaagtacaaggaggagaacctggtgagaagaaccctgttcatcaccggcctgcccagagacgccagaaaggagaccgtggagagccacttcagagacgcctaccccacctgcgaggtggtggacgtgcagctgtgctacaacgtggccaagctgatctacctgtgcaaggagaagaagaagaccgagaagagcctgacctactacaccaacctgcaggtgaagaccggccagagaaccctgatcaaccccaagccctgcggccagttctgctgctgcgaggtgctgggctgcgagtgggaggacgccatcagctactacaccagaatgaaggacagactgctggagagaatcaccgaggaggagagacacgtgcaggaccagcccctgggcatggccttcgtgaccttccaggagaagagcatggccacctacatcctgaaggacttcaacgcctgcaagtgccagagcctgcagtgcaagggcgagccccagcccagcagccacagcagagagctgtacaccagcaagtggaccgtgaccttcgccgccgaccccgaggacatctgctggaagaacctgagcatccagggcctgagatggtggctgcagtggctgggcatcaacttcaccctgttcctgggcctgttcttcctgaccacccccagcatcatcctgagcaccatggacaagttcaacgtgaccaagcccatccacgccctgaacaaccccatcatcagccagttcttccccaccctgctgctgtggagcttcagcgccctgctgcccagcatcgtgtactacagcaccctgctggagagccactggaccaagagcggcgagaaccagatcatgatgaccaaggtgtacatcttcctgatcttcatggtgctgatcctgcccagcctgggcctgaccagcctggacttcttcttcagatggctgttcgacaagaccagcagcgaggccagcatcagactggagtgcgtgttcctgcccgaccagggcgccttcttcgtgaactacgtgatcgccagcgccttcatcggcaacggcatggagctgctgagactgcccggcctgatcctgtacaccttcagaatgatcatggccaagaccgccgccgacagaagaaacgtgaagcagaaccaggccttccagtacgagttcggcgccatgtacgcctggatgctgtgcgtgttcaccgtgatcgtggcctacagcatcacctgccccatcatcgcccccttcggcctgatctacatcctgctgaagcacatggtggacagacacaacctgtacttcgtgtacctgcccgccaagctggagaagggcatccacttcgccgccgtgaaccaggccctggccgcccccatcctgtgcctgttctggctgtacttcttcagcttcctgagactgggcatgaaggcccccgccaccctgttcaccttcctggtgctgctgctgaccatcctggtgtgcctggcccacacctgcttcggctgcttcaagcacctgagccccctgaactacaagaccgaggagcccgccagcgacaagggcagcgaggccgaggcccacatgcccccccccttcaccccctacgtgcccagaatcctgaacggcctggccagcgagagaaccgccctgagcccccagcagcagcagcagcagacctacggcgccatccacaacatcagcggcaccatccccggccagtgcctggcccagagcgccaccggcagcgtggccgccgccccccaggaggcctag

SEQ ID NO: 181632 - DNA, 2424 bp, Artificial Sequence
  derived and/or modified sequence
atgatggacagccccttcttggaactttggcagagtaaggccgtcagcataagggagcagttgggcctcggcgaccgccctaatgattcctattgttacaacagcgctaaaaactcaaccgtgctgcagggcgtgacatttggcggcattcccacagtcctgctcatcgacgtctcatgtttcctgtttctcattcttgttttcagcataatcaggaggcgtttctgggactacggacgcattgcgcttgtgtcggaagctgattccgagagcagattccagcgcttgtccagtacatccagctcagggcagcaggactttgaaaacgagttgggttgttgtccctggttgacggctattttccgcctacatgacgaccaaattctagaatggtgcggagaagatgccattcactatctttcgttccagaggcacatcattttcctattggttgttgtgtccttcctgtccttatgcgtcatcttgcctgtgaacctcagcggggacttactcgataaggacccgtacagttttgggcgcactaccatcgctaacctgcaaactgataacgatctgctttggttgcatacgatatttgctgtaatataccttttcctcacagtcggcttcatgcgccaccacacgcagagtatcaaatacaaagaggaaaacctcgtgcgacgtaccctgttcatcacagggctgccacgcgacgcaaggaaagagacagtggagtcccactttagagacgcctatccaacctgcgaagttgtggacgtccagctttgctataatgtggcgaagttaatttacctgtgtaaagagaagaagaagacggaaaagagcttgacttactacactaatctgcaggttaagacaggtcaacggactttaatcaaccccaaaccctgcggccagttttgctgctgtgaggtattgggctgtgagtgggaggacgcgatctcatattatactaggatgaaagatcgcctgcttgagagaatcacagaggaagagagacacgtccaggaccagcctctcgggatggctttcgtgaccttccaggagaaatctatggcaacatacattctcaaggatttcaacgcatgcaagtgtcaaagtctccaatgcaagggggagccacagcccagcagccattccagggaactatacactagcaagtggacagtgacctttgcagctgatccagaagacatctgctggaagaatctgtccatccaggggctgcgctggtggcttcagtggcttggcatcaattttacactcttcctcggcctgttctttctcaccacccctagcataattctctctacaatggacaaatttaatgtgacaaaaccaattcatgcgcttaacaaccccattatttctcagttctttccaactcttctactctggagcttttccgccttgttgcccagcatcgtttactatagcacactgctggagagtcactggacgaagtccggggagaatcagatcatgatgacgaaagtttacattttcctgattttcatggtgctgatcttgcccagtctgggcctgacgagtttggatttcttttttcgatggctgtttgataaaacaagtagcgaagcttccatccgcctggagtgcgtgttcctcccggatcagggcgccttcttcgtcaattatgtcatcgcaagtgctttcattggaaacggtatggaactgctcaggctgcccggtctgatactgtacacctttagaatgatcatggccaaaactgccgcggaccggcgcaacgtgaaacagaatcaggccttccagtatgagttcggcgcaatgtacgcatggatgctctgcgtctttaccgttatcgtggcctacagtattacatgcccaatcatagctccatttggactcatttacatcctactgaaacacatggtagaccggcacaatctatattttgtgtacctgcccgcgaagctcgagaaggggatccacttcgccgctgtcaatcaggctctagctgcgcctatcctctgtctcttttggttatactttttttcttttctgcggctgggcatgaaggcaccagcaaccctcttcacattcctcgtgctgctgctgactatccttgtctgccttgcccacacgtgcttcggatgttttaaacatctgtcgcctcttaattataagacagaagagcctgcgtctgacaaaggttccgaagctgaggcacacatgcccccaccctttactccgtacgttcctcggatcctcaacggcctggcaagtgagaggactgctttgagcccacaacaacagcagcaacagacctacggcgccatccataacatcagcggcaccatccctggccaatgcttggcccagtctgctaccggatctgttgctgccgcccctcaggaagcgtag

SEQ ID NO: 181633 - DNA, 2424 bp, Artificial Sequence
  derived and/or modified sequence
atgatggacagccccttcctggagctgtggcagagcaaggctgtgtccatccgggagcagctgggcctgggggaccggcccaatgacagctactgctacaacagcgccaagaacagcacagtgctgcagggcgtgacctttggaggcatccccaccgtgctgctgattgatgtgtcctgcttcctgttcctgatcctggtgttcagcatcatcagaagacgcttctgggactatggaagaattgccctggtgtctgaggccgacagcgagagccgcttccagaggctgagcagcaccagcagcagcggccagcaggactttgaaaatgagctgggctgctgcccctggctgacagccatcttccggctgcatgatgaccagatcctggagtggtgtggggaggatgccatccactacctgtccttccagaggcacatcatcttcctgctggtggtggtgtccttcctgagcctgtgtgtgatcctgcctgtgaacctgagcggggacctgctggacaaggacccctacagctttggccgcaccaccatcgccaacctgcagacagacaatgacctgctgtggctgcacaccatctttgctgtgatctacctgttcctgactgtgggcttcatgaggcaccacacccagagcatcaagtacaaggaggagaacctggtgcggaggaccctcttcatcaccggcctgcccagagatgccaggaaggagaccgtggagagccacttcagagatgcctaccccacctgtgaggtggtggatgtgcagctgtgctacaacgtggccaagctgatctacctgtgcaaggagaagaagaagacagagaagagcctgacctactacaccaacctgcaggtgaagacaggccagaggaccctcatcaaccccaagccctgtggccagttctgctgctgtgaggtgctgggctgtgagtgggaggatgccatctcctactacaccaggatgaaggaccggctgctggagcgcatcacagaggaggagagacatgtgcaggaccagcccctgggcatggcctttgtgaccttccaggagaagtccatggccacctacatcctgaaggacttcaatgcctgcaagtgccagagcctgcagtgcaagggggagccccagcccagcagccacagccgggagctgtacaccagcaagtggacagtgacctttgctgctgaccctgaggacatctgctggaagaacctgagcatccagggcctgcgctggtggctgcagtggctgggcatcaacttcaccctcttcctgggcctcttcttcctgaccacccccagcatcatcctgagcaccatggacaagttcaacgtgaccaagcccatccacgccctgaacaaccccatcatcagccagttcttccccaccctgctgctgtggagcttcagcgccctgctgcccagcatcgtgtactacagcaccctgctggagagccactggaccaagagcggggagaaccagatcatgatgaccaaggtgtacatcttcctgatcttcatggtgctgatcctgcccagcctgggcctgaccagcctggacttcttcttccgctggctgtttgacaagaccagcagcgaggccagcatccggctggagtgtgtgttcctgcctgaccagggcgccttctttgtgaactacgtgattgccagcgccttcatcggaaatggcatggagctgctgcggctgcccggcctcatcctgtacaccttcaggatgatcatggccaagacagctgctgacagaagaaatgtgaagcagaaccaggccttccagtatgaatttggagccatgtatgcctggatgctgtgtgtgttcaccgtgattgtggcctacagcatcacctgccccatcatcgcccccttcggcctcatctacatcctgctgaagcacatggtggacagacacaacctgtactttgtgtacctgcctgccaagctggagaagggcatccactttgctgctgtgaaccaggccctggccgcccccatcctgtgcctcttctggctgtacttcttctccttcctgcggctgggcatgaaggccccagccaccctcttcaccttcctggtgctgctgctgaccatcctggtgtgcctggcccacacctgcttcggctgcttcaagcacctgagccccctgaactacaagacagaggagcccgccagtgacaagggcagcgaggccgaggcccacatgcccccacccttcaccccctacgtgccccgcatcctgaatggcctggccagcgagaggacagccctgagcccccagcagcagcagcagcagacctatggagccatccacaacatcagcggcaccatccctggccagtgcctggcccagagcgccactggatctgtggccgccgccccccaggaggcctag

SEQ ID NO: 181634 - DNA, 2424 bp, Artificial Sequence
  derived and/or modified sequence
atgatggacagccccttcctggagctgtggcagagcaaggccgtgtcaattcgggagcaactggggcttggcgacagaccaaatgacagctactgttataattctgccaagaacagcacagtcctgcaaggagtgacttttggcggcattccaaccgtgctgttgattgacgtgtcttgctttctcttcctaattctggtgttctccataatacgacgccggttttgggattacggcagaattgctctcgtttcagaggccgattccgaaagccgttttcagagactgtcctctactagtagctctggccagcaggacttcgaaaacgaactagggtgttgtccatggctgacagcgatttttcgtctacacgacgaccagatactggagtggtgcggggaagacgctattcactatctcagttttcagcgccacattattttcctactcgtggtcgtgagtttcctgtccctgtgtgtgatcttgccagtgaacctgtccggcgatctgcttgataaagacccgtattcctttggcaggaccaccattgcaaatctccaaactgataacgatttgctgtggcttcatactatattcgccgtgatctatttgttccttacagtcggttttatgagacaccacacacagagtatcaaatataaagaggagaatcttgtgagaagaacgctttttattaccgggctgccccgggatgcacgcaaggagactgtagagtcacatttccgagacgcatatcctacgtgtgaggtggtcgacgtgcagttatgttataacgtagcaaaactaatttacctgtgcaaggaaaagaaaaaaaccgagaaatctctgacttattacacaaatctccaggtgaaaactggtcagagaacattgatcaaccctaaaccctgcggacaattctgctgctgtgaggttctaggctgtgagtgggaagatgccatatcctattacactcggatgaaagacaggctgctggagcgaattacagaggaagagcgccacgtgcaggatcagcctctcggcatggcattcgtaacattccaggaaaagagtatggctacctacattctcaaggatttcaatgcctgtaaatgtcagtcactgcagtgcaaaggggagccgcagccctcttcgcattctagggagctttatacaagcaaatggactgtcacctttgccgccgatcctgaggacatttgctggaaaaatctgtctattcaaggactgaggtggtggcttcagtggctgggaattaacttcactctcttcctcggactctttttcctgacaacccctagtattattctctctacaatggataagttcaacgtcaccaagcccatccacgcccttaataaccccataatttctcagtttttcccgactctccttctctggtccttctccgcgcttctaccatctatcgtctactactccacgcttctcgagtcacactggacgaaatctggtgaaaaccagattatgatgaccaaggtctatatcttcctcattttcatggtgctgatcctgcccagtctgggactgacaagtttggactttttcttcagatggctgtttgacaagacctcatcagaggcaagtatccggctggagtgcgtgttcttgcctgaccagggtgccttcttcgttaattacgttattgcatctgcctttataggcaatggcatggaactcctgagattgcctggcctgatcctgtacactttccggatgatcatggcgaagacagctgctgataggaggaacgtgaagcagaatcaggcctttcagtacgaattcggcgcaatgtacgcctggatgctatgtgtgttcactgtgatcgtcgcgtatagcataacctgtcccattatagccccgttcggtttgatttacatcctcctgaagcacatggtcgacaggcataacttgtactttgtatacctgcccgcaaaacttgaaaagggtatacacttcgcggctgtgaatcaggcactcgcagcgcccattttgtgcctgttctggttgtatttcttctctttcctaaggctagggatgaaagcacctgccactctattcaccttcctggttcttttgttgaccatccttgtgtgtttagcccatacgtgttttggatgcttcaaacatttatctcctttgaattataagacagaagagccagcttccgataagggatcggaggctgaagctcacatgcctccaccctttactccctacgttccacggatactcaatggactggcctctgagcggaccgccctctcgccccagcagcagcagcagcagacctatggggcaattcacaacatctccggaacgatacctggccagtgtctggctcagagtgccaccggcagcgtcgccgccgccccacaagaagcctag

SEQ ID NO: 181635 - DNA, 2424 bp, Artificial Sequence
  derived and/or modified sequence
atgatggactcccctttcttagaattgtggcagagcaaagccgtttccatcagagagcaactgggactgggtgatcgacccaatgatagttactgctacaatagcgcaaagaattccactgtgctgcagggtgtgacgttcggcggtatccctactgtgttgctgatcgatgtcagctgttttctgttcctcattttggtgttttcaatcattcgcaggcgcttttgggactacgggaggatcgccctcgtgtccgaggccgactccgaaagcagattccagcggctttcgagtacatccagctcaggacagcaggactttgaaaatgagctcggatgttgcccatggctaaccgcgatctttcggcttcacgacgaccaaatcctggaatggtgtggggaggatgccatacactatctgagttttcagcgacatattattttcctgctggtagtcgtgtctttcttgagcctttgcgtaatactgcccgttaacttgagcggagatctcttagataaggacccatactccttcggaaggacgactattgccaacctgcagacggataatgacctgttgtggctgcacaccatttttgctgtaatctacctatttctaacggtcggttttatgcggcaccacactcaatctatcaaatacaaggaggaaaatctggttaggagaaccctcttcatcacagggctccctcgtgatgcgaggaaagagactgtcgagtcccatttcagagatgcctacccaacatgcgaggtggttgatgtgcagctctgctataacgtggctaagctcatctacctgtgtaaggaaaagaagaaaacagagaaaagtctgacctactacaccaacctccaggtgaaaaccggccagcgcactctgattaatcctaagccgtgtggacagttttgctgctgtgaagtgctggggtgcgaatgggaagatgcaataagctattatacacgcatgaaagaccggctgctggaacgaataacagaagaggagcggcacgtgcaggatcagcccctcggcatggccttcgtaacatttcaagaaaagtccatggctacatatattttgaaggactttaacgcatgtaaatgccaaagtctgcagtgtaaaggcgaaccgcagccgagctcacattcccgagagctatatacttcaaagtggaccgtcacatttgcggcagacccggaggacatctgctggaaaaacttgagcatccagggcctgcggtggtggctgcagtggttgggcatcaattttactctctttctggggctcttttttctcaccactcccagtattattttatccacgatggataagttcaatgttacaaaaccaatccatgcacttaacaaccctattatttctcagtttttccccaccctgctgctctggagcttttctgcactattgccctccatcgtgtactattcgaccttgctcgagagtcactggacaaaatctggcgagaatcagataatgatgaccaaagtgtacatcttcttaatcttcatggtcctcatccttcccagcctaggtcttacatcgctggatttctttttccggtggctctttgacaagacctcctccgaggcctccataaggctggagtgtgtgttcttgccagaccagggcgctttcttcgtgaactacgttatcgctagcgctttcatagggaacggcatggaactgctgaggttaccaggtctcatactttacacctttagaatgataatggccaagactgctgccgacagacgcaacgtgaaacaaaatcaggcctttcagtacgaattcggtgccatgtatgcctggatgctatgtgtctttacagtgattgtggcttactcaattacctgtcctatcatcgcccctttcggactcatctacattctcttaaaacacatggtggaccgtcacaacttgtattttgtctacctgccagcgaagctggagaagggaattcactttgcggcagtcaaccaggcccttgccgcaccaatactgtgtctgttttggctttattttttctctttccttagattgggtatgaaagcgccagctaccctgttcacctttctggtcctgctgttgacaattttggtgtgcttggcccacacatgtttcgggtgctttaaacacctctctcccctgaactacaagaccgaagagcccgcatccgataagggcagcgaggccgaggcccacatgcctcccccttttactccctacgtgccaaggatactgaatggcctggcatcggaacgcaccgccctgtctccacagcagcaacagcagcagacatacggagccatacataacatatcgggcaccattcctggacagtgtctcgcgcagagtgccacgggaagcgttgccgcagccccacaggaagcttag

SEQ ID NO: 181636 - DNA, 4098 bp, Artificial Sequence
  derived and/or modified sequence
gtaacttttaagtggtcggaacacgccccgcgctgctgggtcccgccagacacgccgccgccgcaggaaagtctacagtttggtaccccaggactcgctggtcaggaaagccctgcaggacatgagtgttaggcccgacgcctggcccttggcagcttgggaggtggctggggctgcttttgcctttgccagagacagctccaactgaggacctctccaacgggcccatccacagtccttccttcccctagtgtctgggaagacaggcgcgatgatggactccccgttcctggagctgtggcagtccaaggcagtgtccatcagggagcagctgggactcggggaccggcccaacgactcctattgctacaactcggccaaaaacagcaccgtgctccagggggtcacctttggtggcatccccactgtcctgctcatagacgtcagctgcttcctgttcttaatcttggtgttttctattataagaagaagattctgggactatggccgcattgccctggtgtcagaagcagacagcgagtccagatttcagagattgtcatcgacttcctcctcaggtcaacaagactttgaaaatgagctgggatgctgtccctggctgactgccatcttccgtctgcatgatgaccagatcctggaatggtgtggggaggacgccatccactacctgtccttccagaggcacatcatcttcctgttggtggtggtcagctttttgtccctgtgtgtcatcctgcctgtcaacctctcaggggacttgctggacaaagacccgtatagttttgggaggacaacaatagcaaacctacagactgacaatgacctcctttggctgcacaccatctttgctgtcatttacctcttcctcactgtgggtttcatgcggcaccacactcagtccattaagtacaaagaggagaacctggtgaggcggaccctgttcatcacaggactccccagagatgccaggaaggagactgtggagagccacttccgggacgcgtatcccacgtgtgaggtggttgatgtgcagctgtgctacaacgtggccaaactgatctacctgtgcaaggagaaaaagaagactgagaagagcctgacctattacacaaacctgcaggtgaagacaggccagcggaccctcatcaaccccaagccctgtggccagttttgctgctgtgaagtgctgggctgtgagtgggaagacgccatctcttactacacacggatgaaggacaggctgctggagaggatcacagaggaagaacgccacgtccaggaccagcccctgggaatggccttcgtcaccttccaggagaagtccatggccacctacatcctgaaagatttcaatgcctgcaagtgtcagagccttcagtgcaaaggtgagccccagccgtcctcccatagcagggagctctatacctccaagtggacagtcacctttgctgctgaccctgaggacatctgctggaagaacctctctatccagggcctccgctggtggctacagtggctgggcatcaacttcaccctcttcctggggctatttttcctgaccacaccctccatcatcctgtccaccatggacaagtttaatgtcaccaaacccatccatgcgctgaataacccgatcatcagccagttcttccccaccctcctgctctggtccttctcggccctgctcccctccattgtctactactctacactgctggagtctcactggaccaagtcgggggaaaaccagatcatgatgaccaaagtctacatattcttgatcttcatggtgctgatcctgccctccctgggtctcaccagtctagattttttcttccggtggctctttgacaaaacttcctcggaggcctccatcaggttggagtgcgtcttcctgcctgaccagggtgccttctttgtgaactatgtcatcgcctcggccttcatcggcaatggcatggagctgctgcggctgccaggtctcatcctctataccttccgcatgatcatggccaagacggctgctgaccgcaggaatgtcaagcagaaccaggccttccagtacgagtttggagccatgtatgcatggatgctgtgtgtcttcactgtcatcgtggcctacagcatcacttgtcccatcatcgcgccatttggcctcatctacatcctgctcaagcacatggtggaccggcacaacctctacttcgtctacctcccagccaagctggagaaggggatccactttgccgctgtgaaccaggccttggcagcccccatcctgtgcctcttctggctctacttcttttccttcctgcgcctgggtatgaaggcccccgccactctgttcaccttcctggtgctgctgctcaccatcctggtctgcctggctcacacctgctttggatgcttcaagcacctcagccctctgaactacaaaacagaagagcctgcaagtgacaaaggaagtgaggcagaggcccacatgcccccaccgttcacaccctacgtgcctcggattctgaacggcttggcctcggagaggacagcactgtctccgcagcagcagcagcagcagacctatggtgccatccacaacatcagcgggactatccctggacagtgcttggcgcagagcgccacgggcagtgtggctgctgccccccaggaggcctgaggctgggtctcactgctctgaaaagacacaaccagaatggcctggggctcaggcccttggctgagtgggaatgcgttgggactgcccagctgagctatcaggtgcccatcttttctggtcccagcagtggtgaggagagcacaggcaggcctcgcccctcccttgctcacccagtttcccctccggcacaagcttccagctctgcagctggggtgacatccccagtggtttgtcgccaagaccatgtggtggacttttcgccccccaaactgatgagtccgggagaatatatggagagagagatgtaacaaggggaaggcctcctcccttctgagcacacacacaaccgataaccaaagagatgctgcagtccaggtctgaggtcccgctggcatccagctccctgctccatggccagtccctccccagcccagcagtccctccaggctacatccaggagtaagctatggggaacaggttgggaggtggccagtgctcctgccagctgtgcacacatctctgtatcccgctagagttctgtgtttttgtatcatgttgtcagggacgctagctgggtcagggttaccccatagcaggcagggacaaggaccactcataatatgcccattggaccacagttaagatccagcctctctcacctcttcagggctgagtgcatgagtctgcacctccaggcaggctctgtgcagtactcaccccctccgtctgctccctccaaggtgtgggggtgggcagtgctcagggcctcctcggagccaaaggacagcatggtcggcacagaggaaggggtacctgggctgggtgcagggccatcccactgcccttgagctgtggctctggcaggaaggaggggcagcccatccctcttctccctcctggggattctggggaatgggatgcaacttaagacttctgcctgagaagcctcctccctgctgcctccagggggcaccaaggcacaagcctgtgcagtaggggcgggatgggggtgtggaagagcaggtccaggctcctagcacaactggcctggggccttggcacctctgtaggccctgcctgtgcctgtccgctggcctggggggcctgggcttatctgggccttctcactcagggactctcttgacgctgacttgcccccgcagtggtggccagtgctgcctctgctccaagctgcccctgcgctgggaggggtgggggcggtgccattggtctggtgcagcatagccctggccagtggcctcatccccagcaggcctcccgtgcctctgccagcaaggaggggccggccagctctgcttgcacagggggccccatgtggggtcagcgcacgctcatgtcactgagttccagccgcttttagagtaaagtcgtttatcatcaaa

SEQ ID NO: 181637 - protein, 1832 aa, Artificial Sequence
  derived and/or modified sequence
MEDTPPSLSCSDCQRHFPSLPELSRHRELLHPSPNQDSEEADSIPRPYRCQQCGRGYRHPGSLVNHRRTHETGLFPCTTCGKDFSNPMALKSHMRTHAPEGRRRHRPPRPKEATPHLQGETVSTDSWGQRLGSSEGWENQTKHTEETPDCESVPDPRAASGTWEDLPTRQREGLASHPGPEDGADGWGPSTNSARAPPLPIPASSLLSNLEQYLAESVVNFTGGQEPTQSPPAEEERRYKCSQCGKTYKHAGSLTNHRQSHTLGIYPCAICFKEFSNLMALKNHSRLHAQYRPYHCPHCPRVFRLPRELLEHQQSHEGERQEPRWEEKGMPTTNGHTDESSQDQLPSAQMLNGSAELSTSGELEDSGLEEYRPFRCGDCGRTYRHAGSLINHRKSHQTGVYPCSLCSKQLFNAAALKNHVRAHHRPRQGVGENGQPSVPPAPLLLAETTHKEEEDPTTTLDHRPYKCSECGRAYRHRGSLVNHRHSHRTGEYQCSLCPRKYPNLMALRNHVRVHCKAARRSADIGAEGAPSHLKVELPPDPVEAEAAPHTDQDHVCKHEEEATDITPAADKTAAHICSICGLLFEDAESLERHGLTHGAGEKENSRTETTMSPPRAFACRDCGKSYRHSGSLINHRQTHQTGDFSCGACAKHFHTMAAMKNHLRRHSRRRSRRHRKRAGGASGGREAKLLAAESWTRELEDNEGLESPQDPSGESPHGAEGNLESDGDCLQAESEGDKCGLERDETHFQGDKESGGTGEGLERKDASLLDNLDIPGEEGGGTHFCDSLTGVDEDQKPATGQPNSSSHSANAVTGWQAGAAHTCSDCGHSFPHATGLLSHRPCHPPGIYQCSLCPKEFDSLPALRSHFQNHRPGEATSAQPFLCCLCGMIFPGRAGYRLHRRQAHSSSGMTEGSEEEGEEEGVAEAAPARSPPLQLSEAELLNQLQREVEALDSAGYGHICGCCGQTYDDLGSLERHHQSQSSGTTADKAPSPLGVAGDAMEMVVDSVLEDIVNSVSGEGGDAKSQEGAGTPLGDSLCIQGGESLLEAQPRPFRCNQCGKTYRHGGSLVNHRKIHQTGDFLCPVCSRCYPNLAAYRNHLRNHPRCKGSEPQVGPIPEAAGSSELQVGPIPEGGSNKPQHMAEEGPGQAEVEKLQEELKVEPLEEVARVKEEVWEETTVKGEEIEPRLETAEKGCQTEASSERPFSCEVCGRSYKHAGSLINHRQSHQTGHFGCQACSKGFSNLMSLKNHRRIHADPRRFRCSECGKAFRLRKQLASHQRVHMERRGGGGTRKATREDRPFRCGQCGRTYRHAGSLLNHRRSHETGQYSCPTCPKTYSNRMALKDHQRLHSENRRRRAGRSRRTAVRCALCGRSFPGRGSLERHLREHEETEREPANGQGGLDGTAASEANLTGSQGLETQLGGAEPVPHLEDGVPRPGERSQSPIRAASSEAPEPLSWGAGKAGGWPVGGGLGNHSGGWVPQFLTRSEEPEDSVHRSPCHAGDCQLNGPTLSHMDSWDNRDNSSQLQPGSHSSCSQCGKTYCQSGSLLNHNTNKTDRHYCLLCSKEFLNPVATKSHSHNHIDAQTFACPDCGKAFESHQELASHLQAHARGHSQVPAQMEEARDPKAGTGEDQVVLPGQGKAQEAPSETPRGPGESVERARGGQAVTSMAAEDKERPFRCTQCGRSYRHAGSLLNHQKAHTTGLYPCSLCPKLLPNLLSLKNHSRTHTDPKRHCCSICGKAFRTAARLEGHGRVHAPREGPFTCPHCPRHFRRRISFVQHQQQHQEEWTVAGSGAPVAPVTGRGDLPLPPPPTPTTPLLDPSPQWPADLSFSL

SEQ ID NO: 181638 - protein, 240 aa, Artificial Sequence
  derived and/or modified sequence
MEDTPPSLSCSDCQRHFPSLPELSRHRELLHPSPNQDSEEADSIPRPYRCQQCGRGYRHPGSLVNHRRTHETGLFPCTTCGKDFSNPMALKSHMRTHAPEGRRRHRPPRPKEATPHLQGETVSTDSWGQRLGSSEGWENQTKHTEETPDCESVPDPRAASGTWEDLPTRQREGLASHPGPEDGADGWGPSTNSARAPPLPIPASSLLSNLEQYLAESVVNFTGGQEPTQSPPAEEERRYK

SEQ ID NO: 181639 - protein, 193 aa, Artificial Sequence
  derived and/or modified sequence
ERRYKCSQCGKTYKHAGSLTNHRQSHTLGIYPCAICFKEFSNLMALKNHSRLHAQYRPYHCPHCPRVFRLPRELLEHQQSHEAARPFSCEVCGRSYKHAGSLINHRQSHQTGHFGCQACSKGFSNLMSLKNHRRIHADPRRFRCSECGKAFRLRKQLASHQRVHMERHRPFRCGQCGRTYRHAGSLLNHRRSH

SEQ ID NO: 181640 - DNA, 5499 bp, Artificial Sequence
  derived and/or modified sequence
atggaggacaccccccccagcctgagctgcagcgactgccagagacacttccccagcctgcccgagctgagcagacacagagagctgctgcaccccagccccaaccaggacagcgaggaggccgacagcatccccagaccctacagatgccagcagtgcggcagaggctacagacaccccggcagcctggtgaaccacagaagaacccacgagaccggcctgttcccctgcaccacctgcggcaaggacttcagcaaccccatggccctgaagagccacatgagaacccacgcccccgagggcagaagaagacacagaccccccagacccaaggaggccaccccccacctgcagggcgagaccgtgagcaccgacagctggggccagagactgggcagcagcgagggctgggagaaccagaccaagcacaccgaggagacccccgactgcgagagcgtgcccgaccccagagccgccagcggcacctgggaggacctgcccaccagacagagagagggcctggccagccaccccggccccgaggacggcgccgacggctggggccccagcaccaacagcgccagagccccccccctgcccatccccgccagcagcctgctgagcaacctggagcagtacctggccgagagcgtggtgaacttcaccggcggccaggagcccacccagagcccccccgccgaggaggagagaagatacaagtgcagccagtgcggcaagacctacaagcacgccggcagcctgaccaaccacagacagagccacaccctgggcatctacccctgcgccatctgcttcaaggagttcagcaacctgatggccctgaagaaccacagcagactgcacgcccagtacagaccctaccactgcccccactgccccagagtgttcagactgcccagagagctgctggagcaccagcagagccacgagggcgagagacaggagcccagatgggaggagaagggcatgcccaccaccaacggccacaccgacgagagcagccaggaccagctgcccagcgcccagatgctgaacggcagcgccgagctgagcaccagcggcgagctggaggacagcggcctggaggagtacagacccttcagatgcggcgactgcggcagaacctacagacacgccggcagcctgatcaaccacagaaagagccaccagaccggcgtgtacccctgcagcctgtgcagcaagcagctgttcaacgccgccgccctgaagaaccacgtgagagcccaccacagacccagacagggcgtgggcgagaacggccagcccagcgtgccccccgcccccctgctgctggccgagaccacccacaaggaggaggaggaccccaccaccaccctggaccacagaccctacaagtgcagcgagtgcggcagagcctacagacacagaggcagcctggtgaaccacagacacagccacagaaccggcgagtaccagtgcagcctgtgccccagaaagtaccccaacctgatggccctgagaaaccacgtgagagtgcactgcaaggccgccagaagaagcgccgacatcggcgccgagggcgcccccagccacctgaaggtggagctgccccccgaccccgtggaggccgaggccgccccccacaccgaccaggaccacgtgtgcaagcacgaggaggaggccaccgacatcacccccgccgccgacaagaccgccgcccacatctgcagcatctgcggcctgctgttcgaggacgccgagagcctggagagacacggcctgacccacggcgccggcgagaaggagaacagcagaaccgagaccaccatgagcccccccagagccttcgcctgcagagactgcggcaagagctacagacacagcggcagcctgatcaaccacagacagacccaccagaccggcgacttcagctgcggcgcctgcgccaagcacttccacaccatggccgccatgaagaaccacctgagaagacacagcagaagaagaagcagaagacacagaaagagagccggcggcgccagcggcggcagagaggccaagctgctggccgccgagagctggaccagagagctggaggacaacgagggcctggagagcccccaggaccccagcggcgagagcccccacggcgccgagggcaacctggagagcgacggcgactgcctgcaggccgagagcgagggcgacaagtgcggcctggagagagacgagacccacttccagggcgacaaggagagcggcggcaccggcgagggcctggagagaaaggacgccagcctgctggacaacctggacatccccggcgaggagggcggcggcacccacttctgcgacagcctgaccggcgtggacgaggaccagaagcccgccaccggccagcccaacagcagcagccacagcgccaacgccgtgaccggctggcaggccggcgccgcccacacctgcagcgactgcggccacagcttcccccacgccaccggcctgctgagccacagaccctgccacccccccggcatctaccagtgcagcctgtgccccaaggagttcgacagcctgcccgccctgagaagccacttccagaaccacagacccggcgaggccaccagcgcccagcccttcctgtgctgcctgtgcggcatgatcttccccggcagagccggctacagactgcacagaagacaggcccacagcagcagcggcatgaccgagggcagcgaggaggagggcgaggaggagggcgtggccgaggccgcccccgccagaagcccccccctgcagctgagcgaggccgagctgctgaaccagctgcagagagaggtggaggccctggacagcgccggctacggccacatctgcggctgctgcggccagacctacgacgacctgggcagcctggagagacaccaccagagccagagcagcggcaccaccgccgacaaggcccccagccccctgggcgtggccggcgacgccatggagatggtggtggacagcgtgctggaggacatcgtgaacagcgtgagcggcgagggcggcgacgccaagagccaggagggcgccggcacccccctgggcgacagcctgtgcatccagggcggcgagagcctgctggaggcccagcccagacccttcagatgcaaccagtgcggcaagacctacagacacggcggcagcctggtgaaccacagaaagatccaccagaccggcgacttcctgtgccccgtgtgcagcagatgctaccccaacctggccgcctacagaaaccacctgagaaaccaccccagatgcaagggcagcgagccccaggtgggccccatccccgaggccgccggcagcagcgagctgcaggtgggccccatccccgagggcggcagcaacaagccccagcacatggccgaggagggccccggccaggccgaggtggagaagctgcaggaggagctgaaggtggagcccctggaggaggtggccagagtgaaggaggaggtgtgggaggagaccaccgtgaagggcgaggagatcgagcccagactggagaccgccgagaagggctgccagaccgaggccagcagcgagagacccttcagctgcgaggtgtgcggcagaagctacaagcacgccggcagcctgatcaaccacagacagagccaccagaccggccacttcggctgccaggcctgcagcaagggcttcagcaacctgatgagcctgaagaaccacagaagaatccacgccgaccccagaagattcagatgcagcgagtgcggcaaggccttcagactgagaaagcagctggccagccaccagagagtgcacatggagagaagaggcggcggcggcaccagaaaggccaccagagaggacagacccttcagatgcggccagtgcggcagaacctacagacacgccggcagcctgctgaaccacagaagaagccacgagaccggccagtacagctgccccacctgccccaagacctacagcaacagaatggccctgaaggaccaccagagactgcacagcgagaacagaagaagaagagccggcagaagcagaagaaccgccgtgagatgcgccctgtgcggcagaagcttccccggcagaggcagcctggagagacacctgagagagcacgaggagaccgagagagagcccgccaacggccagggcggcctggacggcaccgccgccagcgaggccaacctgaccggcagccagggcctggagacccagctgggcggcgccgagcccgtgccccacctggaggacggcgtgcccagacccggcgagagaagccagagccccatcagagccgccagcagcgaggcccccgagcccctgagctggggcgccggcaaggccggcggctggcccgtgggcggcggcctgggcaaccacagcggcggctgggtgccccagttcctgaccagaagcgaggagcccgaggacagcgtgcacagaagcccctgccacgccggcgactgccagctgaacggccccaccctgagccacatggacagctgggacaacagagacaacagcagccagctgcagcccggcagccacagcagctgcagccagtgcggcaagacctactgccagagcggcagcctgctgaaccacaacaccaacaagaccgacagacactactgcctgctgtgcagcaaggagttcctgaaccccgtggccaccaagagccacagccacaaccacatcgacgcccagaccttcgcctgccccgactgcggcaaggccttcgagagccaccaggagctggccagccacctgcaggcccacgccagaggccacagccaggtgcccgcccagatggaggaggccagagaccccaaggccggcaccggcgaggaccaggtggtgctgcccggccagggcaaggcccaggaggcccccagcgagacccccagaggccccggcgagagcgtggagagagccagaggcggccaggccgtgaccagcatggccgccgaggacaaggagagacccttcagatgcacccagtgcggcagaagctacagacacgccggcagcctgctgaaccaccagaaggcccacaccaccggcctgtacccctgcagcctgtgccccaagctgctgcccaacctgctgagcctgaagaaccacagcagaacccacaccgaccccaagagacactgctgcagcatctgcggcaaggccttcagaaccgccgccagactggagggccacggcagagtgcacgcccccagagagggccccttcacctgcccccactgccccagacacttcagaagaagaatcagcttcgtgcagcaccagcagcagcaccaggaggagtggaccgtggccggcagcggcgcccccgtggcccccgtgaccggcagaggcgacctgcccctgccccccccccccacccccaccacccccctgctggaccccagcccccagtggcccgccgacctgagcttcagcctgtag

SEQ ID NO: 181641 - DNA, 582 bp, Artificial Sequence
  derived and/or modified sequence
gagagaagatacaagtgcagccagtgcggcaagacctacaagcacgccggcagcctgaccaaccacagacagagccacaccctgggcatctacccctgcgccatctgcttcaaggagttcagcaacctgatggccctgaagaaccacagcagactgcacgcccagtacagaccctaccactgcccccactgccccagagtgttcagactgcccagagagctgctggagcaccagcagagccacgaggccgccagacccttcagctgcgaggtgtgcggcagaagctacaagcacgccggcagcctgatcaaccacagacagagccaccagaccggccacttcggctgccaggcctgcagcaagggcttcagcaacctgatgagcctgaagaaccacagaagaatccacgccgaccccagaagattcagatgcagcgagtgcggcaaggccttcagactgagaaagcagctggccagccaccagagagtgcacatggagagacacagacccttcagatgcggccagtgcggcagaacctacagacacgccggcagcctgctgaaccacagaagaagccactag

SEQ ID NO: 181642 - DNA, 5499 bp, Artificial Sequence
  derived and/or modified sequence
atggaggatactcccccctctctttcctgttctgattgccagcggcatttccccagcttgcccgagttatcacgccatagggaactcctgcatccctcaccaaatcaggactccgaagaagctgactccatcccacgcccttatagatgccagcaatgcggtcgggggtatcgacaccccggatcgttagtcaatcacaggcggacccatgaaacaggcctgttcccatgtacgacttgtggaaaggacttcagcaatccgatggccctcaaaagccacatgcgaacccatgcgcctgagggaagacgccggcatagaccaccgcggccaaaagaagccacaccacacctgcagggggaaacagtgtcaacagattcttgggggcaaaggctcggcagcagcgaaggttgggagaatcagactaagcacaccgaggaaactcccgactgtgaaagcgtacccgacccgcgcgctgcatccggaacctgggaggacttacccacacggcagcgggaggggttggcgagtcaccctggaccagaagacggcgctgacgggtgggggccaagcactaactccgcacgggctccgccactgcccatacctgcatctagcctactgtccaatctcgaacagtacttggccgaatcagtagtcaacttcacaggcggccaggaaccaacacaaagccctcccgctgaggaggagaggcgttataagtgcagccagtgcgggaagacctacaaacacgccggcagcctgacaaaccaccgacagagccacactctgggaatatatccctgcgccatttgctttaaagagttctcaaatttgatggctttaaagaatcatagtaggctgcatgcgcagtatcgaccctatcattgtccccactgtccacgtgtattcagattgcccagggagttgctggaacaccaacaatctcatgagggggagagacaagagcctcgatgggaagagaagggcatgcccacaactaatgggcacactgatgaaagcagtcaagaccagctcccgtcagcacagatgctgaacggctccgccgagctcagtacatcaggtgaactcgaagacagtggcctggaggagtatagaccgtttagatgcggagactgcggccgtacataccgccatgccggctccctgatcaaccaccgcaaaagccaccagactggggtatacccctgttccctgtgctccaagcagttgtttaacgcagctgctctgaagaatcatgtgagggcccaccacagaccccggcagggagtaggcgaaaatggccagcccagcgtcccccctgcacccctgctgcttgcagaaactacacacaaggaggaagaggatccaacaactactttagatcacagaccttacaaatgctccgagtgcgggagggcctatcgccataggggcagtctggttaaccaccgccattcacatcggaccggtgagtaccagtgctcactgtgtcctcggaagtatccaaatctaatggcactcagaaatcacgtaagggttcactgtaaagccgcccggcgctctgccgacatcggtgccgagggtgcaccatcacacctgaaagtcgaactgccccccgaccctgtggaggcagaagcagctcctcacacagatcaagaccacgtgtgcaagcacgaggaggaagccacagatattacaccggccgcagacaaaacagctgcccatatctgcagcatctgcggcttactattcgaagacgcagagagtctggagagacatggactgacccacggggccggcgaaaaagaaaacagccgaacagagacaactatgtcgcctccaagagccttcgcctgtagggactgcggtaagtcctataggcattctgggagtttgataaatcatagacagacgcaccagacaggcgacttctcatgtggggcatgtgccaagcactttcacacgatggccgcaatgaaaaaccacttgagaagacactcccggaggaggtcaaggcggcaccggaaacgagcggggggggccagtggaggccgggaggcaaaactccttgccgctgaatcatggacccgggaactggaagataatgagggactggagtcaccgcaagacccatcaggtgagtcaccccacggcgcagaggggaacttagagagcgatggcgactgtttacaagctgagagcgaaggggacaagtgtggactggagagggacgagactcacttccaaggggacaaagagtcagggggtactggagaagggctagagcggaaagatgcctccctgcttgataaccttgatatccccggggaggagggaggggggactcacttttgcgactctctgactggagttgatgaggaccagaaaccggctaccgggcagccaaattcatcttcccacagcgccaatgccgtaaccggctggcaagctggcgcagctcatacctgcagtgattgtgggcacagttttcctcatgccacagggctgctcagccaccgcccttgtcatccgcccggaatttatcagtgttcactgtgccctaaagagttcgatagtctgccagccctgcgcagccactttcagaaccaccgccccggtgaagccacttcggcccaacccttcctctgctgcctgtgtgggatgatttttcctgggagagccggataccgactgcatcgcaggcaggcccactcgagctccggaatgacagagggcagcgaggaagagggggaggaagaaggggtggcggaagctgctcccgctcgatcccccccactgcaactgtctgaggcagagctcctgaaccagctgcaacgcgaggtggaagctcttgattcagccggatacggacacatttgcgggtgctgcggtcagacctacgacgacttaggcagcttggagagacaccaccagtcccagtcgtctggaacaactgctgataaggccccatcccccctaggggttgcaggcgatgcaatggaaatggtggtcgactcagtcctcgaggatatcgtcaatagtgtgagtggcgaaggcggcgatgcgaagtcccaggaaggcgcaggcacccctctgggcgatagcctgtgtatccagggaggcgaatccctgttggaagcgcagcctaggccgtttcgatgtaaccagtgcggcaagacatacaggcacggagggagcctggtcaatcaccggaagattcaccagaccggcgatttcttgtgccctgtgtgcagtaggtgctatcccaaccttgctgcataccgtaaccatctcagaaaccatcctcggtgtaaggggtccgaaccacaggtagggcctattcccgaagctgccggttctagtgagctacaagtgggacccatccccgaggggggctcgaacaagccacagcacatggccgaggaaggtccagggcaggccgaagtggagaagctgcaagaggagcttaaggtcgaaccactcgaagaagtggcccgggtgaaggaagaagtgtgggaagaaactactgtgaagggcgaagaaattgaacccaggcttgagaccgccgagaagggatgccaaactgaggcttcgagcgaacggcctttttcctgcgaagtctgcggccgcagctacaagcatgctgggtccctaatcaaccatagacagtctcatcaaactggccacttcggctgccaggcttgtagtaagggatttagtaacctaatgtcccttaaaaaccatcggcgcatccacgcagacccacggcggttccgttgctctgagtgcggaaaggcatttcgcttaagaaaacagctcgctagccatcaacgcgtgcacatggagagaaggggtgggggtggcacccggaaagccacacgagaggaccggcctttcaggtgcggtcaatgcggtcgaacatataggcacgcgggaagtctcctgaaccaccggaggtcccacgagacaggacagtactcctgccccacctgcccaaaaacttactcgaatagaatggctctaaaagaccaccagagactgcattccgagaatagaagacgacgggcaggccgatcacgcaggacggccgtgcgctgtgccctctgtgggcggagtttccccggaaggggatcgctcgagagacaccttcgggaacacgaagaaacagagagggaaccagccaatggccaggggggactggatgggaccgccgcgtcagaagctaacttgaccggatcccaaggcctggagactcagctggggggagccgaacctgttccccaccttgaagatggggtcccccgccctggagagcggtcacagtcaccaatacgggcagcgagtagtgaggccccagagccattaagctggggagccgggaaggcaggcggatggccagtgggcgggggcctgggcaaccattcaggtggttgggtgcctcaattcctgacacggagtgaggagccggaggacagcgttcataggtctccctgccacgcgggagactgccagcttaatggcccaactctcagccacatggattcttgggataacagggataacagtagtcaattacaacctggaagccatagttcttgctcccaatgcgggaagacatattgtcagtcagggagtcttctgaatcacaatactaacaagaccgacagacactactgtctgctgtgttccaaagaatttcttaatccagtggccaccaaatcccactctcataatcacattgacgcacaaacctttgcgtgtcccgattgcggaaaagcctttgagtcccaccaggagctggccagtcatctgcaggcccatgcgaggggacacagccaggtccccgcccagatggaggaggctcgggatcccaaagcgggcacgggcgaggaccaagtggttttgccgggacagggaaaggcacaagaagccccgtctgaaacaccgaggggccccggagagtctgtggagcgagcacgaggaggtcaggctgtgacttcaatggctgctgaagacaaagaacggccatttcggtgcacccagtgcgggcggtcttacaggcatgctgggagcttgctgaaccaccagaaagcgcacaccacaggcctctacccatgttccctgtgccccaagctcctcccaaacctgctctcactgaagaatcactcccgcacacacaccgatcctaaacgccactgttgcagtatatgtggtaaagctttcaggaccgccgcaagactggagggccacggtagagtccacgccccccgggaaggaccatttacgtgtccgcattgtcctcgccatttcaggcgccggataagttttgttcagcatcaacaacagcatcaggaggaatggactgtcgcaggatcaggcgctcccgtagccccagtgactggacgtggtgatctgccgctcccaccgccccctaccccaacgactcccctgctggacccaagtccccaatggcccgcagatctttccttctcactgtag

SEQ ID NO: 181643 - DNA, 582 bp, Artificial Sequence
  derived and/or modified sequence
gaaagacggtacaaatgctcccagtgtggtaaaacctataagcacgcaggatctctcaccaatcaccggcagtcccacaccctgggtatttacccctgtgccatttgttttaaagaatttagtaatctgatggcgctcaaaaatcattcccgtctgcacgcccagtacagaccataccactgccctcactgtccacgcgttttcaggttgccccgtgagctgctcgagcaccagcagtcccacgaggcggcacggccctttagttgcgaggtgtgcggaagaagttataagcacgcaggttctcttatcaatcaccgacagtcccaccagactgggcatttcggatgtcaagcgtgcagcaaggggttcagtaatctcatgtctctaaaaaatcaccgacgtattcatgctgaccccagacgctttcgctgttccgagtgcgggaaggcctttcgactgcggaaacagctcgcatctcaccagcgtgtccacatggagaggcaccggccattcagatgtggacagtgcggccgcacctatcgacatgctggctccttgttgaatcaccggagatctcactag

SEQ ID NO: 181644 - DNA, 5499 bp, Artificial Sequence
  derived and/or modified sequence
atggaggacaccccacccagcctgagctgcagcgactgccagaggcacttccccagcctgcctgagctgagccgccaccgggagctgctgcaccccagccccaaccaggacagcgaggaggccgacagcatcccccggccctaccgctgccagcagtgtggccggggctaccgccaccctggcagcctggtgaaccacaggaggacccatgagaccggcctcttcccctgcaccacctgtgggaaggacttcagcaaccccatggccctgaagagccacatgaggacccacgcccctgagggcagaagaagacacaggcctccccggcccaaggaggccaccccccacctgcagggcgagaccgtgtccacagacagctggggccagaggctgggcagcagcgagggctgggagaaccagaccaagcacacagaggagaccccagactgtgagagcgtgcctgacccccgggccgccagcggcacctgggaggacctgcccacccggcagcgggagggcctggccagccaccctggcccagaagatggagcagatggctggggccccagcaccaacagcgcccgggccccacccctgcccatcccagccagcagcctgctgagcaacctggagcagtacctggccgagagcgtggtgaacttcaccggcggccaggagcccacccagagccccccagctgaggaggagcggcgctacaagtgcagccagtgtgggaagacctacaagcatgctggcagcctgaccaaccaccggcagagccacaccctgggcatctacccctgtgccatctgcttcaaggagttcagcaacctgatggccctgaagaaccacagccggctgcacgcccagtaccggccctaccactgcccccactgccccagggtcttccggctgccccgggagctgctggagcaccagcagagccatgaaggagagcggcaggagccccgctgggaggagaagggcatgcccaccaccaacggccacacagatgagagcagccaggaccagctgcccagcgcccagatgctgaatggcagcgctgagctgagcaccagcggggagctggaggacagcggcctggaggagtaccggcccttccgctgtggggactgtggccgcacctacagacatgctggcagcctcatcaaccacaggaagagccaccagacaggagtgtacccctgcagcctgtgcagcaagcagctgttcaatgctgctgccctgaagaaccacgtgcgggcccaccaccggccccggcagggcgtgggggagaatggccagcccagcgtgcccccagcccccctgctgctggccgagaccacccacaaggaggaggaggaccccaccaccaccctggaccaccggccctacaagtgcagtgaatgtggccgggcctaccgccaccggggcagcctggtgaaccaccgccacagccacaggactggagagtaccagtgcagcctgtgccccaggaagtaccccaacctgatggccctgaggaaccacgtgcgggtgcactgcaaggccgccaggagatctgctgacatcggggctgagggcgcccccagccacctgaaggtggagctgcccccagaccctgtggaggccgaggccgccccccacacagaccaggaccacgtgtgcaagcatgaggaggaggccacagacatcaccccagctgctgacaagacagctgcccacatctgcagcatctgtggcctgctgtttgaagatgctgagagcctggagagacatggcctgacccatggagctggggagaaggagaacagcaggacagagaccaccatgagccccccccgggcctttgcctgccgggactgtgggaagagctaccgccacagcggcagcctcatcaaccaccggcagacccaccagacaggagacttcagctgtggggcctgtgccaagcacttccacaccatggccgccatgaagaaccacctgcggcggcacagcagaagaagaagccgccgccacaggaagagagctgggggcgccagcggcggccgggaggccaagctgctggccgctgagagctggacccgggagctggaggacaatgaaggcctggagagcccccaggaccccagcggggagagcccccatggagctgagggcaacctggagagtgatggagactgcctgcaggccgagagcgagggggacaagtgtggcctggagagagatgagacccacttccagggcgacaaggagagcggcggcactggagagggcctggagaggaaggatgccagcctgctggacaacctggacatccctggagaggagggcggcggcacccacttctgtgacagcctgactggagtggatgaggaccagaagccagccaccggccagcccaacagcagcagccacagcgccaatgctgtgacaggctggcaggccggggccgcccacacctgcagcgactgtggccacagcttcccccacgccaccggcctgctgagccaccggccctgccaccccccaggcatctaccagtgcagcctgtgccccaaggagtttgacagcctgcctgccctgcggagccacttccagaaccacaggcctggagaggccaccagcgcccagcccttcctgtgctgcctgtgtggcatgatcttccctggccgggccggctaccgcctgcaccggcggcaggcccacagcagcagcggcatgacagagggcagcgaggaggagggggaggaggagggcgtggccgaggccgccccagcccggagcccccccctgcagctgtctgaggccgagctgctgaaccagctgcagcgggaggtggaggccctggacagcgctggctacggccacatctgtggctgctgcggccagacctatgatgacctgggcagcctggagcggcaccaccagagccagagcagcggcaccacagctgacaaggcccccagccccctgggcgtggccggagatgccatggagatggtggtggacagcgtgctggaggacatcgtgaacagcgtgtctggagagggcggagatgccaagagccaggagggcgccggcacccccctgggggacagcctgtgcatccagggcggggagagcctgctggaggcccagccccggcccttccgctgcaaccagtgtgggaagacctacagacatggaggcagcctggtgaaccacaggaagatccaccagacaggagacttcctgtgccctgtgtgcagccgctgctaccccaacctggccgcctacagaaaccacctgaggaaccacccccgctgcaagggcagcgagccccaggtgggccccatccctgaggccgccggcagcagcgagctgcaggtgggccccatccctgagggcggcagcaacaagccccagcacatggccgaggagggccctggccaggccgaggtggagaagctgcaggaggagctgaaggtggagcccctggaggaggtggcccgggtgaaggaggaggtgtgggaggagaccaccgtgaagggggaggagattgagccccggctggagacagctgagaagggctgccagacagaggccagcagcgagcggcccttcagctgtgaggtgtgtggccgcagctacaagcatgctggcagcctcatcaaccaccggcagagccaccagacaggccacttcggctgccaggcctgcagcaagggcttcagcaacctgatgagcctgaagaaccaccggcgcatccatgctgacccccggcgcttccgctgcagtgaatgtgggaaggccttccggctgaggaagcagctggccagccaccagagggtgcacatggagaggagaggaggcggcggcaccaggaaggccaccagagaagatcggcccttccgctgtggccagtgtggccgcacctacagacatgctggcagcctgctgaaccaccggcgcagccatgaaacaggccagtacagctgccccacctgccccaagacctacagcaacaggatggccctgaaggaccaccagaggctgcacagcgagaacagaagaagaagagctggccgcagcagaagaacagctgtgcgctgtgccctgtgtggccgctccttccctggccggggcagcctggagcggcacctgcgggagcacgaggagacagagcgggagcccgccaacggccagggcggcctggatggaacagctgccagcgaggccaacctgaccggcagccagggcctggagacccagctgggcggcgctgagcctgtgccccacctggaggatggagtgcccaggcctggagagaggagccagagccccatccgggccgccagcagcgaggcccctgagcccctgtcctggggcgccggcaaggccggcggctggcctgtgggcggcggcctgggcaaccacagcggcggctgggtgccccagttcctgaccaggtctgaggagcctgaggacagcgtgcacaggagcccctgccacgccggggactgccagctgaatggccccaccctgagccacatggacagctgggacaacagagacaacagcagccagctgcagcccggcagccacagcagctgcagccagtgtgggaagacctactgccagagcggcagcctgctgaaccacaacaccaacaagacagacagacactactgcctgctgtgcagcaaggagttcctgaaccctgtggccaccaagagccacagccacaaccacattgatgcccagacctttgcctgcccagactgtgggaaggcctttgagagccaccaggagctggccagccacctgcaggcccacgcccggggccacagccaggtgcctgcccagatggaggaggcccgggaccccaaggccggcaccggggaggaccaggtggtgctgcccggccagggcaaggcccaggaggcccccagcgagaccccccggggccctggagagagcgtggagcgggcccggggcggccaggccgtgacctccatggctgctgaggacaaggagcggcccttccgctgcacccagtgtggccgcagctacagacatgctggcagcctgctgaaccaccagaaggcccacaccaccggcctgtacccctgcagcctgtgccccaagctgctgcccaacctgctgagcctgaagaaccacagcaggacccacacagaccccaagaggcactgctgcagcatctgtgggaaggccttcagaacagctgcccggctggagggccacggccgggtgcacgccccccgggagggccccttcacctgcccccactgccccaggcacttcagaagacgcatcagctttgtgcagcaccagcagcagcaccaggaggagtggacagtggccggcagcggggcccctgtggcccctgtgacaggccgcggggacctgcccctgcccccaccacccacccccaccacccccctgctggaccccagcccccagtggccagctgacctgtccttcagcctgtag

SEQ ID NO: 181645 - DNA, 582 bp, Artificial Sequence
  derived and/or modified sequence
gagcggcgctacaagtgcagccagtgtgggaagacctacaagcacgccggcagcctgaccaaccaccggcagagccacaccctgggcatctacccctgtgccatctgcttcaaggagttcagcaacctgatggccctgaagaaccacagccggctgcacgcccagtaccggccctaccactgcccccactgccccagggtcttccggctgccccgggagctgctggagcaccagcagagccatgaagctgcccggcccttcagctgtgaggtgtgtggccgcagctacaagcatgctggcagcctcatcaaccaccggcagagccaccagacaggccacttcggctgccaggcctgcagcaagggcttcagcaacctgatgagcctgaagaaccaccggcgcatccatgctgacccccggcgcttccgctgcagtgaatgtgggaaggccttccggctgaggaagcagctggccagccaccagagggtgcacatggagcggcaccggcccttccgctgtggccagtgtggccgcacctacagacatgctggcagcctgctgaaccaccggcgcagccactag

SEQ ID NO: 181646 - DNA, 5499 bp, Artificial Sequence
  derived and/or modified sequence
atggaggacaccccccccagcctgagctgcagcgactgccagcggcacttccctagtctccctgaattatccaggcacagagagctgctacacccgtccccaaatcaggacagtgaagaggccgacagtattccgcgtccttatcgatgccagcagtgtgggcggggctatcgacacccgggaagccttgtgaaccataggcgcacgcatgaaaccggtctcttcccatgtacgacctgtggcaaggacttcagcaacccaatggccctgaaatcccatatgagaacacacgcacccgaaggccgacgtaggcatcgcccccccaggcctaaagaggccactccgcatcttcagggggagaccgtgagtaccgactcgtggggtcaacgattaggaagctctgaagggtgggagaatcagaccaaacacaccgaggagactccagactgtgagtccgtccctgacccgcgggcagcgtcaggcacatgggaggacctacctacacgtcagagagagggcttggccagtcatcccggtcctgaggacggtgcagatgggtggggaccaagcacaaacagcgcaagggcccccccattgccgatacctgccagcagtctcctgtcaaacctggaacagtacctcgccgaatctgtcgtcaattttaccggtgggcaagagcctacacagtccccccctgctgaggaggaacggaggtacaaatgtagccagtgtggtaagacttataaacacgcaggttcactgaccaaccacaggcaaagccacacactagggatttacccatgtgcgatctgtttcaaggagtttagcaacctaatggcactcaaaaaccattcaagactgcatgcgcagtacagaccctaccattgtcctcattgcccacgagtgttccgcctccctcgggagctgctggagcaccagcaatcccacgagggagagcgccaagaacctcgatgggaagagaaaggtatgcctaccaccaatggtcacaccgatgaatctagccaagaccagctgccaagcgctcagatgcttaacggctccgctgaactctcaacatcaggtgagctggaagacagtggcctggaggagtaccgccccttccgctgcggcgactgtggacgcacttaccgtcacgcaggctcattaataaaccatagaaagagccaccagactggggtgtatccttgttcactatgctcaaaacagttattcaatgctgcagccctcaaaaaccacgtgcgggcccatcaccgcccacggcagggcgtcggagagaacggacaaccctctgtccccccagctccgctcctcctagctgagactacccataaggaggaagaggacccaacaactaccctggaccacagaccctacaagtgctccgagtgcgggcgggcctatagacaccgggggagcctggtgaaccaccgccattcccaccggaccggcgagtaccaatgttccttgtgcccacggaagtatccaaacctgatggccctgcgaaaccatgtgagggtccattgtaaagccgccaggcggtctgccgatatcggagccgagggggcaccgagtcacctgaaggtggaactgccacccgatcccgtggaagcggaggccgccccccatacagaccaagaccacgtctgcaaacatgaggaggaggcaaccgacattacacccgctgctgacaagactgcggctcatatctgttctatttgtggtctgctgtttgaggacgctgagagcctcgagcgccatggcttgacccacggcgccggtgagaaggagaattcaaggacagaaactaccatgtcaccgccacgggctttcgcctgtagagattgtggcaagagctaccgtcactccggatctcttatcaatcatagacagacccaccaaacgggagatttttcttgtggagcctgcgcgaaacattttcacacgatggcggcaatgaagaatcacttgagacggcactcacgtcggaggtcgcggaggcaccgaaagcgcgcaggtggtgcttccggaggaagagaggctaagctacttgctgctgaaagttggaccagggaactggaggataatgaaggccttgagtccccacaggatccaagcggggagtctccgcacggcgcagagggtaatctcgagtccgacggggattgcctgcaggccgaatcggagggcgacaagtgtggactggagcgagacgagactcattttcagggtgacaaggagagtgggggcaccggggagggactggagagaaaggatgcatcactcttggacaatctcgacattcctggagaagagggggggggcactcacttctgcgattcccttaccggtgtggacgaagaccagaaaccagcaaccgggcaaccaaatagctccagtcacagtgccaatgctgttaccgggtggcaggccggagccgcgcacacatgtagcgactgtgggcactcattcccacacgccaccggcctgctgagtcatcgcccgtgtcatccccccggtatttaccagtgctcactgtgtccaaaagagtttgatagcttgcctgctcttcgcagccatttccagaaccaccggcccggcgaggccacgtctgctcaaccatttctgtgttgcctatgtggcatgatctttcctggacgggccggttacaggctacaccgaagacaggcacatagttccagcggcatgactgaaggctccgaagaggaaggggaggaagagggtgtggctgaggctgcccctgctcgctccccgccactccagttgtctgaggccgagctgctgaatcaactgcagcgggaagtagaggctctggactcggcaggctacgggcacatctgcggatgttgcggacaaacctatgacgacctggggagccttgaaaggcaccaccagtcacagagcagcggaactacggcagacaaggccccttctcctctcggtgtggccggggacgccatggagatggtggtcgattccgtcctggaagacattgtgaacagtgtctctggtgaggggggggacgctaagtctcaggagggcgctggaaccccacttggagactcactgtgcatccagggtggggagtccctgcttgaggcccagccacgacctttccgctgcaatcagtgcggtaagacatataggcacggaggaagtctcgtgaaccatcgaaaaatacatcagaccggggactttctgtgtcccgtatgctcgagatgctaccccaacttggcagcatacagaaaccatcttcggaatcaccctcgctgtaagggctctgaaccccaggtggggcctataccagaggccgcaggaagttctgaactgcaagtgggccctattcccgagggtggcagcaacaaacctcagcacatggcggaggagggtccaggccaggccgaggtagagaaacttcaagaggaactgaaggtggaacctttggaggaggtagcacgcgttaaagaggaggtctgggaagagactaccgtcaagggcgaggaaattgagcctcggttagagacagctgagaaaggctgccagaccgaggccagcagcgagcggcctttttcctgcgaggtgtgtgggaggtcatacaaacacgctgggtctctgatcaaccataggcagagccatcagacaggccactttggttgccaagcgtgctcgaaaggcttttcaaatctcatgagtctgaagaaccacagacgcatacatgctgatcccaggaggtttagatgttccgagtgcggtaaagcattcaggctccgaaagcagctggcttctcatcagcgggtgcacatggaaagaagaggtggcggtgggacacggaaagctactcgggaggatcgcccctttcgatgcggccaatgcgggcggacctaccgacacgcaggatcactgcttaaccaccggagaagccatgaaacgggtcagtactcctgtccgacgtgtccgaagacttattctaacaggatggcactcaaagaccaccagagactgcatagcgagaatcgaaggagacgcgcaggaagatcaaggcggacagccgtccgctgcgctctgtgtggccggtcattccccggtagggggagcctggaaaggcatctaagagagcatgaggagacagaacgggaacccgcgaacggacaaggaggattggatggtacagccgcatccgaagcaaacctaactggttcccaggggctggaaactcagctggggggtgccgaaccagtcccccatctggaggacggagtgccacgccctggagaacgctcccagagtccaatccgggccgctagctccgaagcacctgagcccctgagctggggtgccggaaaggccggtggctggcccgtcggtggaggactggggaaccactccggcgggtgggtgccccagtttctaactcggtctgaggaacccgaggatagcgtccaccggtctccttgtcatgctggtgattgtcagctaaatggacccacactttcgcatatggactcgtgggataatagggataattctagccagcttcaacctggctcgcacagcagctgttcgcagtgtggtaagacatactgccaatctggcagtttgctcaatcataacaccaataagactgacagacactattgtctgttgtgttcaaaagaatttctgaacccagttgctactaagtctcactcacacaaccacattgacgcccagacatttgcctgtcccgactgcggtaaggcctttgagtctcaccaggaattggcctcccaccttcaggcgcacgctcggggccactctcaggtccctgcccaaatggaggaggccagagatcccaaagccggaaccggagaggaccaggtagtgctgcctggacagggcaaagctcaggaggcaccctctgaaaccccgcggggccctggagagtcagtagagagagctcgcggtggccaggccgtgacctccatggccgccgaagacaaagaacggcccttccggtgcacgcaatgtggtcggagctaccgacacgcagggagccttcttaatcaccaaaaagcgcacacaaccggcctgtacccctgttctttatgtcccaagctgctacctaacctgctgtccctgaagaaccattcccgcacgcataccgatcctaagaggcactgttgtagcatctgcggcaaggcgtttcgcactgccgcacggctcgaggggcacggaagagtgcacgctcctcgcgagggaccctttacatgcccgcactgtcctcgacacttccgccgccggatctcattcgttcagcaccaacagcagcatcaggaggagtggacagttgctggttccggtgcacctgtggctcccgttaccggccggggggatctgcccctgccccccccaccaacacccaccacccctctgctcgatccgagtcctcagtggcctgcggatcttagctttagcctatag

SEQ ID NO: 181647 - DNA, 582 bp, Artificial Sequence
  derived and/or modified sequence
gagcggcggtacaagtgcagccagtgcggcaagacctacaagcacgcaggatccctcacaaaccacaggcagtcccacacccttggcatttatccctgtgccatctgtttcaaagaattcagcaatctgatggcgcttaaaaatcactctcggttgcatgctcagtacaggccctaccactgtccccattgccccagagtcttccgactgcctagagagcttttggaacaccagcagagccacgaggctgcacgcccgttttcctgcgaagtgtgcggccggtcgtacaagcacgcgggatccctgattaatcaccggcagtcccaccagacaggccactttggttgtcaagcgtgttccaaaggtttttctaacctgatgtcattaaaaaatcacaggcgcatccacgcggatccgcggagattccggtgcagcgagtgtgggaaagcctttcgtttgaggaaacagttggcctctcatcagcgggtacatatggaacggcatcgtcccttccgctgcgggcagtgcgggcgcacctaccgacacgctggcagccttttgaaccacaggcggagccactag

SEQ ID NO: 181648 - DNA, 5498 bp, Artificial Sequence
  derived and/or modified sequence
atggaggatacaccgccatctctttcctgcagtgattgtcagagacactttccatccctcccggagctctctcgacacagggaactgcttcatccctcacccaaccaggattccgaggaagccgactcgattcctcgaccttatcgctgccagcagtgtggcagagggtaccggcatccaggctccctggtgaaccaccggcgtacccacgagacaggactattcccctgcacaacctgtggcaaagacttctcaaacccaatggctttgaagtcccacatgaggactcacgctcctgaaggtagaaggcggcacagacccccacggccaaaggaagcaactcctcatctgcaaggagagactgtctccacagactcatgggggcagcggctgggttctagcgaaggatgggagaatcagactaagcatactgaggagactccagattgtgagtctgttcctgaccccagggccgcttcaggaacctgggaggacctgccgactcgtcaaagagaaggactcgctagccaccctggtcctgaggatggagcagacggctggggaccatcgaccaacagcgctcgagctccaccgttgcccattcctgcctcatctttgttgtccaacctggagcagtacctcgcagaatctgtggtgaattttaccggcggtcaagagcccacgcagagtcccccagcggaggaggagcgcagatacaagtgtagtcagtgtggcaagacatataagcacgccggttcactgacgaatcacaggcagtctcacaccctcggcatctatccatgtgctatctgtttcaaagagttttccaatttgatggccctcaaaaaccattctcgcctccacgcccaatatcgtccatatcactgccctcactgtcccagggttttccgtttaccacgggagctcctcgagcaccaacagtctcacgaaggagaaaggcaagagcccaggtgggaagagaagggcatgcccactaccaatggacatacagatgagtcatcccaggatcagctgccttccgctcaaatgctgaacgggtccgccgaactatccacctccggtgaattggaggattccgggctcgaggagtaccgtccatttcgatgtggagattgtggcaggacttatcgccacgcaggatctctgattaatcacagaaagtcacaccagaccggggtgtacccttgtagcctgtgcagcaaacagctctttaacgccgctgccttgaaaaatcacgtgcgagcacatcataggccgaggcagggggtgggtgaaaatggccaacccagtgttccacccgcaccactgttgcttgccgagacaacgcataaggaggaagaagatcctaccactaccttggatcatcggccatacaaatgctctgagtgcgggagagcctatagacacagaggctcattagtgaatcacaggcactcacataggacgggcgagtaccagtgtagcctgtgccctcgaaagtaccctaatctcatggccctacgtaaccacgtgcgcgtgcactgtaaggcagccagaagatccgctgatattggcgctgagggagctccctcacatcttaaagtagaacttcccccagaccccgtggaagcagaagcagctccacataccgaccaggatcacgtttgcaagcacgaggaggaggccacggacattacacctgcagccgataaaactgccgcacatatttgttccatttgcggtcttctgtttgaggacgccgaaagtctcgagagacatggcttgactcacggtgcaggagagaaagagaactcgcgcacagagacaacaatgtctccccctagagctttcgcgtgccgagattgtggcaaatcataccgacactcgggatcactcatcaatcaccggcagacccatcagaccggcgacttctcttgcggagcttgtgcgaagcacttccatacgatggcagcgatgaaaaaccaccttcgaagacattcaaggagaaggtcaaggaggcaccgaaagagggccggaggagcctctgggggaagagaagcgaagcttctggccgcagaaagttggactcgcgaactcgaggacaatgaggggctcgagagtccacaggacccctccggagagagtccacacggtgcagagggtaatctcgaatccgacggagattgtctgcaggctgaatccgagggtgataagtgtggcctcgagagagacgagacccacttccagggggacaaagaaagcggaggtacgggtgaaggcctggagaggaaggacgccagtctcctcgacaacctggacatccccggagaagaaggcggaggcacacatttttgcgactccctgacaggggtggatgaggatcagaagcctgctactggccaaccaaactcctcttcccattctgcaaatgccgtaactggttggcaggctggggctgcccacacctgtagcgattgcggccactcattcccacatgctacagggctgctgtcccaccgaccctgtcacccccctggaatataccaatgtagcctctgcccgaaggaatttgactccctccccgcactgcggagtcactttcagaatcaccggcctggagaggctaccagtgctcaacccttcctctgttgtctgtgtggaatgatctttcccggaagggccggataccggctgcaccggagacaggcgcattccagcagcggcatgaccgaggggagcgaggaggagggcgaggaggagggagtggcagaggctgcgccagctagaagcccccctctccaactgtctgaggcggagctgctgaaccaacttcagagagaggtagaggcactcgactccgctggatacgggcacatttgcggatgctgcggccaaacatacgatgatctcgggtctctggaaaggcaccaccagtcccaatcttctggaactactgcagacaaggccccaagtcccctgggcgtggctggagatgccatggaaatggtggttgatagtgtgttggaagacatcgtcaattccgtgtccggtgaaggaggagatgccaaatcccaggagggcgctggtacccctctgggtgactccctgtgtatccagggaggggaatctttactcgaggcgcaacctcggccatttcgctgtaaccagtgcggtaagacttatcggcatgggggatccctcgtgaaccaccggaagatccatcagacaggtgacttcctttgtccggtctgttctcgatgctatccaaacctggcagcgtataggaaccatttgcgaaatcatccccgatgtaagggatctgagccgcaggtgggaccaattcccgaggctgccggtagctccgagcttcaggtgggacctatcccagaagggggatctaacaagccccagcatatggctgaagaggggcctggtcaggccgaagttgagaagctccaggaagagctcaaggtggagccacttgaagaagtggctcgggttaaggaggaggtctgggaggagaccactgtcaaaggcgaagaaatcgagccgaggcttgaaactgcggagaagggatgtcagacagaagccagttcagagaggcccttcagttgtgaggtctgcggcaggtcctacaagcacgcaggaagtctcatcaaccatcggcagagtcatcagaccgggcacttcggctgccaggcgtgctcgaaaggattctctaatctcatgtcactcaaaaatcacagaagaattcatgccgatccaagaagatttcgctgctcggagtgtgggaaggcgttcagactcagaaagcagctggcgagccaccagcgggtacatatggagcggaggggaggaggcggaactcggaaagccactcgtgaagataggcccttccggtgcggccagtgtggacgcacataccgacatgccggatctctgctgaatcatagaaggtcacatgagacaggacagtactcttgtcccacatgcccaaaaacctacagcaatagaatggccttgaaagaccaccaacggctccacagcgagaaccgccgaagaagggccggtcggtcaagacgcactgcagtgcgatgcgcgctttgcgggagatccttcccaggcaggggcagcttggaacgacacctgagagaacacgaagagacggagagggagccggcaaatggtcaaggcggactggatggcactgccgcatccgaggccaacttgacaggtagtcagggcttggaaactcagctgggcggagccgaaccagtaccacacctggaagatggggttccacgtcccggagagcggtcacagagccccatccgagctgcctccagtgaagccccagaacctctaagctggggcgctgggaaggctggcggttggcccgtgggcggtggccttggtaaccattctggtggctgggtgccacaatttctgactcggtccgaggaacctgaagattcagtgcataggtcgccatgccatgctggcgattgccagctaaatgggcctaccttgtctcacatggacagttgggataacagagataactcctcgcaactccagcctggctctcattcctcctgttcccagtgcgggaagacttattgccagagcgggagcctcctgaatcataacacgaacaagaccgataggcattattgcctgctttgctctaaagagtttctcaatccagtggccacgaaatcgcatagccataatcatattgacgcgcaaacctttgcttgtcccgactgtgggaaagcctttgagtcccaccaagaacttgcctcacacctacaggcacacgctcgtggacattcacaggtacctgcccagatggaagaagcaagagatcctaaggccggaaccggggaagaccaggtagtgctgcccggacagggaaaagcccaggaggcacccagcgaaacaccccgtgggcctggtgagtccgtcgagcgtgctcgcggaggacaggccgtgacatctatggccgcagaagacaaggagcgccctttcaggtgtacgcaatgtgggaggtcctaccgccacgctggctccctccttaaccaccaaaaagcacatacgaccggactgtacccctgcagtttgtgccctaagctgctccctaatttgctatctctgaagaatcattctcgaacgcacactgatccaaaaaggcactgttgtagcatatgtggcaaagcatttcgcaccgccgctagactggaaggtcatgggcgtgtacatgcccctagagaaggtcccttcacatgtccccattgcccaaggcattttaggagacgtatctccttcgtccagcaccagcaacagcaccaggaggaatggacagtcgctggctccggtgccccagtcgccccagtgactggaaggggtgacctccccctgccaccacccccaaccccaaccacacccctactggatccatcaccgcagtggcctgcggatctgagcttctccctgta

SEQ ID NO: 181649 - DNA, 582 bp, Artificial Sequence
  derived and/or modified sequence
gagcgccgatataaatgttcacagtgcggaaagacctataagcacgcaggatcactgaccaaccatagacagtcccacactttgggaatctatccctgcgcaatctgcttcaaggaattttctaatcttatggcactgaaaaaccactcaagactccacgctcagtaccgtccttaccattgccctcactgcccgagagtttttcgactgccgagagagctcctggagcaccagcagtcccacgaggccgctcggccattttcttgtgaggtttgtggaaggtcttacaaacatgcaggctccctcatcaatcacaggcagtcccaccagaccggccatttcgggtgtcaggcgtgctcgaaggggttcagtaatctgatgtccctgaagaaccatcgcaggattcatgccgatcctcggagatttagatgctctgagtgtggaaaggccttccgactacggaaacagttagcaagccaccaaagggtgcacatggaaaggcacagaccattccgctgtggccagtgtggaagaacctatcgccacgccggaagcctcctgaatcatcggaggtcgcattag

SEQ ID NO: 181650 - DNA, 6183 bp, Artificial Sequence
  derived and/or modified sequence
gctgggagtagactcctggctcatgccagctgcgccctcttttctctacctccttcctcttccccccttctcctttccctctttcccttccctcccacctcccgggaaccctggctgagtgtgcgtgtgtgggagcgcgagagccccccgacagccaccccttggggcgcgcggctgcagttagggccttggcccctccaccagaggaaggtgctgccacgtgtctgctccttctgaacctccaggtttctgctacgttgccccatggaggacacacccccctcactcagctgctccgactgtcagcgccactttcccagcctcccagagctctctcggcaccgagaactgctccatccatctcccaaccaggacagtgaggaggctgacagcatccctcggccctaccgttgtcagcagtgtgggcggggctaccgtcaccccgggagcctggttaaccatcgtcggacccacgagactggccttttcccctgtaccacctgtggcaaggacttctccaatcccatggctctcaagagccatatgaggacacatgctcctgagggccgccgcaggcacaggcccccacgccccaaggaagccactccacacctccagggtgagacggtgtccactgactcctggggccaaaggcttggctctagtgaaggctgggaaaaccagacaaaacatacagaagagacacctgactgtgaatctgtacctgaccccagggcagcttcgggtacgtgggaagatctgcccaccagacaaagagaaggcttggcaagccacccaggtcctgaggatggtgcagacggctggggaccctccactaactctgccagagcccctcctctccccatcccagccagcagccttcttagcaacttggaacagtatctggctgaatcagtagtgaacttcacagggggccaggagcccacccagtcccctcctgctgaggaggagcggcggtacaaatgtagtcagtgtggcaagacctacaagcacgccgggagcctcaccaaccaccgccagagccacacgctgggcatctacccctgtgccatctgtttcaaggagttctctaacctcatggctctgaagaaccactctcgactgcatgcccagtatcggccttaccactgtccccactgcccccgtgtcttccggctcccccgggagctgctggaacaccagcagtcccatgagggtgaaaggcaggagccacgctgggaggagaaagggatgcccaccaccaatgggcacacagatgagagcagccaggaccagctccccagtgcacagatgctgaatggctctgcggagctcagcacctctggggagctggaggacagtggcctggaggaataccggcctttccgctgtggggactgtggccgtacttaccgccatgctgggagcctcatcaaccatcgaaagagccaccagacaggtgtctacccctgctcactctgttctaagcagctgttcaatgcggctgccctcaaaaaccatgtgcgggctcatcacaggcccaggcaaggagttggggaaaatgggcagccatcagtcccaccagctcccctgctgctggctgagaccacccacaaagaggaagaggaccccaccaccaccctggaccatcggccctataagtgcagtgagtgtggtcgtgcttaccgccaccgggggagcctggtgaaccatcgccacagccatcggactggagagtaccagtgctcactctgtccccgcaagtaccccaatctcatggccctgcgcaaccacgtgcgggtacattgcaaggctgctcgccgaagtgcagacatcggggctgagggtgcccccagccacctcaaggtagaactcccgcctgacccagtggaggcagaggcagccccgcacacagatcaggaccatgtgtgcaaacatgaagaagaggccacggacatcaccccagcagcagacaagacagcagcacatatctgtagcatctgtgggctgctctttgaagacgctgagagccttgaacgtcatggcctgactcatggggcaggggaaaaggaaaatagcagaacagagaccacaatgtcacctcctagggcctttgcctgccgagactgtggaaagagctatcgccactcaggcagccttatcaaccacaggcagacccaccagacaggagacttcagttgtggggcctgtgccaagcacttccacaccatggctgccatgaagaaccacttgcgccggcacagtcggcggcggagcaggcggcatcggaagcgggctggcggtgccagcggtgggagagaagccaaactcctggcagcggagagctggacccgggagctagaagacaatgaaggcctggagtctccccaagacccttcaggggaaagtcctcatggggctgaaggcaacctggaaagtgatggggactgtttgcaggctgaatctgaaggggacaaatgtgggcttgagagggatgagacccatttccagggtgataaagagagcggaggcactggggaaggactggaaaggaaggatgccagtttacttgacaacttggacatcccaggtgaggaaggtggtggcactcacttctgcgatagcctcactggggtggatgaagaccagaagccagccactggccaacccaactcctcttcccactctgccaatgctgtcactggctggcaggctggggccgctcacacatgctctgactgtgggcattctttcccccatgccactggcctgctgagccacaggccctgccacccaccaggcatctatcagtgctccctctgcccgaaggagtttgactctctgcctgccctccgcagccacttccagaaccataggcctggggaggcgacctcagcacagcctttcctctgctgcctctgtggcatgatcttccctgggcgggctggctacaggcttcaccggcgccaggcccacagctcctctggcatgactgagggctcagaggaggagggggaagaggaaggagtggcagaggcagcccctgcacgcagtccaccactgcagctctcggaagcagagctgctgaatcagctgcagcgggaggtggaagcgctggacagtgcagggtatgggcacatctgtggctgctgtggtcagacctacgatgacctggggagcctggagcgtcaccaccaaagtcagagttctgggactactgcagacaaggctcccagccccttgggagtggcaggtgatgccatggagatggtcgtggacagtgtcttggaggacatagtgaattctgtctctggagagggtggagatgccaagtctcaagagggagcaggcacccccttgggagacagcctctgcatccagggtggggaaagtttgttggaggctcagccccgccccttccgctgcaaccagtgtggcaagacctatcgccatgggggcagcctggtgaaccaccgcaagatccaccagactggagactttctctgccctgtctgctcccgctgctaccccaacctggctgcctaccgtaatcatctgcggaaccaccctcgctgcaaaggctctgagccccaggttgggcccatcccagaggcagcaggtagcagtgagctgcaggttgggcccatcccagaaggaggcagcaacaagccccagcacatggcagaggaggggccggggcaagcagaagtcgagaagctccaggaagaacttaaagtggagcccctggaggaagtggccagggtgaaagaagaggtgtgggaggagaccactgtgaagggggaggagatagagcccaggctggagactgccgagaagggctgccagactgaagccagctctgagcggcccttcagctgcgaggtgtgtggccgatcctacaagcacgccggcagcctcatcaaccaccggcagagccaccagaccggccactttggctgtcaggcctgctccaagggcttctcaaacctcatgtccctcaagaaccaccggcgcatccatgcagatccccgacgtttccgctgcagcgagtgtgggaaggccttccgcctgcggaaacagctggccagccaccagcgggtccacatggaacggcgtgggggtgggggcacccgaaaggcgactcgggaagatcggcccttccgctgtgggcagtgcgggcggacctatcgccacgccggcagcctcctgaaccaccggcgcagccacgagacgggccagtacagctgccccacctgccccaagacctactccaaccgcatggccctgaaggaccaccagaggctgcactcagagaatcggcggcgacgggctggacggtccaggcgcacagctgtgcgttgcgccctctgtggccgcagcttccctggccggggatctttggagcggcacctgcgggagcatgaggagacagaaagggagccagccaatggccagggaggcctggatggcacagcggccagtgaggcgaacctgactggcagccagggactagagacccaattgggtggtgctgagccagtaccccacttggaggatggagtcccaaggccaggggagcgcagtcagagccccatcagggcagcaagctcagaagccccagagccactgtcctggggtgcagggaaggcaggtgggtggccggtaggtgggggactggggaatcatagtggaggctgggttcctcagttcctaactaggtcagaggagccagaggacagtgtccacaggagtccttgccacgctggtgactgccagctcaatggacctactctgagtcacatggatagctgggacaacagagacaacagctctcagctgcagccagggagccactcctcttgcagccagtgtggcaagacttactgccagtcaggcagcctcttgaaccacaacaccaacaagacagaccgacactattgcctgctctgctccaaggagttcttaaatcctgtggccacaaagagccacagccacaaccacatagacgcccagacctttgcctgtcctgactgtggcaaagcctttgagtcccaccaggaactggccagccacctgcaggctcatgcccggggccacagccaggtgccagcccagatggaggaggccagagatcccaaagccgggactggggaggaccaggtggttctccctggtcaagggaaagcccaggaggccccatcagaaacccccagaggcccaggagagagtgtggagagagccaggggaggacaagcggtgacgtccatggcggctgaggacaaggagcggcccttccgctgcacccagtgcgggcgctcctaccgccatgctggcagcctgctgaaccaccagaaggcccacaccacagggttgtacccgtgctccctctgtcccaaacttctccctaacctgctgtctcttaagaaccacagcaggacccacacggaccccaagcgccactgctgcagcatctgtggcaaggcctttcggacagctgcccggctggagggccacgggcgggtccatgcaccccgggaggggcctttcacctgcccccattgtccccgccacttccgccgccgaatcagcttcgtgcagcaccagcagcagcaccaggaggagtggacggtggccggctccggagccccagtggcaccagtgacgggcagaggggacttgccattgccccctccacccacccccacgaccccactcctggatccttcaccccagtggcctgcagacctcagcttctccctctgaacttcaagtctccaaagatcagaatctgggggagggagcgcgtgcagggaggggcttgatctccacattttctcaggagtagttcgggcatccccatatcttctcctctccccttgtgaagaggacccagatctggcttctttcccaaggagggggtggggtgttcctcgcgtccctgtccttgaaggacctccttcccccagcctcatcaccgtgctcttctcagcgccaccctcagcagccagattgcaacaccagggagaggcggatgcagagccccaccggtgggaaagttgcctgtggaagggagccttttgctacaatttgtaacttattttctaaagtctattttgtaacaatttatttaagtttaaaaaaaggaaaactgctgccccccaaaaaaagaaattttcaaaacaa

SEQ ID NO: 181651 - DNA, 579 bp, Artificial Sequence
  derived and/or modified sequence
gagcggcggtacaaatgtagtcagtgtggcaagacctacaagcacgccgggagcctcaccaaccaccgccagagccacacgctgggcatctacccctgtgccatctgtttcaaggagttctctaacctcatggctctgaagaaccactctcgactgcatgcccagtatcggccttaccactgtccccactgcccccgtgtcttccggctcccccgggagctgctggaacaccagcagtcccatgaggcagctcggcccttcagctgcgaggtgtgtggccgatcctacaagcacgccggcagcctcatcaaccaccggcagagccaccagaccggccactttggctgtcaggcctgctccaagggcttctcaaacctcatgtccctcaagaaccaccggcgcatccatgcagatccccgacgtttccgctgcagcgagtgtgggaaggccttccgcctgcggaaacagctggccagccaccagcgggtccacatggaacggcatcggcccttccgctgtgggcagtgcgggcggacctatcgccacgccggcagcctcctgaaccaccggcgcagccac

SEQ ID NO: 181652 - protein, 756 aa, Artificial Sequence
  derived and/or modified sequence
MASAPPASPPGSEPPGPDPEPGGPDGPGAAQLAPGPAELRLGAPVGGPDPQSPGLDEPAPGAAADGGARWSAGPAPGLEGGPRDPGPSAPPPRSGPRGQLASPDAPGPGPRSEAPLPELDPLFSWTEEPEECGPASCPESAPFRLQGSSSSHRARGEVDVFSPFPAPTAGELALEQGPGSPPQPSDLSQTHPLPSEPVGSQEDGPRLRAVFDALDGDGDGFVRIEDFIQFATVYGAEQVKDLTKYLDPSGLGVISFEDFYQGITAIRNGDPDGQCYGGVASAQDEEPLACPDEFDDFVTYEANEVTDSAYMGSESTYSECETFTDEDTSTLVHPELQPEGDADSAGGSAVPSECLDAMEEPDHGALLLLPGRPHPHGQSVITVIGGEEHFEDYGEGSEAELSPETLCNGQLGCSDPAFLTPSPTKRLSSKKVARYLHQSGALTMEALEDPSPELMEGPEEDIADKVVFLERRVLELEKDTAATGEQHSRLRQENLQLVHRANALEEQLKEQELRACEMVLEETRRQKELLCKMEREKSIEIENLQTRLQQLDEENSELRSCTPCLKANIERLEEEKQKLLDEIESLTLRLSEEQENKRRMGDRLSHERHQFQRDKEATQELIEDLRKQLEHLQLLKLEAEQRRGRSSSMGLQEYHSRARESELEQEVRRLKQDNRNLKEQNEELNGQIITLSIQGAKSLFSTAFSESLAAEISSVSRDELMEAIQKQEEINFRLQDYIDRIIVAIMETNPSILEVK

SEQ ID NO: 181653 - DNA, 2271 bp, Artificial Sequence
  derived and/or modified sequence
atggctagtgccccgcccgctagtcctcctggtagcgaacccccaggaccagatcctgaacctggcggacctgacggacctggagccgcacaacttgctccaggccccgccgaactcaggctcggggctcccgtgggcggccccgatcctcagagccccggcctggatgagcctgcaccaggagctgccgctgatgggggggctagatggtcagcaggtccagctcctggtttagaaggagggcctcgcgaccccgggccatctgccccgccaccgcggtctggcccccgcggtcaactcgcctccccagacgctcctggcccggggccccggagcgaagctcccctaccagagcttgaccctctcttcagctggacagaggaacctgaagaatgcggacccgcctcctgtccagaatcggcgccattcaggctacagggctcgagttcatctcacagagcccgcggagaagtggatgtgtttagcccctttcctgcccccaccgcaggcgaactggcactcgagcaagggcctggtagccccccccagcccagcgatctgtctcagacacatccactccctagtgaaccagtggggtcccaggaggatggaccccgcctgagagcagtttttgatgccctggatggcgatggggatggctttgtgagaattgaggatttcattcaatttgcaactgtatatggggctgagcaagtgaaggacctgacgaaatatctggatcctagtggcctcggcgtaatcagctttgaggacttctaccagggaattacggctatacggaacggagatcccgacggacagtgctacggtggtgtcgcctctgcacaggatgaggagcccttggcgtgccctgatgagtttgatgatttcgtgacttacgaggccaatgaagttaccgacagtgcatacatggggtcagagagtacctattctgaatgcgaaacattcactgacgaggacaccagcacccttgtgcatcctgagctgcagcctgagggcgatgccgacagtgctggcgggtcagctgtgccaagcgagtgtctagatgctatggaggagccagatcacggggctcttcttctcttaccaggtagaccccatccccacggccagtcggtgatcacagtcataggtggggaagaacatttcgaagactacggcgagggctccgaagccgagctttcccctgaaacactctgtaacggccagttgggctgtagcgatccagcctttttaacaccatcaccaaccaagagactgagcagtaaaaaagttgccagataccttcaccaaagcggggcactcaccatggaagccctggaagatcctagtcccgagctgatggaaggaccagaagaggatatcgccgataaagtggtgttccttgagaggcgagtactcgaattagagaaagacacagcggcgacaggcgaacagcactcgaggctcagacaggaaaatctccaacttgtccaccgagcgaacgctctggaggaacagttgaaggaacaggagctcagggcctgcgagatggttcttgaggagacgcgcaggcagaaagagctcctgtgcaaaatggagcgagaaaagtccatcgagattgagaatctgcaaactcgtctgcagcagctggacgaggaaaactccgaactcagatcctgtacaccgtgtctgaaggctaacattgaaagactggaagaggagaagcagaagttactggacgaaatagaaagtctgacactccggctgtccgaggaacaggaaaataaaaggcgcatgggtgatagactgagccacgagcgccaccagttccagagagacaaggaggcaacccaggaactaattgaagacctgcggaagcagctggagcatctgcagctccttaagctggaggcagaacagcgcagagggagatcctcatcaatgggtttgcaagagtaccattcaagggctcgcgagtcggaactcgagcaggaagtccgccgcctgaaacaggacaaccggaatctaaaagagcaaaacgaagaactgaatggacagataatcaccctgtcaatccagggagccaagagtctcttctccacagcattcagtgaatccctcgctgctgagatcagctctgtctcaagagacgaactcatggaagccatccagaagcaggaggagattaatttcagactgcaggactatatcgacaggatcatcgtcgcaattatggaaacaaatccttcaattctagaggttaaatag

SEQ ID NO: 181654 - DNA, 2271 bp, Artificial Sequence
  derived and/or modified sequence
atggccagcgcccccccagccagccccccaggcagcgagcccccaggccctgaccctgagcccggcggcccagatggccctggagctgcccagctggcccctggccctgctgagctgcggctgggcgcccctgtgggcggccctgacccccagagccctggcctggatgagcccgcccctggagctgctgctgatggaggagcccgctggagcgctggccctgcccctggcctggagggcggcccccgggaccccggccccagcgcccccccacccaggagcggcccccggggccagctggccagcccagatgcccctggccctggccccaggtctgaggcccccctgcctgagctggaccccctcttctcctggacagaggagccagaagaatgtggccctgccagctgcccagagagcgcccccttccggctgcagggcagcagcagcagccaccgggcccggggggaggtggatgtgttcagccccttccctgcccccacagctggggagctggccctggagcagggccctggcagccccccccagcccagcgacctgagccagacccaccccctgcccagcgagcctgtgggcagccaggaggatggcccccggctgcgggctgtgtttgatgccctggatggagatggagatggctttgtgagaattgaggacttcatccagtttgccaccgtgtatggagctgagcaggtgaaggacctgaccaagtacctggaccccagcggcctgggcgtcatcagctttgaggacttctaccagggcatcacagccatcagaaatggagaccctgatggccagtgctacggcggcgtggccagcgcccaggatgaggagcccctggcctgcccagatgaatttgatgactttgtgacctatgaggccaatgaggtgacagacagcgcctacatgggcagcgagagcacctacagtgaatgtgagaccttcacagatgaggacaccagcaccctggtgcaccctgagctgcagccagaaggagatgctgacagcgctgggggcagcgctgtgcccagtgaatgtctggatgccatggaggagccagaccatggagccctgctgctgctgcccggccggccccacccccacggccagagcgtcatcaccgtcatcggcggggaggagcactttgaagattatggagagggcagcgaggccgagctgagccctgagaccctgtgcaatggccagctgggctgcagcgaccctgccttcctgacccccagccccaccaagaggctgagcagcaagaaggtggcccgctacctgcaccagagcggggccctgaccatggaggccctggaggaccccagccctgagctgatggagggccctgaggaggacattgctgacaaggtggtgttcctggagaggagagtgctggagctggagaaggacacagctgccactggagagcagcacagccggctgcggcaggagaacctgcagctggtgcaccgggccaatgccctggaggagcagctgaaggagcaggagctgcgggcctgtgagatggtgctggaggagacccggcggcagaaggagctgctgtgcaagatggagcgggagaagagcattgaaattgagaacctgcagacccggctgcagcagctggatgaggagaacagcgagctgcggagctgcaccccctgcctgaaggccaacatcgagcggctggaggaggagaagcagaagctgctggatgaaattgagagcctgaccctgcggctgtctgaggagcaggagaacaagaggaggatgggagaccggctgagccatgagcggcaccagttccagagggacaaggaggccacccaggagctgattgaggacctgaggaagcagctggagcacctgcagctgctgaagctggaggccgagcagaggcggggccgcagcagctccatgggcctgcaggagtaccacagccgggcccgggagagcgagctggagcaggaggtgcggcggctgaagcaggacaacagaaacctgaaggagcagaatgaggagctgaatggccagatcatcaccctgagcatccagggcgccaagagcctcttcagcacagccttcagcgagagcctggccgctgagatcagctctgtgtccagagatgagctgatggaggccatccagaagcaggaggagatcaacttccggctgcaggactacatcgaccgcatcatcgtggccatcatggagaccaaccccagcatcctggaggtgaagtag

SEQ ID NO: 181655 - DNA, 2271 bp, Artificial Sequence
  derived and/or modified sequence
atggccagcgccccccccgccagcccccccggcagcgagccccccggcccggatcctgaaccaggggggcctgatggacccggggccgctcagttagcgcctggaccggccgagcttagattgggtgcgccggtggggggccccgatccccagtccccaggattggacgaaccagctccaggagccgccgccgatggtggtgctcggtggtctgcaggccccgcacctggcctcgagggagggcccagggaccccggaccttccgctccccccccccgttctgggccccgggggcagttggcctccccagacgcaccaggccccggacctcggagcgaggcaccactgccggagctggatcctctgttcagctggacggaagaaccagaagagtgtggacctgccagttgtcccgagagcgcccccttccggcttcagggctcttcatctagccatcgggctcggggtgaagtggacgtcttctccccctttcccgcaccaaccgctggtgaactggctctggagcagggccccggttctcctccacagcccagcgacctttctcagacacacccccttccttcagagcccgttggatcccaagaagatggtcctcgattacgggctgtgtttgacgccctggacggagatggcgacggctttgttcgtatcgaggatttcattcagtttgccacagtttacggggccgaacaggtcaaagacctgaccaagtatctggatccaagcggcctgggcgtgatctcgttcgaggacttctaccaaggtatcactgccatccgcaacggggatcctgatggacagtgctatggcggcgtcgctagcgcacaggacgaggagcccctggcatgccccgacgaatttgacgattttgtgacttacgaggctaacgaggtgacagactctgcctatatgggctcagagtccacctatagcgaatgcgaaactttcacggacgaggataccagtacccttgtgcatcctgagctccagccagaaggagacgcggacagcgcaggcggtagcgctgtaccttcagaatgtcttgatgcgatggaggagcccgaccacggagctttgctcctcctgcctggtcgccctcacccccatggccaatctgtcattacagtcatcggcggcgaagaacacttcgaggattacggcgaaggcagtgaggccgagctgtctccagaaactttgtgcaatggtcagctgggttgtagcgacccagcctttttaacgccctcaccaactaaacggctgtcatctaaaaaagtcgctagatacctccatcaatctggagcgctaacgatggaggccctggaagacccttctcccgagctcatggaagggccagaagaggacatcgcagacaaggtggtcttcctcgagagaagggtgctagaattagaaaaagacaccgccgccaccggggagcaacattcccgcctcaggcaggaaaacctacaactcgtgcatcgcgctaatgccctggaggaacagttgaaagagcaggagctaagggcgtgcgaaatggtgttagaagagacgcggagacaaaaggagctgttatgtaagatggaaagagagaagtctatcgaaatagaaaacctccagacccgtcttcagcagttggacgaggaaaattcagagctgaggtcatgcaccccatgtctgaaggccaatatagaaagactggaggaggagaagcagaaattgctggacgaaatcgaatctctcactctccgactgtctgaggagcaggagaacaagaggcggatgggcgacagactctcccacgagcgccatcagtttcagagggacaaggaggccacacaggaacttatcgaagacctgagaaaacaactagaacatctgcaacttttgaaactggaagcagaacagaggcggggccggtcttctagcatggggcttcaagagtaccactctcgggcacgggaatccgagttggaacaggaagtacgcagattaaagcaggataatcgcaatttaaaagaacaaaacgaagagttgaatggacagatcataacactctccattcaaggcgcgaagagtctcttctcaacagcattctccgagtcgctggcagcggagatctcatccgtaagcagagatgagctcatggaagcgattcagaagcaggaggaaatcaattttcgattgcaggattatatcgaccgaataattgtggccattatggagaccaatccttccattctcgaagtaaagtag

SEQ ID NO: 181656 - DNA, 2271 bp, Artificial Sequence
  derived and/or modified sequence
atggcaagtgcccctccagcctcaccaccgggatccgagccgcctggccctgatcccgagcccggagggcctgacggcccaggcgcagcacagctagcccctggacctgctgagctaaggctgggagccccagttgggggtcccgaccctcaatcaccaggtttggacgaaccggcacctggcgctgcagcagacggtggggcacgctggtcagcgggaccagcacccggtctggaaggaggaccacgtgaccccggtccaagcgctcccccacccaggtccggtccacggggacagctcgcttctcccgacgcacccggacctggtcccaggagcgaggctcccctgcccgagctggaccccctcttctcctggaccgaggaaccggaagagtgcggccctgcctcatgtccagagtcagcccctttccgtttgcagggatcttcctctagtcacagggccagaggtgaggtggacgttttctcaccgttccctgcacccacagcgggtgaactcgcgctcgagcagggacccggatcacctcctcagccttctgatctctcacaaactcaccccctccccagcgaacctgtggggtctcaggaggatgggcctcgtctgagggccgtctttgacgctctggacggggacggggacggttttgtgcggatcgaggattttattcagttcgctactgtgtacggagcagagcaggtcaaagacttgacgaagtatttggacccttccggactgggggttatctccttcgaagatttctaccaagggatcaccgctattagaaatggagatcccgatggccagtgttacgggggagtggccagtgcgcaggatgaagagccactagcgtgcccagacgaattcgatgacttcgtgacctacgaagccaacgaggttaccgactcagcctacatggggagcgaaagcacgtatagtgagtgcgaaacatttactgacgaggataccagcacgttggttcatcccgaactgcaaccggaaggcgatgccgatagcgcaggtggatctgcagttcccagtgaatgcctcgacgctatggaggagccggaccacggcgcactgttgcttttgcccggacggcctcatccacacggccaatcagttatcactgttattggcggagaggagcatttcgaagattacggggaaggctcagaagccgaactgtctcccgagacgctttgtaatggacagctgggatgtagtgaccctgcatttcttacaccctcaccaacgaagcgtctgagctccaaaaaagtggctagatatctgcaccagtctggcgctttaaccatggaagcgttagaggacccctcccctgagctgatggagggccctgaagaggatatcgcagataaagttgtcttcctggagcgtcgcgtgcttgagctggagaaggataccgcggctaccggggaacagcactctagactgcggcaggaaaacctccagctggtgcacagggctaatgcactggaggagcagctcaaggaacaggagttgcgggcttgtgaaatggtccttgaagagaccagacgacaaaaggagctcttgtgtaaaatggaacgtgagaaaagtattgaaatcgaaaatcttcagaccagattacagcagctggacgaagagaattcagaactgaggagttgtactccttgtttaaaggctaatattgagcgtcttgaagaggagaagcaaaagctgttggatgagatcgagtccctcaccttaaggttatctgaagagcaggaaaacaagagaagaatgggcgacaggctcagccacgagcgccatcagtttcagagggataaagaggccacacaagaactcatcgaggatctgaggaaacagttggagcaccttcaactcctgaagctcgaagccgagcagaggcggggtaggtcaagctccatgggactccaggagtaccacagtcgggctagggagtcggagctggagcaggaagtgcgacgactcaaacaggataacagaaatcttaaagagcagaacgaggaacttaacggccaaattattacactgtcaattcagggggcaaagagtctgttctctactgcgttctcggagagcctggcagcagaaatttcttcagtctcccgggatgagctgatggaggccatccagaaacaagaagagataaattttaggctccaggactacatcgacagaattatcgtcgccatcatggaaaccaatccatctatcttggaggtgaagtag

SEQ ID NO: 181657 - DNA, 4831 bp, Artificial Sequence
  derived and/or modified sequence
cgttagttctccgggtacctcaggcgcctcagcctccttagtctcctcatcctgcttcacaggctccgcggcctccggcctcctcggcccccgtcccccggcctcctcggcccccgtcccccgccatccgccgcccggatcctcgccgccctccctaggccgccccgccgccatgggcctgcgcccgccgcgccgccgggccgagggcagctgaggcgcggtgcgaagatgggcgaggacagagcagggcccgagcgccagccccagcagcccgggcgccccgcgcgcgcccgcccgcgccgccgaggggatgcccgcgcccgccgccgcgccctgagcgcctttgtctgccgcccgcgcccttccgcaccactagcctctcgggagcatggcgtcggccccgccggcctcgcccccgggctcggagccgccggggcccgacccggagccgggcgggccggacgggccgggggcggcacaactggctccgggccctgcggagctacgcctcggagcgcccgtcggcggccccgacccgcagtccccgggcctggatgagcctgcgcccggggccgctgcagatggcggggcgcgttggagcgccgggccggccccggggctggagggaggcccgcgagaccccgggccgtccgccccgccgccgcgctccggcccgcgggggcagcttgcgagccccgacgccccgggcccagggccgcgctccgaagcgccgcttccagaactcgacccgttgttctcctggactgaggagcccgaggagtgtggccccgcgagctgcccggagagcgcgcctttccgcttgcaggggtccagcagcagccaccgagcgcggggcgaggtcgacgtcttctctcccttccccgcgcccacggcgggcgagctggcgctggagcaaggtcccgggtccccgccgcagccctcggacctcagccagacccacccccttccgagcgagcccgtggggagtcaggaggacggcccccgcctccgagccgtgttcgatgccctggacggggatggggacggtttcgtccgcatcgaggacttcatccagtttgctacggtctacggggcagagcaggtgaaggacttaactaagtacttggatcccagtgggctcggcgtgatcagctttgaagacttctaccaagggatcacagccatcagaaacggagatcctgatggccagtgctacggtggtgtcgcttctgcccaagatgaggagcccctggcctgcccggacgagttcgatgacttcgtcacctatgaggccaacgaggtgacggacagcgcgtacatgggctccgagagcacctacagtgagtgtgagaccttcacggacgaggacaccagcaccctggtgcaccctgagctgcaacctgaaggggacgcagacagtgccggcggctcggccgtgccctctgagtgcctggacgccatggaggagcccgaccatggtgccctgctgctgctcccaggcaggcctcacccccatggccagtctgtcatcacggtgatcgggggcgaggagcactttgaggactacggtgaaggcagtgaggcggagctgtccccagagaccctatgcaacgggcagctgggctgcagtgaccccgctttcctcacgcccagtccgacaaagcggctctccagcaagaaggtggcaaggtacctgcaccagtcaggggccctgaccatggaggccctggaggacccttcccccgagctcatggagggcccagaggaggacattgctgacaaggttgtcttcctggaaaggcgtgtgctggagctggaaaaggacacggcagccaccggtgagcaacacagccgcctgaggcaggagaacctgcagctggtgcacagagcaaacgccctggaggagcagctgaaggagcaggagctgagagcctgcgagatggtcctggaagagacccggcgtcagaaggagctcctgtgcaagatggagagggagaagagcattgagatcgagaacctgcagaccaggctacagcaactggacgaggagaacagtgaactccggtcctgcacgccctgtctgaaggccaacattgagcgtctggaggaggagaagcagaagctgttggatgagatagagtcgctgacgctgcggctcagtgaagagcaggagaacaagaggagaatgggggacaggctgagtcacgagaggcaccagttccagagggacaaggaggccacccaggagctgatcgaggacctccgaaagcagctggagcacctgcagctcctcaagctggaggccgagcagcggcggggccgcagcagcagcatgggcctgcaggagtaccacagccgcgcccgggagagcgagctggagcaggaggtccgcaggctgaagcaggacaaccgcaacctgaaggagcagaacgaggagctgaacgggcagatcattaccctcagcatccagggcgccaagagcctcttctccacagccttctctgagtccctggctgcagagatcagctccgtctcccgagatgagctcatggaggcgattcagaagcaggaggagatcaacttccgcctgcaggactacatcgacaggatcatcgtggccatcatggagaccaacccgtccatcctggaggtcaagtagaggcaggaaggtccagcctgagctggattcgggactccaacaccctggagtggttccgtcagaccatgaggagccaagaccagcaggtcccacagccgacagtgcccagagcatgcagggaaccctcgtgcagctgagctggggccgccaaagaccggggctgccaaaggggcagagggtggtggagaggagagggagaaagggaagtcccagggcccggggtccacagaggatgagggttgtggcagggccgtccatcagcgctgaccttccgggggcccagagcttcccagccctgagtcaagctggccatgaacgcgtacacttcagttcagcaggatgggctggagagcctctctgtgcagcggtgtggggtgagccctgctgtggcctccttgtggtggtccctcttcccacgtgcagccctgttgggaagaaaggaagaaaacaggtccctccaggggtgctgctgcctaagccacccacataagtacgctggtgccgtgtcacccatgttgagccgctcctgatggctgacgggctcccagaccctcacctcggacatggtggtgggggaaggacgggtgggcaaggctggtgcgttccccagctctccctacgctgctcgggccattgcccagccagatgtggtcacctcagtccagctctggggcctccaggccatgtggctgttcccacggcccagtcctcgctgcagtaacccctgggggctctgaccacctatgggggccgggcaggagcctctggggcctccactccgacatcaggacctgagatgaccgctgtgtggcgctctctccctgggcagggtggatgccacaggcccctctggctcccaggtgctgcttctccacaggtgcggcctggcccggcctcctaaaggccacaccctccccacgcacttcccaggccagaatccaaacatcgggaaccctgttttcttctgggtgtgtctcacttagaaatcgtggttcttccccgagggtgcatgttgcaggagggagagggcagggaagactcacagcagagcaggagggggcctgtgcttctcggggtctgcaccccaggcacagcggtgtcaccccgcaggaccgcgggcctgccccaacccccagcattcccgggtgggcccagaccccatcaccaagactggccacccgctgcgtgtgtgtgcgcgcgcgtgtacgtgtggccccacatccgccgccttccacgctaggatgtaagaggtcgcctcctattgtacatttggggaaagccttgggtgtaaatcagtgtaaacttggaggagagatttttctatcatgtagagtaggtattttttatagattgaaggttgatcaattttttaatactttcaagagaaaactgtgtatacacatgaaatatatatatatatatatatatatatatgtataatatataaagactggcaccctgcctctctgtgcccaggcccagccctggtgacatggcaccactcagcagtgctgtcactgtaagcatggactcccaggagacagtgtgggaaacgctcctgctttaattccccgagaaacggctcttcctgcctggatgcaggagggcaggggccaccacagattaaagctgttactgcacacgcagaggccggcttcttcctccaggggggccacagggtggggtgggagtcttctgggcctggcccagcttccctcaaggcgtccgaggccatcagttgtctgagctcagaacccagcagacctgcctggctctgcagcttggtcagactaagacccttccaaggccgtaggattgcacctccaggcccagtggagcctggcagctttccagccaggttctggatcctgacgagctgctgagacagcatcaaggtggggcaggtggggcggggcaaattgggcagcacagggctgtgtgggcatcagggctctgggtcacacgcctctggggacgtacgtcccatgtcgggagagccgtcaaaacgtccccgggattaagagaagagtggggggcagggcgcagaggctcacgccataatctcagcactttgggaggccaaggcaggaggatcgcttgaacccgggagttcaagaccagcctgggcaacatagcaaggccccatctctaaaaaataaaaaattaaccagg

SEQ ID NO: 181658 - DNA, 2271 bp, Artificial Sequence
  derived and/or modified sequence
atggccagcgccccccccgccagcccccccggcagcgagccccccggccccgaccccgagcccggcggccccgacggccccggcgccgcccagctggcccccggccccgccgagctgagactgggcgcccccgtgggcggccccgacccccagagccccggcctggacgagcccgcccccggcgccgccgccgacggcggcgccagatggagcgccggccccgcccccggcctggagggcggccccagagaccccggccccagcgcccccccccccagaagcggccccagaggccagctggccagccccgacgcccccggccccggccccagaagcgaggcccccctgcccgagctggaccccctgttcagctggaccgaggagcccgaggagtgcggccccgccagctgccccgagagcgcccccttcagactgcagggcagcagcagcagccacagagccagaggcgaggtggacgtgttcagccccttccccgcccccaccgccggcgagctggccctggagcagggccccggcagccccccccagcccagcgacctgagccagacccaccccctgcccagcgagcccgtgggcagccaggaggacggccccagactgagagccgtgttcgacgccctggacggcgacggcgacggcttcgtgagaatcgaggacttcatccagttcgccaccgtgtacggcgccgagcaggtgaaggacctgaccaagtacctggaccccagcggcctgggcgtgatcagcttcgaggacttctaccagggcatcaccgccatcagaaacggcgaccccgacggccagtgctacggcggcgtggccagcgcccaggacgaggagcccctggcctgccccgacgagttcgacgacttcgtgacctacgaggccaacgaggtgaccgacagcgcctacatgggcagcgagagcacctacagcgagtgcgagaccttcaccgacgaggacaccagcaccctggtgcaccccgagctgcagcccgagggcgacgccgacagcgccggcggcagcgccgtgcccagcgagtgcctggacgccatggaggagcccgaccacggcgccctgctgctgctgcccggcagaccccacccccacggccagagcgtgatcaccgtgatcggcggcgaggagcacttcgaggactacggcgagggcagcgaggccgagctgagccccgagaccctgtgcaacggccagctgggctgcagcgaccccgccttcctgacccccagccccaccaagagactgagcagcaagaaggtggccagatacctgcaccagagcggcgccctgaccatggaggccctggaggaccccagccccgagctgatggagggccccgaggaggacatcgccgacaaggtggtgttcctggagagaagagtgctggagctggagaaggacaccgccgccaccggcgagcagcacagcagactgagacaggagaacctgcagctggtgcacagagccaacgccctggaggagcagctgaaggagcaggagctgagagcctgcgagatggtgctggaggagaccagaagacagaaggagctgctgtgcaagatggagagagagaagagcatcgagatcgagaacctgcagaccagactgcagcagctggacgaggagaacagcgagctgagaagctgcaccccctgcctgaaggccaacatcgagagactggaggaggagaagcagaagctgctggacgagatcgagagcctgaccctgagactgagcgaggagcaggagaacaagagaagaatgggcgacagactgagccacgagagacaccagttccagagagacaaggaggccacccaggagctgatcgaggacctgagaaagcagctggagcacctgcagctgctgaagctggaggccgagcagagaagaggcagaagcagcagcatgggcctgcaggagtaccacagcagagccagagagagcgagctggagcaggaggtgagaagactgaagcaggacaacagaaacctgaaggagcagaacgaggagctgaacggccagatcatcaccctgagcatccagggcgccaagagcctgttcagcaccgccttcagcgagagcctggccgccgagatcagcagcgtgagcagagacgagctgatggaggccatccagaagcaggaggagatcaacttcagactgcaggactacatcgacagaatcatcgtggccatcatggagaccaaccccagcatcctggaggtgaagtag

SEQ ID NO: 181659 - protein, 1056 aa, Artificial Sequence
  derived and/or modified sequence
MDRAPTEQNVKLSAEVEPFIPQKKSPDTFMIPMALPNDNGSVSGVEPTPIPSYLITCYPFVQENQSNRQFPLYNNDIRWQQPNPNPTGPYFAYPIISAQPPVSTEYTYYQLMPAPCAQVMGFYHPFPTPYSNTFQAANTVNAITTECTERPSQLGQVFPLSSHRSRNSNRGSVVPKQQLLQQHIKSKRPLVKNVATQKETNAAGPDSRSKIVLLVDASQQTDFPSDIANKSLSETTATMLWKSKGRRRRASHPTAESSSEQGASEADIDSDSGYCSPKHSNNQPAAGALRNPDSGTMNHVESSMCAGGVNWSNVTCQATQKKPWMEKNQTFSRGGRQTEQRNNSQDEDGFQELNENGNAKDENIQQKLSSKVLDDLPENSPINIVQTPIPITTSVPKRAKSQKKKALAAALATAQEYSEISMEQKKLQEALSKAAGKKNKTPVQLDLGDMLAALEKQQQAMKARQITNTRPLSYTVVTAASFHTKDSTNRKPLTKSQPCLTSFNSVDIASSKAKKGKEKEIAKLKRPTALKKVILKEREEKKGRLTVDHNLLGSEEPTEMHLDFIDDLPQEIVSQEDTGLSMPSDTSLSPASQNSPYCMTPVSQGSPASSGIGSPMASSTITKIHSKRFREYCNQVLCKEIDECVTLLLQELVSFQERIYQKDPVRAKARRRLVMGLREVTKHMKLNKIKCVIISPNCEKIQSKGGLDEALYNVIAMAREQEIPFVFALGRKALGRCVNKLVPVSVVGIFNYFGAESLFNKLVELTEEARKAYKDMVAAMEQEQAEEALKNVKKVPHHMGHSRNPSAASAISFCSVISEPISEVNEKEYETNWRNMVETSDGLEASENEKEVSCKHSTSEKPSKLPFDTPPIGKQPSLVATGSTTSATSAGKSTASDKEEVKPDDLEWASQQSTETGSLDGSCRDLLNSSITSTTSTLVPGMLEEEEDEDEEEEEDYTHEPISVEVQLNSRIESWVSETQRTMETLQLGKTLNGSEEDNVEQSGEEEAEAPEVLEPGMDSEAWTADQQASPGQQKSSNCSSLNKEHSDSNYTTQTT

SEQ ID NO: 181660 - DNA, 3171 bp, Artificial Sequence
  derived and/or modified sequence
atggacagagcccccaccgagcagaacgtgaagctgagcgccgaggtggagcccttcatcccccagaagaagagccccgacaccttcatgatccccatggccctgcccaacgacaacggcagcgtgagcggcgtggagcccacccccatccccagctacctgatcacctgctaccccttcgtgcaggagaaccagagcaacagacagttccccctgtacaacaacgacatcagatggcagcagcccaaccccaaccccaccggcccctacttcgcctaccccatcatcagcgcccagccccccgtgagcaccgagtacacctactaccagctgatgcccgccccctgcgcccaggtgatgggcttctaccaccccttccccaccccctacagcaacaccttccaggccgccaacaccgtgaacgccatcaccaccgagtgcaccgagagacccagccagctgggccaggtgttccccctgagcagccacagaagcagaaacagcaacagaggcagcgtggtgcccaagcagcagctgctgcagcagcacatcaagagcaagagacccctggtgaagaacgtggccacccagaaggagaccaacgccgccggccccgacagcagaagcaagatcgtgctgctggtggacgccagccagcagaccgacttccccagcgacatcgccaacaagagcctgagcgagaccaccgccaccatgctgtggaagagcaagggcagaagaagaagagccagccaccccaccgccgagagcagcagcgagcagggcgccagcgaggccgacatcgacagcgacagcggctactgcagccccaagcacagcaacaaccagcccgccgccggcgccctgagaaaccccgacagcggcaccatgaaccacgtggagagcagcatgtgcgccggcggcgtgaactggagcaacgtgacctgccaggccacccagaagaagccctggatggagaagaaccagaccttcagcagaggcggcagacagaccgagcagagaaacaacagccaggacgaggacggcttccaggagctgaacgagaacggcaacgccaaggacgagaacatccagcagaagctgagcagcaaggtgctggacgacctgcccgagaacagccccatcaacatcgtgcagacccccatccccatcaccaccagcgtgcccaagagagccaagagccagaagaagaaggccctggccgccgccctggccaccgcccaggagtacagcgagatcagcatggagcagaagaagctgcaggaggccctgagcaaggccgccggcaagaagaacaagacccccgtgcagctggacctgggcgacatgctggccgccctggagaagcagcagcaggccatgaaggccagacagatcaccaacaccagacccctgagctacaccgtggtgaccgccgccagcttccacaccaaggacagcaccaacagaaagcccctgaccaagagccagccctgcctgaccagcttcaacagcgtggacatcgccagcagcaaggccaagaagggcaaggagaaggagatcgccaagctgaagagacccaccgccctgaagaaggtgatcctgaaggagagagaggagaagaagggcagactgaccgtggaccacaacctgctgggcagcgaggagcccaccgagatgcacctggacttcatcgacgacctgccccaggagatcgtgagccaggaggacaccggcctgagcatgcccagcgacaccagcctgagccccgccagccagaacagcccctactgcatgacccccgtgagccagggcagccccgccagcagcggcatcggcagccccatggccagcagcaccatcaccaagatccacagcaagagattcagagagtactgcaaccaggtgctgtgcaaggagatcgacgagtgcgtgaccctgctgctgcaggagctggtgagcttccaggagagaatctaccagaaggaccccgtgagagccaaggccagaagaagactggtgatgggcctgagagaggtgaccaagcacatgaagctgaacaagatcaagtgcgtgatcatcagccccaactgcgagaagatccagagcaagggcggcctggacgaggccctgtacaacgtgatcgccatggccagagagcaggagatccccttcgtgttcgccctgggcagaaaggccctgggcagatgcgtgaacaagctggtgcccgtgagcgtggtgggcatcttcaactacttcggcgccgagagcctgttcaacaagctggtggagctgaccgaggaggccagaaaggcctacaaggacatggtggccgccatggagcaggagcaggccgaggaggccctgaagaacgtgaagaaggtgccccaccacatgggccacagcagaaaccccagcgccgccagcgccatcagcttctgcagcgtgatcagcgagcccatcagcgaggtgaacgagaaggagtacgagaccaactggagaaacatggtggagaccagcgacggcctggaggccagcgagaacgagaaggaggtgagctgcaagcacagcaccagcgagaagcccagcaagctgcccttcgacaccccccccatcggcaagcagcccagcctggtggccaccggcagcaccaccagcgccaccagcgccggcaagagcaccgccagcgacaaggaggaggtgaagcccgacgacctggagtgggccagccagcagagcaccgagaccggcagcctggacggcagctgcagagacctgctgaacagcagcatcaccagcaccaccagcaccctggtgcccggcatgctggaggaggaggaggacgaggacgaggaggaggaggaggactacacccacgagcccatcagcgtggaggtgcagctgaacagcagaatcgagagctgggtgagcgagacccagagaaccatggagaccctgcagctgggcaagaccctgaacggcagcgaggaggacaacgtggagcagagcggcgaggaggaggccgaggcccccgaggtgctggagcccggcatggacagcgaggcctggaccgccgaccagcaggccagccccggccagcagaagagcagcaactgcagcagcctgaacaaggagcacagcgacagcaactacaccacccagaccacctag

SEQ ID NO: 181661 - DNA, 3171 bp, Artificial Sequence
  derived and/or modified sequence
atggatagggctccaactgagcaaaatgtcaagctgtccgctgaagtcgagccctttatcccacagaaaaagtccccagacaccttcatgattcccatggcactcccgaatgataacggttctgtgagtggcgtcgagccaactccaataccgagctacctcattacgtgctacccgttcgtacaggagaatcaatccaatcgccagtttcccctatacaataacgacattcgttggcaacagcctaaccctaacccaactggtccctatttcgcgtaccccatcatttcagctcagccaccagtgtccaccgaatacacttattaccagctaatgcctgctccatgtgcccaagtcatgggcttttaccaccccttcccaactccctactcaaacaccttccaagcggccaatacagtgaacgctatcaccaccgagtgtacagaacggcccagccaactggggcaggtgttccccctgtcctctcataggagccgcaactccaatcggggttctgtcgttccgaaacagcagctgcttcagcagcacattaagtccaagcgccccctggtgaagaatgtggctacacagaaagaaacgaatgccgcagggccagactctcgcagcaagatagttctgttggtggacgcaagccaacagactgacttcccgtctgacattgccaacaagtccctttctgagactacagctacaatgctatggaagtcaaaggggcggaggcgaagagcttcccacccaacagcagagtcttcgagtgaacaaggggcctcagaagctgacatcgatagtgatagtggatactgcagtcctaaacattctaacaatcagccagctgccggggccctacggaatcccgactctggaaccatgaatcacgtggaatcgagcatgtgcgctggcggggtaaactggtccaatgtaacgtgtcaggctactcagaagaaaccctggatggagaagaaccagacattcagtcgcggcggaaggcaaaccgagcagcgaaataattctcaagatgaggacgggtttcaggaactcaatgagaatggaaacgctaaggatgagaatattcagcaaaaacttagtagtaaggtccttgacgatcttcctgagaattcgcccatcaatattgttcaaactcctattcctatcactacatctgtgcccaaaagagctaaaagccagaaaaaaaaggccctggccgcagccctcgccactgcacaggagtacagcgaaatctcaatggaacagaaaaagctccaggaagccctttccaaggctgcaggaaagaagaataaaactcccgtacaactcgacctgggggatatgttggccgctctggagaaacagcagcaggctatgaaggctagacagataactaacacacgccctctgtcctacaccgtggtgaccgccgcttctttccacaccaaggactcaaccaaccggaaacctcttacaaagtcccaaccgtgcctgacatcctttaacagtgtggatattgcgagctccaaggcaaaaaaaggcaaagaaaaggaaatagccaagctcaaacgccccactgctctcaagaaggttatcctgaaggaacgggaggagaaaaaaggacggttaaccgtcgatcataacctgctgggttcggaggaaccaacagagatgcatctggattttattgatgatctgcctcaagagattgtttcgcaggaggatacaggtctgtctatgccaagcgatacaagcctctccccagcctctcagaattctccctattgtatgacacccgtgtcccagggcagcccggcaagttcaggcattggctctccaatggcctcttcaaccataaccaaaatacactcgaagcggtttcgggaatactgcaaccaagttctctgtaaggaaatagacgagtgtgtaacactgcttctgcaggagcttgtctccttccaggagcggatttatcagaaagatccagttcgagcaaaagctagaagaagactggttatgggtctgcgggaggtcacaaaacacatgaagctgaataaaatcaagtgtgtcatcataagccctaattgtgagaagattcagtcaaagggtggcctggacgaggctctatacaacgtcatagctatggctcgcgaacaggagattccatttgtttttgccctgggtagaaaagctttgggacggtgcgtcaacaaactggtacctgtttccgtggtaggaatcttcaactatttcggtgcagaaagcctttttaataagctggtggaacttacagaggaagcgaggaaggcgtataaggacatggtagcagcaatggagcaagaacaggctgaagaggcgctgaagaacgtcaaaaaagttccccatcacatggggcatagcaggaatccatccgccgcctcggctatatctttctgttcagttatttctgagcctatatccgaggtgaacgaaaaagagtacgaaaccaactggaggaatatggtagagacatcggacggcctggaggcatccgaaaacgagaaagaggtgagctgcaagcacagcacctctgagaaaccttccaaactgccattcgatacccctcccatcggaaagcagccgtccctagtggccacgggatcaaccacatcagcgacaagcgcaggaaaatccacagcttcggacaaggaagaggttaagcccgacgatttggaatgggcttcgcaacaatccacagaaaccgggtcactcgacggctcctgtcgtgatctgctgaactccagcattacctcaacaacttcaactcttgtccccggaatgttggaagaggaggaggacgaggatgaagaggaagaggaggactatacgcacgaacctattagtgtagaagtgcaactcaacagccggattgaatcgtgggttagcgagacacagaggaccatggaaaccttgcagctggggaaaactctcaatgggagcgaggaggataacgtcgaacagagcggagaggaagaggcagaagcacctgaagtgctggaaccgggcatggatagcgaggcctggactgccgaccagcaggcaagccccggacagcagaagtcatctaattgctcatcgctgaacaaggagcactcggattcaaattatactacacaaactacctag

SEQ ID NO: 181662 - DNA, 3171 bp, Artificial Sequence
  derived and/or modified sequence
atggaccgggcccccacagagcagaatgtgaagctgtctgctgaggtggagcccttcatcccccagaagaagagcccagacaccttcatgatccccatggccctgcccaatgacaatggatctgtgtctggagtggagcccacccccatccccagctacctgatcacctgctacccctttgtgcaggagaaccagagcaaccggcagttccccctgtacaacaatgacatccgctggcagcagcccaaccccaaccccaccggcccctactttgcctaccccatcatcagcgcccagccccctgtgtccacagagtacacctactaccagctgatgcctgccccctgtgcccaggtgatgggcttctaccaccccttccccaccccctacagcaacaccttccaggccgccaacacagtgaatgccatcaccacagagtgcacagagcggcccagccagctgggccaggtgttccccctgagcagccacaggagcaggaacagcaacagaggctctgtggtgcccaagcagcagctgctgcagcagcacatcaagagcaagaggcccctggtgaagaatgtggccacccagaaggagaccaatgctgctggccctgacagccgcagcaagatcgtgctgctggtggatgccagccagcagacagacttccccagcgacatcgccaacaagagcctgtctgagaccacagccaccatgctgtggaagagcaagggcagaagaagaagagccagccaccccacagctgagagcagcagcgagcagggcgccagcgaggccgacatcgacagcgacagcggctactgcagccccaagcacagcaacaaccagcctgctgctggggccctgaggaacccagacagcggcaccatgaaccacgtggagagctccatgtgtgccggcggcgtgaactggagcaatgtgacctgccaggccacccagaagaagccctggatggagaagaaccagaccttcagccggggcggccggcagacagagcagaggaacaacagccaggatgaagatggcttccaggagctgaatgaaaatggaaatgccaaggatgagaacatccagcagaagctgagcagcaaggtgctggatgacctgcctgagaacagccccatcaacatcgtgcagacccccatccccatcaccacctctgtgcccaagagggccaagagccagaagaagaaggccctggccgccgccctggccacagcccaggagtacagcgagatctccatggagcagaagaagctgcaggaggccctgagcaaggctgctgggaagaagaacaagacccctgtgcagctggacctgggggacatgctggccgccctggagaagcagcagcaggccatgaaggcccggcagatcaccaacacccggcccctgagctacacagtggtgacagctgccagcttccacaccaaggacagcaccaacaggaagcccctgaccaagagccagccctgcctgaccagcttcaacagcgtggacatcgccagcagcaaggccaagaagggcaaggagaaggagatcgccaagctgaagaggcccacagccctgaagaaggtgatcctgaaggagcgggaggagaagaagggccgcctgactgtggaccacaacctgctgggcagcgaggagcccacagagatgcacctggacttcattgatgacctgccccaggagatcgtgtcccaggaggacaccggcctgtccatgcccagcgacaccagcctgagccctgccagccagaacagcccctactgcatgacccctgtgtcccagggcagccctgccagcagcggcatcggcagccccatggccagcagcaccatcaccaagatccacagcaagcgcttccgggagtactgcaaccaggtgctgtgcaaggagattgatgaatgtgtgaccctgctgctgcaggagctggtgtccttccaggagcgcatctaccagaaggaccctgtgcgggccaaggcccggcggcggctggtgatgggcctgcgggaggtgaccaagcacatgaagctgaacaagatcaagtgtgtgatcatcagccccaactgtgagaagatccagagcaagggcggcctggatgaggccctgtacaacgtgattgccatggcccgggagcaggagatcccctttgtgtttgccctgggcaggaaggccctgggccgctgtgtgaacaagctggtgcctgtgtctgtggtgggcatcttcaactactttggagctgagagcctcttcaacaagctggtggagctgacagaggaggccaggaaggcctacaaggacatggtggccgccatggagcaggagcaggccgaggaggccctgaagaatgtgaagaaggtgccccaccacatgggccacagcaggaaccccagcgctgccagcgccatctccttctgcagcgtcatcagcgagcccatcagcgaggtgaatgagaaggagtatgagaccaactggaggaacatggtggagaccagtgatggcctggaggcctctgaaaatgagaaggaggtgtcctgcaagcacagcaccagcgagaagcccagcaagctgccctttgacaccccacccatcggcaagcagcccagcctggtggccaccggcagcaccaccagcgccaccagcgctgggaagagcacagccagtgacaaggaggaggtgaagccagatgacctggagtgggccagccagcagagcacagagaccggcagcctggatggcagctgccgggacctgctgaacagcagcatcaccagcaccaccagcaccctggtgcccggcatgctggaggaggaggaggatgaagatgaggaggaggaggaggactacacccatgagcccatctctgtggaggtgcagctgaacagccgcatcgagagctgggtgtctgagacccagaggaccatggagaccctgcagctgggcaagaccctgaatggaagtgaagaagataatgtggagcagagcggggaggaggaggccgaggcccctgaggtgctggagcccggcatggacagcgaggcctggacagctgaccagcaggccagccctggccagcagaagagcagcaactgcagcagcctgaacaaggagcacagcgacagcaactacaccacccagaccacctag

SEQ ID NO: 181663 - DNA, 3171 bp, Artificial Sequence
  derived and/or modified sequence
atggaccgggcccccaccgagcagaacgtgaagctgagcgccgaggtggagccgtttattccacagaagaaaagccccgacacctttatgatcccgatggcactgcctaatgataacggaagtgtctccggggtcgagcccacgcccattccgagctatctcatcacctgctacccttttgtgcaggagaatcaaagcaaccgtcaatttccgctttacaataacgacatccgctggcagcaacctaacccaaatccaactggcccttattttgcctatcccatcatctccgcccagccgcccgtctccaccgaatacacatactaccagctgatgccagctccctgtgcacaggtcatgggattctaccacccgtttcccacgccctactccaacactttccaggcagccaatactgttaacgccattaccaccgagtgcacagagcggccctctcagctgggccaggtgtttcccctctccagccatcgcagcaggaattccaaccgcgggtccgtagtacctaagcagcagttactgcagcagcacattaagagtaaacgacctcttgtgaagaacgtggctacacagaaggaaaccaacgcggccggccctgatagtcggtcaaaaattgtgttgcttgtggatgcttctcagcaaaccgactttccctccgatattgcaaacaagtccctgtctgaaaccactgctacaatgttatggaagagcaaaggaaggaggcgtcgcgcatctcaccctaccgcagaaagcagctccgagcaaggcgccagcgaggcggatatagactccgatagcgggtattgttcaccaaaacattccaacaaccagcccgctgccggggccctacggaatcccgattcaggtactatgaatcacgtggagtcctccatgtgcgctggcggggtgaattggtccaacgtgacgtgtcaggccacacagaaaaaaccatggatggagaaaaaccagactttctcccgagggggtaggcagaccgaacagcggaacaattctcaggacgaagatggttttcaggaattgaatgagaatggaaatgctaaagacgagaatatccaacagaaactctcttcaaaggtgttggatgatttgccagagaatagtccaattaacatcgtgcagacacccattcccatcacaacatccgtacccaaacgcgccaagtcacagaaaaagaaggccctggccgccgccttagcaactgcacaggaatacagcgaaatcagtatggagcagaagaagctacaggaggccctatccaaggcggccgggaagaaaaataaaacaccagtccagctggacctcggggatatgttggctgcgctggagaaacagcaacaggctatgaaggcccgtcagatcacaaacactcggccccttagctatacagttgtcactgcagccagttttcacacaaaggacagtacaaatagaaaacctctgacgaaatctcagccctgtctgacttcgttcaattcggtggacattgcaagtagcaaggcaaagaagggaaaagaaaaagagattgcaaaactaaaaaggcctacggccctgaaaaaagtgatcctcaaagaaagggaagagaaaaaaggccggctcaccgtggaccacaatctgttggggtccgaggaacctacagagatgcacctcgatttcattgatgatctgccccaggaaatcgtttcccaagaagacaccggcctgtccatgccgtccgatacctccctgtcacctgccagccagaatagcccgtactgcatgacacccgtgagccagggctcccctgcttcctctgggatcgggtcaccaatggcctcttccacaattacgaagattcacagcaaaaggttccgcgagtactgtaaccaagtgctgtgtaaggagattgacgagtgcgtcacccttctgctgcaggagttagtgtcctttcaggagcgaatctatcagaaagaccctgtgagggccaaggcacgtaggagacttgtcatggggctgcgggaagtcactaagcacatgaagcttaacaaaattaaatgtgtgatcatctcccctaattgcgagaagatccaaagcaaaggcggcttggacgaagccctatataatgtgattgcaatggccagagaacaggaaatccctttcgttttcgcactggggagaaaggcacttggcagatgcgtcaacaaactcgtgccggtgtcagtggtgggaatattcaactatttcggcgccgagagcctcttcaataaattagtagaacttactgaggaagcccgcaaagcttacaaagacatggtcgctgctatggaacaagagcaagcggaagaggccctcaaaaacgtgaagaaggtgccccaccacatgggacattcacgtaacccttccgcggcttctgcaatatccttttgcagtgtgatttctgaacctatcagcgaggttaatgagaaagagtatgaaaccaactggcggaacatggtggaaacctccgatggacttgaggcctcagagaacgagaaggaggtctcttgcaagcattcaaccagtgaaaaaccgagtaagttaccctttgacacaccgcctataggcaaacagcctagcctggtcgcgaccggatccactacatcggccactagtgctggaaaatcgacggcgagcgataaagaagaggtgaaaccggacgacctcgaatgggcgagccagcaaagtaccgagaccggatccttggatggcagttgcagagacctgttgaatagctctattacatccacaaccagcactctggtgcccggaatgttagaggaagaagaggatgaggatgaggaagaggaggaagactatacccacgagcctatcagcgtggaagtccagctcaatagcaggatcgaatcctgggtttccgagactcagagaaccatggaaactctccaactggggaaaacgcttaacggctctgaggaagacaatgtagagcaaagcggggaggaggaggccgaagccccggaagtcctcgaaccagggatggatagcgaagcatggacggccgaccaacaggccagccctggacagcaaaagtcctcgaactgcagcagtctgaataaggagcattcagactccaactacaccacccagactacctag

SEQ ID NO: 181664 - DNA, 3171 bp, Artificial Sequence
  derived and/or modified sequence
atggaccgggctccaacggagcagaacgtgaagttaagtgccgaagtggagccctttataccccagaagaagagccctgacacattcatgataccaatggcgctgcccaatgacaacggaagcgtcagcggcgttgagcccacaccaatcccaagttacctaatcacttgttatcctttcgtacaggaaaaccaaagcaatcgacagttcccactctataacaacgatattcgatggcagcaaccaaacccgaatccaactggcccatactttgcttaccctatcatctccgcacagccacccgtcagtaccgaatatacctattatcaactgatgcccgctccgtgcgctcaggtaatggggttctatcatccattccccactccctacagtaatacattccaggccgcaaacacggtaaatgccatcactaccgagtgtacggaacgtccttctcagcttggacaagtgttcccactgtctagtcaccgttcgcgtaactctaatcgaggcagcgtggttccaaagcaacaattattgcaacagcatatcaaaagcaagcgcccactcgtgaagaatgtagcaacacagaaagagaccaatgccgctggaccagattccaggagcaaaatagttttgctggtcgacgcaagccagcagaccgattttccaagcgacattgctaataaaagcttaagtgagactaccgcaaccatgttatggaaatccaaggggcgacgaagaagagcctctcatcccaccgcggaatcatcatccgagcagggggcaagcgaagccgacattgacagtgacagtggatactgttcgccaaaacatagcaacaatcagcctgccgctggcgcattgcggaaccccgattccgggaccatgaatcacgtggaatcctccatgtgcgctggtggggtcaattggtctaacgtaacttgtcaggctacacagaaaaagccatggatggagaagaaccaaacattctccaggggcggtaggcagaccgagcaaagaaataacagtcaagatgaagatggttttcaggaactgaatgagaatggcaatgcaaaagacgagaatatccagcagaaattatcttccaaagtcttagacgacctgcccgaaaacagtccaatcaatatagttcagaccccgatacccatcacaaccagcgtgccaaagagggcaaaaagccaaaaaaaaaaagcattagccgcagctttggcaactgcacaggagtatagcgaaatctctatggagcagaagaagctgcaggaagcgctctcaaaagccgctggaaaaaaaaataaaacacctgtgcagctggacctcggcgacatgcttgctgctctagagaagcagcagcaagcgatgaaggccagacaaattactaatacgagaccactcagttacactgtggttacagctgcctcgtttcacactaaagattctaccaatcgtaaaccactcacaaaatcacagccttgcctcacaagcttcaactctgtcgatatagcttcctccaaagcgaaaaaaggaaaggagaaggagatagcaaagttaaaacgacctaccgccctgaaaaaagtaattctgaaagagcgggaagagaaaaaggggcgactcactgtggatcataatctccttggcagcgaggaacccaccgagatgcacctcgacttcattgatgatctcccacaagagatagtttcccaggaggacaccggcttatcgatgccctctgataccagtttgagcccggcttcacagaattccccttattgtatgaccccagtgagccaggggtcaccggcatcgagcggcatcggctcacctatggcttccagtaccataaccaagatacattctaaacggttccgtgaatattgtaaccaggtcctgtgtaaggagattgacgaatgtgtaaccctcctcctgcaggaacttgtgagcttccaggagcgaatataccagaaagatcccgtccgggctaaggccagacggagattggttatgggcttacgtgaggtgactaaacacatgaaactgaataaaattaaatgcgttattatcagtccaaattgtgagaagatccagtctaaggggggactggacgaggcgctctataacgttattgccatggctcgggagcaggagatcccctttgtcttcgcgctaggaaggaaggctctgggacggtgtgtgaacaaactggtgcctgtgtcagtcgtgggaatctttaattattttggggcagagagcctattcaacaagttggtagaactcactgaagaagcccgtaaagcttataaggatatggtggccgcaatggagcaggagcaggccgaggaagcactcaagaatgtgaagaaggttcctcaccatatggggcacagcagaaacccttctgcggcaagcgcgattagcttttgctcagttatcagtgagcccatttctgaggtcaacgagaaggaatacgagacaaattggcgcaacatggtggagacatctgacggacttgaagcatcagagaatgagaaagaggtgtcttgcaaacatagcaccagcgagaagccatccaaactgccctttgacacgccaccgatcgggaagcagccaagcctggtggccaccggctctactacttctgctacttctgcaggaaaatctaccgcatccgacaaagaagaagttaaacccgacgacctggagtgggcttctcaacaatccactgaaactggctctctggacggcagctgtagggacctcctaaatagctccattacatcaacaacctctacgctggtgcccggtatgctcgaggaagaggaggatgaagacgaggaagaggaggaggattatactcatgagcctattagcgtggaggtgcagctgaatagtaggattgagtcctgggtgagtgagactcaaagaactatggaaaccctgcagctcggtaagactctcaacggatctgaagaggacaatgtcgagcagtctggcgaggaagaagctgaagctcccgaggtcttggagccaggcatggacagtgaagcttggaccgcagatcaacaggcctcaccaggccagcaaaagtcttctaactgctcttccttgaacaaggagcatagtgattcaaattacaccacacagactacttag

SEQ ID NO: 181665 - DNA, 6779 bp, Artificial Sequence
  derived and/or modified sequence
aatcggtgtcgcggccagccagataggggcggaggtccggaacccagtctggacccgagcggggggccatggagaaagcggcccgaggcgctgtttacaccgactagcgcgggcccgttgcggctgcaggcaccatggaccgagcccccacggagcagaatgtcaagctgtcagctgaggtggagccatttattccccagaagaagagtcctgatacatttatgatccctatggctctcccaaatgataatggaagtgtttctggtgtggaaccaactccaattcccagctacctgattacttgttacccatttgtgcaggaaaaccagtccaatagacagtttcctttatataacaatgatatacgatggcaacaacccaatccaaaccctactggaccatactttgcctatcccattatatctgctcagccgcctgtttctacagagtatacatattatcagctgatgccagcaccatgtgcccaggttatgggtttctatcatccttttcctacaccttactccaacacctttcaggctgcaaatactgtaaatgctatcaccacagaatgcactgagcgtccaagtcagcttggacaggtcttcccattgtccagccatcgaagcagaaacagtaacagaggatcagtggtcccaaaacaacagcttttacaacagcacataaaaagcaaaaggccgctggtgaaaaatgtagctactcagaaagaaacaaatgcagcaggtcctgatagtcgatcaaaaattgtgcttctggtagatgcttcacagcaaactgatttcccatcagatatcgctaacaagtctctctcagagaccactgcaacaatgctctggaagtccaagggcaggagaagaagagcatcccaccctactgctgaatcttctagtgagcagggggctagtgaagccgacattgacagtgatagtggttactgcagtcccaaacacagcaacaaccagcctgcagcaggggctttgagaaatcctgattctgggaccatgaatcatgtggaatcatctatgtgtgcaggtggtgtaaattggtccaatgtaacttgccaggcaactcagaaaaaaccttggatggaaaaaaatcagacattttctagaggtggaaggcaaactgaacaaagaaataattcacaggatgaagatgggtttcaagaactaaatgagaatggaaatgctaaggatgagaatattcaacaaaaactttcttctaaagtattggatgatttacctgaaaactcaccaatcaatatagttcagactccaattcctattaccacctcagttcccaaacgtgcaaaaagtcagaagaagaaagctttagcagcagcccttgccacagctcaagagtattcagaaataagtatggagcaaaaaaaattacaggaagctttatcaaaagcagctggaaaaaagaataaaacacctgtgcagctagatttaggggacatgttagctgctctggaaaaacaacagcaagcaatgaaagcacggcaaattactaacaccagacctctgtcatatacagtggttactgcagcttcttttcacactaaagactctactaatagaaaacctttaaccaaaagtcagccctgtttgacatcctttaattctgtggacattgcttcttctaaagcaaaaaaaggaaaagagaaggaaattgcaaaactaaaacgacccacagcacttaaaaaggttattttaaaagaaagagaggaaaagaaggggcgcttaactgtggaccacaatcttttgggatccgaggaaccaacagaaatgcacttagattttattgatgacttgccacaggagattgtttcccaggaagatactggactaagcatgcccagtgatacttcactctctccagcaagtcagaactctccatactgtatgacacctgtgtcacaaggctctcctgctagttctggaataggcagtccaatggcatcttcaacaataaccaaaatccacagcaaaagatttagagagtattgtaatcaggttctttgtaaagagattgatgaatgtgtgactcttcttctccaagagcttgtcagtttccaggaacgcatctaccaaaaagatcctgtaagagcaaaagcaaggagacgactcgttatgggtctaagagaagttaccaaacatatgaagttaaacaagatcaagtgtgttataatttctccaaactgtgaaaaaatccagtcaaaaggtggtctggatgaggctctctataatgttatagccatggcacgggaacaagaaattccttttgtgtttgcccttggaaggaaagctctaggacgctgtgtgaacaagctggttcctgttagcgtagtgggaatcttcaactactttggtgctgagagcctgtttaataaattagtagaactcactgaggaggccaggaaagcatataaagatatggttgcagcaatggaacaggagcaggctgaggaagccttaaagaatgtgaagaaggtaccacaccacatgggacattctcggaatccctctgcagcaagtgccatttctttctgcagtgttatttctgaaccgatctctgaagtaaatgaaaaggaatatgaaacaaattggagaaacatggtggaaacttcagatggactggaagcatcagaaaatgagaaagaggtatcctgtaagcacagcacttctgaaaaacccagtaaacttccatttgacacacccccaattggtaagcagccatcattagtggctacaggcagtactacctcagctacaagtgctgggaaatccacagcaagtgataaagaggaagtgaagccagatgacctggaatgggcctcacagcagagtacagagactggctctttggatggcagttgccgagatcttttgaattcctccatcaccagcaccaccagcactcttgtacctggcatgcttgaagaagaagaagatgaagatgaggaggaggaggaagattatactcatgaacccatatctgtagaagtgcagctcaatagtagaattgagtcttgggtctcagagacccagagaactatggaaacccttcagcttggaaaaacccttaatggttctgaggaagacaatgtagagcaaagtggagaagaggaagcagaggcgcctgaggtgctggagccagggatggacagtgaggcatggactgctgaccagcaggccagtcctgggcagcagaagtccagcaactgcagctcgctcaacaaagagcactctgattctaattacacaacgcaaactacgtaactcaggaaatgtcggctctctatctccagctgtggaagggttgcagccattaccttttatgcttcatctcaacattttgcactgtccagtatttaatatacgtatttaattcccaacaaatatttttgtagcttttacttgttatgatctgtagcttagcttttaattagtatctaagtgtctttctaagaactgtgtggaaaattcagatctgtttcagcttattttgtaatcaaaaacagtgataaaaagaagaccagatcttaaagaaaataaatttcaaatgcttacttaaaagacattttgaaagttaaagaacaaggttctaaggatagaagcagttatcagtgtttgcttcaggactccacctcctctactctaatttgaccaaaaaattgtttgggcttctttaaaaaagaactgggggtggagtcagaaaattaaatgaaaggctgagggtaactaagtccaccagtgttgtatgttaaaaaatcaatgcaacttttatgtggtccacaaatgtttagtcagaagtcactgattattgtaattaattagtgttgggatgggctaaaacagagccttcaaaacttcggctagcagtggagccaccatcttagattatagctagctagcctcatttgtggaaagtgatagatgctgtctataatagtgaacagtcacccatgataggacctccaggttctgtctcatatttgcttcttacttacctcaggaatgctcttgtacatagacttatttacaaaaagctaggcacatgttgacaggtgaataactgtaaccgattgtatgactgctgcacttacatgtaaactcttcagaaacagagtcttatactggtgtgttctcttgcatgcttctggttcaggactcttgatttgagatatggatttgattgagtatccaaacttgtcctgagtgcaaaactgtttcaccttttaaaaaatacctattttgcacctagccttgagcaccttccacatagcaatgaccatagttactgtcaggaggtcaaggaaaggaactttgcacaacttgtgacatgtatcctgataatcaaggcttagaggaggaagttttagaagataagagaaagttgttctaattgtgctgaaactattagatgatttagagtatacagatatgtaggtattaattctctattcactattatttatctctgcccttctctaggagtttgtatacctgcttaggagacaataaatgagctaaatgttttatttgctagtcagtcaccacctggacttcagtgactttacaagtttatgtaatggtggaagaatgacaaactatgtaatttttttgtcttccatccaactccccaccacccccaactgtcccccccacccccctcacacacatgcacacatccgtacgtgtgtgtgttttccacttacaagcttccataagcaggcacaaaactgagaaggaaggggtattatccctgccctgattatctggggcagggctttgcctcacagaggcaggagagaagaattgggcagattctttactgaactcattgggactactgtgctagttttgatgttttataatgctggcatttaattactggagagattggattcttggttgatgatttagtatttgtgaattgtgaaagttcaggagctgtgtagaaaatgttagtcaatcaactttattattgtgctaaaaggggacattcttatactgtcctgtctaaactgttctccagtatagacttcctaggcactaaatatccaatatttaaaggaacacagcaggtaaggaatgaagcctctgaaatagtactcatggatttatacatggcagatcttactgtctctacacatttggaagtgttcgttggtttaaagaaatgatagaggttttgaactactgacagtcttaaaagtgaatttaaaaactgttcatactttttatggtgtaaatttcctttgctcgatgtcagtgattcagataactcttgaccttgagatgatggcttttcacaggtttcttatattttatatctcttctgaacatgaattgtcattttagatttttgacatttgtatcaaaagagaagttgaggaaatcttcagaacactggtaacttttagttttgctatagacttcagaagtgtttatttatatgttcggtaaatgctctcgcatatgcagtacctcttctgccagcaaatccaagggaccatagcctttttatgagacaggtcacctctagaggacaacccaagaattattaaaggaaatgttaccattttgagagcatgcttaaataaatattaataatgtctttataacttgtttcctttaaattttggaatattgaattacaggctttggaggagttgtgaaaattaggaaagtttttatatattttttgaagtgggcatggttggctctttgaagacctataaagagatccagtgggaagagtaagggttggttcatcatcacaagaaataaaaaacatagtgattttttctcttaatgtgtagaggtggttttactggcaataattaataatagatttctatttcagtatgtaagcatattaactaaaatatgaattacacttccaaagttagatttctgcttcagtaggtttgtttgctgtgaagattacttctcaaaagacagatgttcatattagcttaattttcggtttaaatatgtttgtaaatgatgtaatatatttcttttgactaaatgtggaaaagtaatgtgtgttatacattgagaagtttttactggctttgactggaggttgtttttgcagagatggtattttatatgattccagtatttggaaaagaattagtcaaaaggaattcacatagtttaaatactgagaaattaatatccaaatatgtacttgtctgatttctaaataagctgggggaggagggaggggtgggaattgaaatgtgcaaatgagtagtgaatgctacactcattttcaactctttaacatgaaactgttcaatcttaacacattgttactttaatatatgtataaagaagtattactgtttgtaaagctgctgtttgcttaaaaaaaaaaaacacccttgtcatgtattttctgtatgttgggccaacaggttagaacatcaactcatttaaaaatttttatctttttttgatttaaaaaaattctgtgaaataatttatttacagacatcttcctcctccctcatcccttccaacctttacatacatcacagaatcaaccaaactgtttgcctaatctgaaatctgaatcctaatgagaaaaatttaaattttgttggcacatcacaccttgaaagtatttgtattattttataatttaatttctaaatataccacataagtttataatttaatgtcttaattgtaatgctctaataaaaaactagcaaaattagtgtgagttataacatg

SEQ ID NO: 181666 - protein, 1078 aa, Artificial Sequence
  derived and/or modified sequence
VCMHPHNVLSDVVNYTLWLMECSHASGCCHATMFFSICFSFRAVLELFDRYDGLRRLVNLISTLEILNLEDQGALLSDDEIFASRQTGKHTCMALRKYFEAHLAIKLEQVKQSLQRTEGGILVHPQPPYKACSYTHEQIVEMMEFLIEYGPAQLYWEPAEVFLKLSCVQLLLQLISIACNWKTYYARNDTVRFALDVLAILTVVPKIQLQLAESVDVLDEAGSTVSTVGISIILGVAEGEFFIHDAEIQKSALQIIINCVCGPDNRISSIGKFISGTPRRKLPQNPKSSEHTLAKMWNVVQSNNGIKVLLSLLSIKMPITDADQIRALACKALVGLSRSSTVRQIISKLPLFSSCQIQQLMKEPVLQDKRSDHVKFCKYAAELIERVSGKPLLIGTDVSLARLQKADVVAQSRISFPEKELLLLIRNHLISKGLGETATVLTKEADLPMTAASHSSAFTPVTAAASPVSLPRTPRIANGIATRLGSHAAVGASAPSAPTAHPQPRPPQGPLALPGPSYAGNSPLIGRISFIRERPSPCNGRKIRVLRQKSDHGAYSQSPAIKKQLDRHLPSPPTLDSIITEYLREQHARCKNPVATCPPFSLFTPHQCPEPKQRRQAPINFTSRLNRRASFPKYGGVDGGCFDRHLIFSRFRPISVFREANEDESGFTCCAFSARERFLMLGTCTGQLKLYNVFSGQEEASYNCHNSAITHLEPSRDGSLLLTSATWSQPLSALWGMKSVFDMKHSFTEDHYVEFSKHSQDRVIGTKGDIAHIYDIQTGNKLLTLFNPDLANNYKRNCATFNPTDDLVLNDGVLWDVRSAQAIHKFDKFNMNISGVFHPNGLEVIINTEIWDLRTFHLLHTVPALDQCRVVFNHTGTVMYGAMLQADDEDDLMEERMKSPFGSSFRTFNATDYKPIATIDVKRNIFDLCTDTKDCYLAVIENQGSMDALNMDTVCRLYEVGRQRLAEDEDEEEDQEEEEQEEEDDDEDDDDTDDLDELDTDQLLEAELEEDDNNENAGEDGDNDFSPSDEELANLLEEGEDGEDEDSDADEEVELILGDTDSSDNSDLEDDIILSLNE

SEQ ID NO: 181667 - protein, 1507 aa, Artificial Sequence
  derived and/or modified sequence
MTTVVVHVDSKAELTTLLEQWEKEHGSGQDMVPILTRMSQLIEKETEEYRKGDPDPFDDRHPGRADPECMLGHLLRILFKNDDFMNALVNAYVMTSREPPLNTAACRLLLDIMPGLETAVVFQEKEGIVENLFKWAREADQPLRTYSTGLLGGAMENQDIAANYRDENSQLVAIVLRRLRELQLQEVALRQENKRPSPRKLSSEPLLPLDEEAVDMDYGDMAVDVVDGDQEEASGDMEISFHLDSGHKTSSRVNSTTKPEDGGLKKNKSAKQGDRENFRKAKQKLGFSSSDPDRMFVELSNSSWSEMSPWVIGTNYTLYPMTPAIEQRLILQYLTPLGEYQELLPIFMQLGSRELMMFYIDLKQTNDVLLTFEALKHLASLLLHNKFATEFVAHGGVQKLLEIPRPSMAATGVSMCLYYLSYNQDAMERVCMHPHNVLSDVVNYTLWLMECSHASGCCHATMFFSICFSFRAVLELFDRYDGLRRLVNLISTLEILNLEDQGALLSDDEIFASRQTGKHTCMALRKYFEAHLAIKLEQVKQSLQRTEGGILVHPQPPYKACSYTHEQIVEMMEFLIEYGPAQLYWEPAEVFLKLSCVQLLLQLISIACNWKTYYARNDTVRFALDVLAILTVVPKIQLQLAESVDVLDEAGSTVSTVGISIILGVAEGEFFIHDAEIQKSALQIIINCVCGPDNRISSIGKFISGTPRRKLPQNPKSSEHTLAKMWNVVQSNNGIKVLLSLLSIKMPITDADQIRALACKALVGLSRSSTVRQIISKLPLFSSCQIQQLMKEPVLQDKRSDHVKFCKYAAELIERVSGKPLLIGTDVSLARLQKADVVAQSRISFPEKELLLLIRNHLISKGLGETATVLTKEADLPMTAASHSSAFTPVTAAASPVSLPRTPRIANGIATRLGSHAAVGASAPSAPTAHPQPRPPQGPLALPGPSYAGNSPLIGRISFIRERPSPCNGRKIRVLRQKSDHGAYSQSPAIKKQLDRHLPSPPTLDSIITEYLREQHARCKNPVATCPPFSLFTPHQCPEPKQRRQAPINFTSRLNRRASFPKYGGVDGGCFDRHLIFSRFRPISVFREANEDESGFTCCAFSARERFLMLGTCTGQLKLYNVFSGQEEASYNCHNSAITHLEPSRDGSLLLTSATWSQPLSALWGMKSVFDMKHSFTEDHYVEFSKHSQDRVIGTKGDIAHIYDIQTGNKLLTLFNPDLANNYKRNCATFNPTDDLVLNDGVLWDVRSAQAIHKFDKFNMNISGVFHPNGLEVIINTEIWDLRTFHLLHTVPALDQCRVVFNHTGTVMYGAMLQADDEDDLMEERMKSPFGSSFRTFNATDYKPIATIDVKRNIFDLCTDTKDCYLAVIENQGSMDALNMDTVCRLYEVGRQRLAEDEDEEEDQEEEEQEEEDDDEDDDDTDDLDELDTDQLLEAELEEDDNNENAGEDGDNDFSPSDEELANLLEEGEDGEDEDSDADEEVELILGDTDSSDNSDLEDDIILSLNE

SEQ ID NO: 181668 - DNA, 3177 bp, Artificial Sequence
  derived and/or modified sequence
atgaccaccgtggtggtgcacgtggacagcaaggccgagctgaccaccctgctggagcagtgggagaaggagcacggcagcggccaggacatggtgcccatcctgaccagaatgagccagctgatcgagaaggagaccgaggagtacagaaagggcgaccccgaccccttcgacgacagacaccccggcagagccgaccccgagtgcatgctgggccacctgctgagaatcctgttcaagaacgacgacttcatgaacgccctggtgaacgcctacgtgatgaccagcagagagccccccctgaacaccgccgcctgcagactgctgctggacatcatgcccggcctggagaccgccgtggtgttccaggagaaggagggcatcgtggagaacctgttcaagtgggccagagaggccgaccagcccctgagaacctacagcaccggcctgctgggcggcgccatggagaaccaggacatcgccgccaactacagagacgagaacagccagctggtggccatcgtgctgagaagactgagagagctgcagctgcaggaggtggccctgagacaggagaacaagagacccagccccagaaagctgagcagcgagcccctgctgcccctggacgaggaggccgtggacatggactacggcgacatggccgtggacgacgccgagatccagaagagcgccctgcagatcatcatcaactgcgtgtgcggccccgacaacagaatcagcagcatcggcaagttcatcagcggcacccccagaagaaagctgccccagaaccccaagagcagcgagcacaccctggccaagatgtggaacgtggtgcagagcaacaacggcatcaaggtgctgctgagcctgctgagcatcaagatgcccatcaccgacgccgaccagatcagagccctggcctgcaaggccctggtgggcctgagcagaagcagcaccgtgagacagatcatcagcaagctgcccctgttcagcagctgccagatccagcagctgatgaaggagcccgtgctgcaggacaagagaagcgaccacgtgaagttctgcaagtacgccgccgagctgatcgagagagtgagcggcaagcccctgctgatcggcaccgacgtgagcctggccagactgcagaaggccgacgtggtggcccagagcagaatcagcttccccgagaaggagctgctgctgctgatcagaaaccacctgatcagcaagggcctgggcgagaccgccaccgtgctgaccaaggaggccgacctgcccatgaccgccgccagccacagcagcgccttcacccccgtgaccgccgccgccagccccgtgagcctgcccagaacccccagaatcgccaacggcatcgccaccagactgggcagccacgccgccgtgggcgccagcgcccccagcgcccccaccgcccacccccagcccagacccccccagggccccctggccctgcccggccccagctacgccggcaacagccccctgatcggcagaatcagcttcatcagagagagacccagcccctgcaacggcagaaagatcagagtgctgagacagaagagcgaccacggcgcctacagccagagccccgccatcaagaagcagctggacagacacctgcccagcccccccaccctggacagcatcatcaccgagtacctgagagagcagcacgccagatgcaagaaccccgtggccacctgcccccccttcagcctgttcaccccccaccagtgccccgagcccaagcagagaagacaggcccccatcaacttcaccagcagactgaacagaagagccagcttccccaagtacggcggcgtggacggcggctgcttcgacagacacctgatcttcagcagattcagacccatcagcgtgttcagagaggccaacgaggacgagagcggcttcacctgctgcgccttcagcgccagagagagattcctgatgctgggcacctgcaccggccagctgaagctgtacaacgtgttcagcggccaggaggaggccagctacaactgccacaacagcgccatcacccacctggagcccagcagagacggcagcctgctgctgaccagcgccacctggagccagcccctgagcgccctgtggggcatgaagagcgtgttcgacatgaagcacagcttcaccgaggaccactacgtggagttcagcaagcacagccaggacagagtgatcggcaccaagggcgacatcgcccacatctacgacatccagaccggcaacaagctgctgaccctgttcaaccccgacctggccaacaactacaagagaaactgcgccaccttcaaccccaccgacgacctggtgctgaacgacggcgtgctgtgggacgtgagaagcgcccaggccatccacaagttcgacaagttcaacatgaacatcagcggcgtgttccaccccaacggcctggaggtgatcatcaacaccgagatctgggacctgagaaccttccacctgctgcacaccgtgcccgccctggaccagtgcagagtggtgttcaaccacaccggcaccgtgatgtacggcgccatgctgcaggccgacgacgaggacgacctgatggaggagagaatgaagagccccttcggcagcagcttcagaaccttcaacgccaccgactacaagcccatcgccaccatcgacgtgaagagaaacatcttcgacctgtgcaccgacaccaaggactgctacctggccgtgatcgagaaccagggcagcatggacgccctgaacatggacaccgtgtgcagactgtacgaggtgggcagacagagactggccgaggacgaggacgaggaggaggaccaggaggaggaggagcaggaggaggaggacgacgacgaggacgacgacgacaccgacgacctggacgagctggacaccgaccagctgctggaggccgagctggaggaggacgacaacaacgagaacgccggcgaggacggcgacaacgacttcagccccagcgacgaggagctggccaacctgctggaggagggcgaggacggcgaggacgaggacagcgacgccgacgaggaggtggagctgatcctgggcgacaccgacagcagcgacaacagcgacctggaggacgacatcatcctgagcctgaacgagtag

SEQ ID NO: 181669 - DNA, 4114 bp, Artificial Sequence
  derived and/or modified sequence
aggcaaagccatgactacagtagtggtacatgtggactccaaagctgagctcactaccctgctggagcagtgggaaaaggaacatggcagtgggcaggacatggtacctatccttaccaggatgtctcaattgattgaaaaagaaactgaagagtatcgtaaaggggatccagacccatttgatgatcgacatcctggtcgagctgatccagagtgtatgctgggccacttgctgagaatactcttcaagaatgatgatttcatgaatgcactggtgaatgcatatgtgatgacaagccgagagccccctttaaacactgcagcttgcagactcctattagacatcatgccagggctggaaactgctgtcgtctttcaagaaaaggagggaattgtcgagaatcttttcaaatgggcccgagaggccgatcaaccattgaggacatattctactggactgttaggaggtgctatggaaaatcaagacattgctgccaactatagagatgaaaattcacagctggtggcaatagtgcttcgaagactgagggagctacagctacaggaagtggctttgcggcaggaaaacaagcgtcccagtccacggaagctctcttctgaaccccttttgcctctggatgaggaggctgtggatatggactatggtgacatggctgtagatgatgctgaaattcagaagtcagcacttcagattatcatcaattgtgtgtgtggcccagataaccgaatatccagtattggtaaatttatctctggtactcctcggagaaagctgcctcagaaccctaaaagcagtgagcacaccctggccaagatgtggaatgtggttcagtccaacaacggcatcaaggtgctcctgtccttactgtccattaagatgcccatcacagatgcagaccaaatccgggccctggcctgcaaagccctagtgggcctgtctcgcagtagcactgtccggcagatcatcagtaaactgccccttttcagcagctgccagatccagcagctgatgaaggagcctgtgctgcaggacaagcgcagtgaccatgtcaagttctgcaagtatgctgctgaactcattgaacgggtgtcaggaaaaccacttctcattggcactgatgtttccctagcacgactgcagaaagcagatgttgttgcccagtcaaggatctccttccctgagaaagagctgcttttgttgatacgaaaccatcttatttctaaagggcttggagaaacagcaaccgtgctgacaaaagaggctgacctgcccatgactgctgcctcccattcttctgcctttaccccagtcactgctgctgcttctcctgtctctctaccccgaacccctcgtatcgctaatggcattgcaactcgtctgggcagccatgctgctgtgggtgcctctgcgccttctgcccctactgctcatcctcagccacggcccccccagggtccgctagctctgcccggcccatcttatgcaggcaactcccctttgattggtagaatcagttttatcagagagaggccatcaccctgcaatggcaggaaaatcagagtgttgcggcagaagtcggaccatggtgcctacagccaaagcccagccataaaaaaacagctggacagacatcttccttccccacctacgctggacagtataatcacagagtatcttagagaacaacatgctcgctgcaagaatccagttgccacctgcccacctttctccctctttactcctcaccaatgtcctgagccaaaacagaggcggcaagcgccaataaactttacgtcaaggctaaaccgcagggcatcatttccaaagtatggaggggtggatggcggatgctttgataggcaccttatctttagcagattccgtcctatttcagtgttccgggaagccaatgaagatgagagtggcttcacctgctgtgcattctcagcacgggagcggttcctgatgcttggcacctgcacagggcagctgaagctctataatgtgtttagtggacaggaggaggccagctataactgtcacaactcagccatcacacatcttgaaccttccagggatgggtccttgctgctgacatctgctacttggagccagcctttgtctgcactttggggaatgaagtcagtatttgatatgaagcattccttcacagaagatcactatgttgagttcagtaagcactcccaggatcgggtcatcggcacaaaaggagacattgcccacatttatgatattcagactggcaacaagctgttgactctgtttaacccagatcttgccaacaactacaagaggaactgtgccacctttaatcctacagatgatcttgtcttaaatgatggcgtcctctgggatgtccgctctgcacaggccatccacaagtttgacaagttcaatatgaacatcagtggtgttttccatccaaatggactggaggtgatcattaatactgagatttgggaccttcgaacttttcatcttttgcatactgttcccgctctggatcagtgtcgcgtggtgttcaatcacacgggaacagtgatgtatggagctatgttgcaggcagatgatgaagatgacttaatggaagagaggatgaaaagcccctttgggtcatccttccgaacatttaatgcaactgactacaaacctatagcaaccattgatgtgaaacggaacatctttgacctgtgtacagacaccaaagactgctatcttgctgtcattgagaatcaaggcagcatggatgccctgaacatggacacagtatgcaggctgtatgaagtgggcaggcagcgtctggcagaggatgaggatgaagaggaggaccaggaagaggaagaacaggaggaagaagatgatgatgaagatgatgatgacaccgatgatttagatgagcttgacactgaccagttgctggaggcggagttggaggaggacgacaataatgagaacgcaggggaagatggggacaatgacttctctccctctgatgaggagctagcaaaccttctagaggagggagaggacggggaggatgaagactctgatgcagatgaggaggtggaactgatcctgggggacactgacagctctgacaactctgatttggaagatgacatcatcttatctctgaatgagtgaggagccatcactgcttggaagagattcttggcaggcgagaaactgagtcaaatgaattcagaacatattcccttctctttctcccagggctgtctgtcttttaaggagctgcatgccctgcattcagaagattatggcttagagagcctcattggcacccgagggtccttccagaatcaataaccaccacaaaaatgacaacagggactaggccctactctgcaccccccacatccaccccccaccatttcctaggatggacatatctttcaaggggaaaaaaaaaccatgtctctggggtatttcacaatatattttctttgtatagtgttctttacttaaagaacaagaaatagttttttataaaactttaaaaaggaaaaaaaaacaggcatttataactgagggtatgaacttatatccaccaggtctcttgtccctgcacttcattttctttggaagaaaatgatgtctaaagaacaatatagaggcatttttacatacgtatttaaatgaaaaggaaaatcgtggtttcttaaattgataaggattaagaatattttattataaatataatatatgattttttaacctgttttgttgcctcatatgctgtcaggttaatttgttttccttcgtgccagaggtggggaggaaggcactctgtctgctgggtaaatgcctaaattcactcaccttcatggtttgggggcagcatggtcattgtggatattggttttgtggagttgagggaacttaggatataagttcactccctctatttttctttgtgattcagtttttcaaaaatctttttttcttccctttctccccattgtggaaattacaaatcaaaggcctttttctttaatgtaaagtgtatttatttaaaaaaaatacaaaataaactacaagtctgtctttgtt

SEQ ID NO: 181670 - DNA, 3237 bp, Artificial Sequence
  derived and/or modified sequence
gtgtgcatgcacccccacaacgtgctgagcgacgtggtgaactacaccctgtggctgatggagtgcagccacgccagcggctgctgccacgccaccatgttcttcagcatctgcttcagcttcagagccgtgctggagctgttcgacagatacgacggcctgagaagactggtgaacctgatcagcaccctggagatcctgaacctggaggaccagggcgccctgctgagcgacgacgagatcttcgccagcagacagaccggcaagcacacctgcatggccctgagaaagtacttcgaggcccacctggccatcaagctggagcaggtgaagcagagcctgcagagaaccgagggcggcatcctggtgcacccccagcccccctacaaggcctgcagctacacccacgagcagatcgtggagatgatggagttcctgatcgagtacggccccgcccagctgtactgggagcccgccgaggtgttcctgaagctgagctgcgtgcagctgctgctgcagctgatcagcatcgcctgcaactggaagacctactacgccagaaacgacaccgtgagattcgccctggacgtgctggccatcctgaccgtggtgcccaagatccagctgcagctggccgagagcgtggacgtgctggacgaggccggcagcaccgtgagcaccgtgggcatcagcatcatcctgggcgtggccgagggcgagttcttcatccacgacgccgagatccagaagagcgccctgcagatcatcatcaactgcgtgtgcggccccgacaacagaatcagcagcatcggcaagttcatcagcggcacccccagaagaaagctgccccagaaccccaagagcagcgagcacaccctggccaagatgtggaacgtggtgcagagcaacaacggcatcaaggtgctgctgagcctgctgagcatcaagatgcccatcaccgacgccgaccagatcagagccctggcctgcaaggccctggtgggcctgagcagaagcagcaccgtgagacagatcatcagcaagctgcccctgttcagcagctgccagatccagcagctgatgaaggagcccgtgctgcaggacaagagaagcgaccacgtgaagttctgcaagtacgccgccgagctgatcgagagagtgagcggcaagcccctgctgatcggcaccgacgtgagcctggccagactgcagaaggccgacgtggtggcccagagcagaatcagcttccccgagaaggagctgctgctgctgatcagaaaccacctgatcagcaagggcctgggcgagaccgccaccgtgctgaccaaggaggccgacctgcccatgaccgccgccagccacagcagcgccttcacccccgtgaccgccgccgccagccccgtgagcctgcccagaacccccagaatcgccaacggcatcgccaccagactgggcagccacgccgccgtgggcgccagcgcccccagcgcccccaccgcccacccccagcccagacccccccagggccccctggccctgcccggccccagctacgccggcaacagccccctgatcggcagaatcagcttcatcagagagagacccagcccctgcaacggcagaaagatcagagtgctgagacagaagagcgaccacggcgcctacagccagagccccgccatcaagaagcagctggacagacacctgcccagcccccccaccctggacagcatcatcaccgagtacctgagagagcagcacgccagatgcaagaaccccgtggccacctgcccccccttcagcctgttcaccccccaccagtgccccgagcccaagcagagaagacaggcccccatcaacttcaccagcagactgaacagaagagccagcttccccaagtacggcggcgtggacggcggctgcttcgacagacacctgatcttcagcagattcagacccatcagcgtgttcagagaggccaacgaggacgagagcggcttcacctgctgcgccttcagcgccagagagagattcctgatgctgggcacctgcaccggccagctgaagctgtacaacgtgttcagcggccaggaggaggccagctacaactgccacaacagcgccatcacccacctggagcccagcagagacggcagcctgctgctgaccagcgccacctggagccagcccctgagcgccctgtggggcatgaagagcgtgttcgacatgaagcacagcttcaccgaggaccactacgtggagttcagcaagcacagccaggacagagtgatcggcaccaagggcgacatcgcccacatctacgacatccagaccggcaacaagctgctgaccctgttcaaccccgacctggccaacaactacaagagaaactgcgccaccttcaaccccaccgacgacctggtgctgaacgacggcgtgctgtgggacgtgagaagcgcccaggccatccacaagttcgacaagttcaacatgaacatcagcggcgtgttccaccccaacggcctggaggtgatcatcaacaccgagatctgggacctgagaaccttccacctgctgcacaccgtgcccgccctggaccagtgcagagtggtgttcaaccacaccggcaccgtgatgtacggcgccatgctgcaggccgacgacgaggacgacctgatggaggagagaatgaagagccccttcggcagcagcttcagaaccttcaacgccaccgactacaagcccatcgccaccatcgacgtgaagagaaacatcttcgacctgtgcaccgacaccaaggactgctacctggccgtgatcgagaaccagggcagcatggacgccctgaacatggacaccgtgtgcagactgtacgaggtgggcagacagagactggccgaggacgaggacgaggaggaggaccaggaggaggaggagcaggaggaggaggacgacgacgaggacgacgacgacaccgacgacctggacgagctggacaccgaccagctgctggaggccgagctggaggaggacgacaacaacgagaacgccggcgaggacggcgacaacgacttcagccccagcgacgaggagctggccaacctgctggaggagggcgaggacggcgaggacgaggacagcgacgccgacgaggaggtggagctgatcctgggcgacaccgacagcagcgacaacagcgacctggaggacgacatcatcctgagcctgaacgagtag

SEQ ID NO: 181671 - DNA, 3177 bp, Artificial Sequence
  derived and/or modified sequence
atgactactgtggtcgtgcacgtcgactcaaaggccgagttgactacactgctggaacaatgggagaaggagcacgggagtgggcaggacatggtgcccatcctcacacgtatgagtcaactgatagagaaggaaaccgaagagtaccgtaagggagacccagatccatttgacgaccggcacccgggtagggccgaccctgaatgtatgctgggacacctacttcgcatcctttttaagaacgacgacttcatgaatgcactcgtgaacgcctacgtgatgacctcccgcgagcctccattaaacacagccgcctgtcgtctgctgttagatattatgcctggtttggagactgccgttgtattccaggagaaagaagggatagtggaaaatctgttcaagtgggcaagagaagccgatcagccgcttaggacttatagtaccggcctccttgggggggcgatggagaatcaggacatcgccgcaaactaccgagatgaaaactcccaattggtagccattgtgctgcgccgattaagagagttgcaactccaggaagttgccctccgacaagagaataagcgcccctctccgcgcaagctaagtagtgagccacttttgcctctggacgaagaggctgtggatatggactacggcgacatggccgtggacgacgccgaaattcagaaaagtgccctgcagattatcattaattgcgtgtgcggacccgataatcggatatcaagcataggaaaattcatttccggaacaccgagaagaaaactcccacagaatccaaagtcaagcgaacacacattagcaaaaatgtggaacgtagtacagtccaacaacgggatcaaagtattgcttagtctgctttctataaaaatgcccattactgatgcggaccaaatacgagccctggcgtgcaaggccctggtcgggctgagtcgttcctccaccgtgcgtcagattatttcaaagctccctctctttagctcttgtcagattcagcaactgatgaaagaacctgttttgcaggacaaacggtccgaccacgtgaagttctgcaagtatgcagcagagttgattgagcgtgtgtctggtaagccccttttgatcggaactgatgtgagcctggcccggctccagaaggcagacgtcgtggctcagagccgtattagttttcccgagaaggagcttctgctactgattcgcaaccacctcatttctaagggcctaggggaaaccgcaaccgtcctgacaaaggaggcagatctcccaatgaccgccgcctcccacagtagcgccttcacacccgtgaccgctgcagcctcacccgtcagcctgcccaggacccctcgcattgccaatgggatcgccacgcgtctcggatcacacgcagccgtgggcgcatcagctccctccgcaccaactgcccaccctcagccgagacccccacaggggcccctggcccttccaggacccagctacgcggggaactcaccattgatcggtagaattagttttattcgggagagaccgtccccctgcaacggccgtaagattcgagtgctgcgacagaaatccgaccacggggcttatagccagagccccgccatcaagaagcagctggatcgccatttgccatccccaccaaccctggatagtataatcactgaatatcttcgagagcaacatgctagatgtaaaaacccggttgccacctgcccacccttctcgctctttactccacaccagtgccctgaacccaagcagcggagacaggcgccaattaatttcactagtcgcctaaatagaagagcgagctttccaaagtacgggggggtggacggcggctgcttcgaccgtcacttaatcttttctcggttccgccctattagtgtgttcagggaggccaatgaagatgagtcagggtttacatgctgtgcattctcagctagggaaagatttctgatgctaggcacttgtaccggccagctgaagctatataacgtattcagcggccaggaggaggcttcttataattgccataatagcgctattacccacttggagccaagtagagacggatcattgctgctgaccagcgccacgtggtcacagccccttagcgccctgtggggcatgaaatctgtgttcgacatgaaacactcatttactgaagaccactatgtggaattctcaaagcactcacaggaccgggtgatcgggaccaagggcgacattgcccatatctacgatattcagacaggtaataaactgctcaccttgttcaacccagatttagcaaacaactacaagaggaactgcgctacctttaatcccactgatgacctggtacttaacgacggggttttgtgggacgtgaggagcgctcaggctatccataagttcgacaaatttaacatgaatatctctggcgtttttcaccccaacggcctggaggtaataattaataccgaaatttgggatctgcgcacctttcacctacttcatactgtccccgcgctggatcagtgtcgagtggtgtttaaccatactggaaccgttatgtatggagccatgctacaggcggatgatgaagatgatcttatggaggagaggatgaaaagccctttcggatccagcttccggacctttaatgccacggactacaaaccaatcgctacaattgatgtgaagagaaatatctttgatctctgtactgacacaaaggattgctacctcgccgtcatcgagaaccaggggtcaatggatgctctcaacatggacacagtgtgcaggctctatgaagtgggtcggcagcgtctggcagaggacgaagatgaggaggaagaccaggaagaagaagaacaggaagaagaagatgacgatgaagacgatgacgataccgacgacctggatgagctggataccgatcagctcctggaagctgagcttgaagaggacgacaataatgaaaacgccggtgaggacggagacaatgacttctccccttcggacgaggaattggctaacctgttggaggaaggagaagatggggaagacgaggactcagacgctgatgaggaagttgaactgatactgggggatacagattcgagcgacaatagcgacctggaagacgacataattttaagcctgaatgaatag

SEQ ID NO: 181672 - DNA, 3237 bp, Artificial Sequence
  derived and/or modified sequence
gtctgcatgcatccacacaacgtccttagcgatgtggtcaattacactctatggctgatggaatgttcacatgctagcgggtgttgccacgctacaatgttttttagtatttgctttagcttcagggccgtgctcgagctcttcgaccgatatgacggtctgcggagattagttaatctgatcagtaccctagagatcttgaacctcgaagaccagggagcactcctgagtgacgatgaaattttcgcaagccgacaaacaggtaagcacacttgcatggctctgagaaagtattttgaggctcacctggctatcaagctcgaacaggtgaagcagtctctgcagagaaccgaaggtggtattctggtccacccacagcctccttataaggcctgcagttacactcacgagcagattgtggaaatgatggaattccttatcgagtacggccctgcacaactgtattgggagcccgccgaggtgtttttaaaactttcctgcgtccagctcctcttgcagctgattagcattgcctgcaattggaagacatattacgcaaggaatgataccgtgagatttgccctggatgtactcgccatccttacagtcgtacccaaaattcagctacagttggctgaatccgtggacgtgctggacgaggccgggtcgaccgtctctacggtgggcatatctataattctcggcgtagctgaaggcgagttctttatccacgatgccgagatccagaagagcgccttgcagatcatcattaattgcgtttgtggaccagataacaggatttcatctattggcaagttcatcagcggcacgcccagacggaaactgcctcaaaatccaaagtccagtgaacatactcttgcaaagatgtggaatgtcgtccagagcaataacggaatcaaggtactactcagtctgttgagcattaaaatgccaatcaccgacgccgatcaaattcgcgccctggcatgtaaggccctggttggactctcccgatcttcaactgtgcgacaaattatctctaagctgcctctattctccagttgccagatccagcagctcatgaaggagcctgtgcttcaggacaaaagatcagaccatgtgaagttctgcaagtacgccgctgaactgatagaacgcgtgtccggcaagcctctcctgattggtacagatgtgtccttggcccggctgcagaaagccgatgtggtagcccaatcaagaatttccttcccagaaaaggagcttctacttctaattcgtaatcatctgattagcaaaggcctgggcgagaccgcgacagtcttgactaaagaggccgacctgcccatgactgcagccagccattctagtgctttcacaccagtgaccgcagccgcttcgcccgtgagcctgccccgaactccacgcatagcaaacggcattgctacccgattgggatcccatgctgcagtgggtgcgtccgcgcccagtgctccaaccgcgcaccctcagcccaggcctccacagggcccattggccctgcctgggccttcatatgcggggaactctccacttattggccgaataagcttcattagggagagacctagtccctgcaatgggcgaaagatccgggtccttcgacagaagtcagatcatggggcctattcacaatccccagccataaaaaaacagcttgatcgccacctccctagtccacccacactcgattccattataacggaatatctgagagaacagcacgccaggtgcaagaatcccgtagcgacttgtcctccattctccttatttaccccccatcagtgccccgagccaaagcagagaagacaggccccaatcaatttcactagtcggctgaatagacgcgcttcctttccaaagtatggtggggtggatggcggctgcttcgataggcacctcattttttcgaggtttaggccaatttcagttttccgggaggcaaatgaggacgaatctggcttcacttgctgtgcattctcagcccgggagagatttctgatgctaggtacttgcactggccagctcaagctctacaacgtgtttagcggacaggaagaggcttcctacaattgccacaattccgctatcactcatcttgagccatctagagacggcagtctgctccttacttcagccacttggagtcaaccactctcggcgctgtggggtatgaagagcgtgttcgacatgaagcattcattcacagaagaccactacgtggagttcagcaaacactcccaagatcgagtgatcggaactaagggcgatatcgcacatatctacgatatccagaccgggaataagcttcttactttgttcaaccccgatcttgccaataattataagcgcaattgcgcaacttttaaccctaccgatgatctggttcttaacgacggggtgctgtgggacgttcggagcgcccaagcaattcataaatttgataaattcaatatgaacatatctggcgttttccatcccaatggattggaggtgataattaacacagaaatttgggacctacgtactttccatctgttgcacaccgtacccgctctggatcagtgccgggtggtgtttaaccataccggcacggtgatgtatggggcaatgctccaggccgacgacgaagatgatcttatggaggaacggatgaaatctccttttggaagctctttccgtactttcaatgcaacagattacaagcccatcgcaactattgatgtgaaacgtaatatctttgatttgtgcaccgatactaaggactgctacctggccgttattgaaaatcaaggaagcatggatgccttgaacatggatacggtctgcaggctgtacgaagtgggacgccagcgcctggccgaagatgaagacgaagaagaggaccaggaggaggaagaacaggaagaagaagatgatgacgaggatgacgacgacactgacgatttggatgaattagatactgaccagctcctcgaggcagagcttgaagaggatgataataacgagaacgcaggggaggatggagataacgatttttctccctctgacgaggagctggcaaatctgcttgaagagggggaggacggtgaggatgaagattctgatgctgatgaggaggtggagcttatcctgggtgacaccgatagtagcgacaactctgacctggaggatgacataattctctcactcaatgagtag

SEQ ID NO: 181673 - DNA, 3177 bp, Artificial Sequence
  derived and/or modified sequence
atgaccaccgtggtggtgcacgtggacagcaaggccgagctgaccaccctgctggagcagtgggagaaggagcacggcagcggccaggacatggtgcccatcctgaccaggatgagccagctgattgagaaggagacagaggagtacagaaaaggagaccctgacccctttgatgacagacaccctggccgggctgaccctgagtgcatgctgggccacctgctgcgcatcctcttcaagaatgatgacttcatgaatgccctggtgaatgcctacgtgatgaccagccgggagccccccctgaacacagctgcctgccgcctgctgctggacatcatgcctggcctggagacagctgtggtgttccaggagaaggagggcatcgtggagaacctcttcaagtgggcccgggaggccgaccagcccctgcggacctacagcacaggcctgctgggcggggccatggagaaccaggacattgctgccaactacagagatgagaacagccagctggtggccatcgtgctgcggcggctgcgggagctgcagctgcaggaggtggccctgcggcaggagaacaagaggcccagccccaggaagctgagcagcgagcccctgctgcccctggatgaggaggccgtggacatggactatggagacatggctgtggatgatgctgagatccagaagagcgccctgcagatcatcatcaactgtgtgtgtggccctgacaaccgcatcagcagcatcggcaagttcatcagcggcacccccaggaggaagctgccccagaaccccaagagcagcgagcacaccctggccaagatgtggaatgtggtgcagagcaacaacggcatcaaggtgctgctgagcctgctgagcatcaagatgcccatcacagatgctgaccagatccgggccctggcctgcaaggccctggtgggcctgagccgcagcagcacagtgcggcagatcatcagcaagctgcccctcttcagcagctgccagatccagcagctgatgaaggagcctgtgctgcaggacaagagaagtgaccacgtgaagttctgcaagtatgctgctgagctgattgaaagagtgtctgggaagcccctgctgattggaacagatgtgtccctggcccggctgcagaaggcagatgtggtggcccagagccgcatctccttccctgagaaggagctgctgctgctgatccggaaccacctgatcagcaagggcctgggggagacagccaccgtgctgaccaaggaggccgacctgcccatgacagctgccagccacagcagcgccttcacccctgtgacagctgctgccagccctgtgtccctgcccaggaccccccgcatcgccaacggcatcgccacccggctgggcagccacgccgctgtgggcgccagcgcccccagcgcccccacagcccacccccagccccggcccccccagggccccctggccctgcccggccccagctatgccggcaacagccccctgattggccgcatctccttcatccgggagcggcccagcccctgcaatggaaggaagatccgggtgctgcggcagaagagtgaccacggggcctacagccagagccctgccatcaagaagcagctggacagacacctgcccagcccccccaccctggacagcatcatcacagagtacctgcgggagcagcacgcccgctgcaagaaccctgtggccacctgcccccccttcagcctcttcaccccccaccagtgcccagagcccaagcagaggcggcaggcccccatcaacttcaccagccggctgaacagaagagccagcttccccaagtatggaggagtggatggcggctgctttgacagacacctgatcttcagccgcttccggcccatctctgtgttccgggaggccaatgaagatgaaagtggcttcacctgctgtgccttcagcgcccgggagcgcttcctgatgctgggcacctgcaccggccagctgaagctgtacaacgtgttttctggccaggaggaggccagctacaactgccacaacagcgccatcacccacctggagcccagcagagatggcagcctgctgctgaccagcgccacctggagccagcccctgagcgccctgtggggcatgaagtctgtgtttgacatgaagcacagcttcacagaggaccactacgtggagttcagcaagcacagccaggacagagtcatcggcaccaagggggacatcgcccacatctatgacatccagacaggcaacaagctgctgaccctcttcaacccagacctggccaacaactacaagaggaactgtgccaccttcaaccccacagatgacctggtgctgaatgatggagtgctgtgggatgtgcgcagcgcccaggccatccacaagtttgacaagttcaacatgaacatcagcggggtcttccaccccaacggcctggaggtgatcatcaacacagagatctgggacctgcggaccttccacctgctgcacacagtgcctgccctggaccagtgccgggtggtgttcaaccacactggaacagtgatgtacggggccatgctgcaggctgatgatgaagatgacctgatggaggagaggatgaagagccccttcggcagcagcttccgcaccttcaatgccacagactacaagcccatcgccaccattgatgtgaagaggaacatctttgacctgtgcacagacaccaaggactgctacctggccgtgattgagaaccagggctccatggatgccctgaacatggacacagtgtgccgcctgtatgaggtgggccggcagaggctggctgaagatgaagatgaggaggaggaccaggaggaggaggagcaggaggaggaggatgatgatgaagatgatgatgacacagatgacctggatgagctggacacagaccagctgctggaggccgagctggaggaggatgacaacaatgaaaatgctggagaagatggagacaatgacttcagccccagtgatgaggagctggccaacctgctggaggagggggaggatggagaagatgaagattctgatgctgatgaggaggtggagctgatcctgggggacacagacagcagtgacaacagcgacctggaggatgacatcatcctgagcctgaatgaatag

SEQ ID NO: 181674 - DNA, 3237 bp, Artificial Sequence
  derived and/or modified sequence
gtgtgcatgcacccccacaacgtgctgagtgatgtggtgaactacaccctgtggctgatggagtgcagccacgccagcggctgctgccacgccaccatgttcttcagcatctgcttctccttccgggctgtgctggagctgtttgacagatatgatggcctgcggcggctggtgaacctgatcagcaccctggagatcctgaacctggaggaccagggcgccctgctgagtgatgatgagatctttgccagccggcagacaggcaagcacacctgcatggccctgaggaagtactttgaggcccacctggccatcaagctggagcaggtgaagcagagcctgcagaggacagaaggaggcatcctggtgcacccccagcccccctacaaggcctgcagctacacccatgagcagatcgtggagatgatggagttcctgattgaatatggccctgcccagctgtactgggagcctgctgaggtgttcctgaagctgagctgtgtgcagctgctgctgcagctgatcagcatcgcctgcaactggaagacctactatgccagaaatgacacagtgcgctttgccctggatgtgctggccatcctgactgtggtgcccaagatccagctgcagctggccgagagcgtggatgtgctggatgaagctggcagcacagtgtccacagtgggcatcagcatcatcctgggcgtggccgagggggagttcttcatccatgatgctgagatccagaagagcgccctgcagatcatcatcaactgtgtgtgtggccctgacaaccgcatcagcagcatcggcaagttcatcagcggcacccccaggaggaagctgccccagaaccccaagagcagcgagcacaccctggccaagatgtggaatgtggtgcagagcaacaacggcatcaaggtgctgctgagcctgctgagcatcaagatgcccatcacagatgctgaccagatccgggccctggcctgcaaggccctggtgggcctgagccgcagcagcacagtgcggcagatcatcagcaagctgcccctcttcagcagctgccagatccagcagctgatgaaggagcctgtgctgcaggacaagagaagtgaccacgtgaagttctgcaagtatgctgctgagctgattgaaagagtgtctgggaagcccctgctgattggaacagatgtgtccctggcccggctgcagaaggcagatgtggtggcccagagccgcatctccttccctgagaaggagctgctgctgctgatccggaaccacctgatcagcaagggcctgggggagacagccaccgtgctgaccaaggaggccgacctgcccatgacagctgccagccacagcagcgccttcacccctgtgacagctgctgccagccctgtgtccctgcccaggaccccccgcatcgccaacggcatcgccacccggctgggcagccacgccgctgtgggcgccagcgcccccagcgcccccacagcccacccccagccccggcccccccagggccccctggccctgcccggccccagctatgccggcaacagccccctgattggccgcatctccttcatccgggagcggcccagcccctgcaatggaaggaagatccgggtgctgcggcagaagagtgaccacggggcctacagccagagccctgccatcaagaagcagctggacagacacctgcccagcccccccaccctggacagcatcatcacagagtacctgcgggagcagcacgcccgctgcaagaaccctgtggccacctgcccccccttcagcctcttcaccccccaccagtgcccagagcccaagcagaggcggcaggcccccatcaacttcaccagccggctgaacagaagagccagcttccccaagtatggaggagtggatggcggctgctttgacagacacctgatcttcagccgcttccggcccatctctgtgttccgggaggccaatgaagatgaaagtggcttcacctgctgtgccttcagcgcccgggagcgcttcctgatgctgggcacctgcaccggccagctgaagctgtacaacgtgttttctggccaggaggaggccagctacaactgccacaacagcgccatcacccacctggagcccagcagagatggcagcctgctgctgaccagcgccacctggagccagcccctgagcgccctgtggggcatgaagtctgtgtttgacatgaagcacagcttcacagaggaccactacgtggagttcagcaagcacagccaggacagagtcatcggcaccaagggggacatcgcccacatctatgacatccagacaggcaacaagctgctgaccctcttcaacccagacctggccaacaactacaagaggaactgtgccaccttcaaccccacagatgacctggtgctgaatgatggagtgctgtgggatgtgcgcagcgcccaggccatccacaagtttgacaagttcaacatgaacatcagcggggtcttccaccccaacggcctggaggtgatcatcaacacagagatctgggacctgcggaccttccacctgctgcacacagtgcctgccctggaccagtgccgggtggtgttcaaccacactggaacagtgatgtacggggccatgctgcaggctgatgatgaagatgacctgatggaggagaggatgaagagccccttcggcagcagcttccgcaccttcaatgccacagactacaagcccatcgccaccattgatgtgaagaggaacatctttgacctgtgcacagacaccaaggactgctacctggccgtgattgagaaccagggctccatggatgccctgaacatggacacagtgtgccgcctgtatgaggtgggccggcagaggctggctgaagatgaagatgaggaggaggaccaggaggaggaggagcaggaggaggaggatgatgatgaagatgatgatgacacagatgacctggatgagctggacacagaccagctgctggaggccgagctggaggaggatgacaacaatgaaaatgctggagaagatggagacaatgacttcagccccagtgatgaggagctggccaacctgctggaggagggggaggatggagaagatgaagattctgatgctgatgaggaggtggagctgatcctgggggacacagacagcagtgacaacagcgacctggaggatgacatcatcctgagcctgaatgaatag

SEQ ID NO: 181675 - DNA, 3177 bp, Artificial Sequence
  derived and/or modified sequence
atgaccaccgtggtggtgcacgtggacagcaaggccgagctgaccactcttctagagcaatgggaaaaagaacatggatccggccaggatatggtgccgatccttactcggatgtcccaacttattgaaaaggagactgaagaataccgcaaaggtgatccggatcccttcgatgataggcaccctggtagagccgaccctgaatgcatgctgggccatctgctgcggattctgtttaagaacgacgacttcatgaacgctcttgtgaatgcctacgtcatgactagcagggagccccccctcaataccgccgcctgcaggctgttgctagacattatgccgggcttagagactgcagttgtcttccaagagaaggaagggatagttgagaacttgttcaagtgggctcgcgaagcagaccaacccctcagaacgtacagcacgggccttcttggaggggccatggagaaccaagatatagccgccaattacagggacgagaacagtcaacttgtggcgatcgttctccggcggctccgcgagctccagctccaggaggttgcgctcagacaggaaaacaagaggcctagcccccggaagttgtcgagtgaacctctgctgcctttggacgaagaggccgtggatatggactatggtgacatggctgtggacgacgcggaaattcagaaatcggctctacagattatcattaactgcgtgtgcgggccagataacaggataagctctatcggcaagtttatatctgggacaccacgaaggaaactgcctcaaaatccaaagtcatctgagcataccctggccaagatgtggaatgtagtgcagtccaataacggaatcaaggtcctactgtctctgctcagcatcaaaatgccaattacagacgctgaccagatacgagccctggcgtgcaaggctctcgttggactgagcagatcttctaccgtgcgtcaaatcataagcaaattgccgctattctcatcttgccaaattcagcagttgatgaaggaacccgtcctgcaagataagcgctccgaccatgtcaaattctgcaaatatgctgctgaacttatcgagcgggtcagtgggaaacccttgctgattggcacggacgtttccttggcaagattgcagaaagcagatgtggtagcacagagtcgcatctcatttcccgagaaagagctcttattactgataaggaaccacctgatttcaaaggggctcggagagaccgcaacggtgctcacaaaggaagccgacctgcccatgacagctgccagtcacagttctgcatttacaccggttactgcagctgccagtcccgtgtctctaccgcggactccccgcatagccaacgggatcgccaccaggttagggagccacgctgctgtcggtgccagtgcccctagtgcgccaacagcgcatcctcagcctcgccccccacaagggcccctggcactgccgggtccctcatatgcaggtaatagccctctcataggacgtattagcttcatcagggagagaccctcaccctgcaatggaaggaagatccgcgtgctgcgacaaaaatctgaccatggcgcatatagccagagtccagccatcaagaagcaactggacaggcacctgcccagtccaccgaccctggactccatcattacggaataccttagggagcagcacgcacggtgcaagaaccccgtggccacctgtcctcctttctcactctttactccacatcagtgtcccgaaccaaagcaacggagacaagcccccattaattttacatcgcgcttgaacagaagggcctcctttccaaagtatggcggtgtcgacggaggctgctttgatcgccacctgatcttttctaggtttcgtcccatctccgtgtttcgggaagccaacgaggatgagagcggctttacatgctgcgcattttctgctagagaacgctttcttatgctcgggacttgcacgggacagctcaagctatacaacgttttctctggtcaggaggaggcgtcttataactgtcacaattctgctataacacacctggagcctagcagagatggctccctactactgacttcagctacatggagtcagccactcagcgcactgtggggcatgaaaagtgtgtttgacatgaaacactctttcaccgaggaccattacgtggaattttcaaagcacagccaggaccgcgtgattgggaccaaaggcgacatcgcgcacatctacgatatacagacagggaataaattactgactctgtttaatcctgatctggcgaacaattataagaggaactgcgcgacattcaacccgacagatgaccttgttttgaacgacggcgtcttgtgggatgtacgctccgctcaggccatacataaatttgacaagttcaatatgaatatctctggtgtgttccacccaaatggtttggaggtcattatcaataccgaaatctgggatcttcgaaccttccacctgctacacactgtccctgccctagatcagtgccgcgtcgtgttcaatcacacaggcaccgtgatgtacggggccatgcttcaggctgacgacgaggacgatctcatggaggagagaatgaaatcccctttcggtagttcgttcagaacattcaatgctaccgattacaaacctatagccaccattgatgtcaaacgaaacatattcgacctgtgtacggataccaaagactgctacttagccgtgattgagaaccaggggtcgatggatgctttgaatatggatactgtctgtcgcctttacgaagtggggcggcagcgtctggccgaggacgaggacgaggaagaggaccaagaagaagaagagcaagaagaggaggacgacgacgaggacgacgacgacacagatgacctagatgagttggataccgatcagctgcttgaggcagaattggaagaagatgataataacgaaaacgcaggagaggatggagataatgatttctcacccagcgatgaagaattggctaaccttctcgaggaaggtgaagatggcgaggacgaagatagtgatgccgacgaggaagtggagttgatcctgggggatactgacagcagtgataattcggacctggaagacgatatcatcctgtctttaaacgagtag

SEQ ID NO: 181676 - DNA, 3237 bp, Artificial Sequence
  derived and/or modified sequence
gtgtgcatgcacccccacaacgtgctgagcgacgtggtgaactacactctgtggctgatggagtgcagtcacgccagcggctgctgccacgctaccatgttcttttctatctgcttcagctttcgggcagtcctcgagctattcgaccgctacgatggattacggcgcttggtgaacctgatttctacattggagattttgaatctcgaggaccagggtgctctcttgtctgacgacgaaatttttgccagccgccaaacggggaaacacacttgtatggctctgagaaagtattttgaggcccacctagctatcaagctggagcaggtcaagcagagtctccaacgtacggaaggtgggattctagtgcacccacagcccccatacaaggcgtgcagctatacacatgagcagatcgtagagatgatggaatttttgattgaatacggacctgcccaactttactgggagcctgcagaggtctttctgaagctttcttgtgtgcaacttctcctccagctgatatctatcgcctgcaattggaaaacctattatgcccgaaacgacacggtgaggtttgccctagacgtgctggcgattctcacagtggtcccgaagattcagctgcaattggcagaatcagtggatgttctcgacgaggctggtagcactgtgagcaccgtgggaattagcatcatcctgggcgtggccgaaggcgagtttttcatccatgatgcagagatccagaagtcagccttgcagataattattaactgcgtgtgtgggcctgacaaccgcattagctcaatcggaaagttcatatccggcacccctaggcgcaagttgccacagaacccaaaatccagtgagcacaccctggcaaagatgtggaacgttgtgcaatctaataatggcatcaaggtgctgctgtcattactgagtatcaagatgcctataaccgacgctgaccagatccgggctcttgcctgcaaggcactggttggactatcaaggtcctccacggttagacagatcatttcaaagcttcctctcttcagttcctgccagatccagcagctgatgaaggagccagtgctgcaggataaacggagtgaccacgttaagttttgtaagtacgcagctgagctgatagaacgggtttctggaaagcccttgctcataggcaccgacgtaagcttggccagactccagaaagcggacgtcgttgcccagagccgtatttctttccccgagaaggaacttctgcttctaatccgcaatcacctgatatctaagggccttggagaaaccgccacagtactgacgaaggaggccgatctccctatgactgctgcttcccatagcagtgccttcacaccggtgacggctgcagcgagccccgtgtctttgccacggaccccgcgaattgcaaacggcattgccacacgccttgggtcccacgccgccgttggcgcttcggcgccctctgcacctaccgcgcacccacaaccacgccccccccagggccctctggcccttcccgggcctagttatgctggcaattctccattaattgggaggattagctttatcagggagaggccctcgccctgtaatggccgcaagattcgggtcctgcggcagaagagcgatcatggcgcctatagccagtctcctgctattaaaaaacagctcgacagacacctccccagcccacccacactagactcaattatcacggaatatctgagagagcaacatgcaaggtgtaagaatcccgtcgctacatgtccccccttctccttgttcacaccacaccagtgtccagagcccaaacaaagacgtcaggctcccattaacttcacatcaaggcttaaccgtcgcgcttcatttcccaagtacggcggcgtagatgggggctgctttgataggcacctgattttctcaaggtttcggccgatcagcgtcttcagggaagccaacgaggatgaaagtggcttcacttgctgtgcattttccgcccgcgagcgtttcctgatgcttggtacctgtactgggcaactcaaattatacaatgtcttctctggtcaggaggaggcctcatataactgccacaacagcgccataacccaccttgagccaagccgtgacgggtctctcctgctgacaagtgctacctggtcgcagccacttagcgcgctatggggaatgaaatccgtttttgatatgaagcacagcttcacggaagaccactatgtcgagttcagtaaacacagtcaggatagagtcatcggaacaaagggcgatatagcccatatatacgatatacagactgggaacaagctcctgacactcttcaacccagacctagctaataattacaagcgcaattgcgccacattcaaccctaccgatgatctggttctcaatgatggggtcctctgggatgtaagatccgctcaagcaatccacaagttcgacaagttcaatatgaacatcagcggagtgttccatccaaatggactggaagttataatcaacacggagatttgggatcttaggacattccatcttctgcatacggttcccgccttggaccagtgtcgcgttgtctttaaccatacagggactgtcatgtacggagcgatgctgcaagctgacgacgaagacgatctgatggaggaaaggatgaaatctcctttcggtagtagctttcggacttttaatgccactgattataagccaattgctaccattgatgtgaagcggaacatctttgacctctgcaccgataccaaggactgttatctggcggtgattgagaaccaggggagcatggatgccctgaacatggacacagtttgtagactgtacgaagttggaagacaacgcctggccgaggacgaggacgaagaggaagaccaggaggaggaggaacaggaggaggaagacgatgacgaggatgacgatgacactgacgatctcgacgagttagacaccgaccagcttcttgaggccgaactggaggaagacgataataacgagaacgccggagaggatggtgacaatgacttctcgcctagcgatgaggagctcgcgaacttgttagaggagggagaagatggggaggatgaagactctgacgcagacgaagaagttgagctgattttaggcgataccgactcttcagataactccgatctcgaggatgacatcatcttatctctcaacgagtag

SEQ ID NO: 181677 - DNA, 3177 bp, Artificial Sequence
  derived and/or modified sequence
atgacaacggtggtggtacatgtagattccaaagcagagctcacaaccctgcttgaacagtgggagaaagagcatgggagtgggcaggatatggtccctatcctgaccaggatgagtcagcttatcgaaaaggagacagaagagtatcggaaaggtgatccggacccgttcgatgaccggcacccaggcagggcagaccctgagtgtatgctgggccacttgctacgaattttgtttaagaacgacgattttatgaatgccctggttaatgcatatgtgatgacatcccgcgagccccctctgaatactgcggcttgccggctgctgttggatatcatgcctggcctggagaccgctgtggtgtttcaggagaaggaaggcatcgtggagaacctgttcaaatgggcgcgagaggctgatcaacctcttaggacctattccacagggttacttggcggagcgatggagaaccaggacattgcagccaactatagggacgaaaacagtcagctggtcgctatcgtcctgcgacggcttcgagagctgcagctccaggaagtggccctgcggcaagagaacaaacgacctagccctaggaagctgtccagcgagccacttcttcccctggatgaagaagcagtcgacatggactatggggacatggcggtggacgacgctgaaatacagaaatcagccttgcagataataataaattgcgtctgtggccctgacaataggatatcctcaattggtaagtttattagcggcacaccccgtcgcaagctgcctcagaatcccaaaagcagtgagcacaccctcgcaaagatgtggaatgtggttcagtccaataatggaatcaaagtattgttgagcctgctgtcgatcaaaatgcctattaccgacgctgaccagattcgcgctttggcatgtaaggccctggtagggctgagtcggtcctcgaccgtgcgccaaattatctctaagctgccattattcagtagctgtcagatacagcaactgatgaaggaaccggtcttgcaagacaaaaggagcgaccatgtgaaattctgcaagtacgctgccgagctcatagaaagggtcagcggtaagcccctcctcatcggtaccgacgttagtctggccagactgcagaaagccgacgtcgtggcacagagtaggatctcttttcctgaaaaggagttactgctgctgatacgcaatcatcttattagcaagggactgggggaaacagctacagtcttaaccaaagaggcagatctcccgatgaccgccgcaagtcactcatctgcgttcacccctgtcacagctgccgcatctcctgtgagcttgccgagaacccctaggattgctaatggaatcgctactagactgggcagccacgcggctgtgggtgcaagtgctcctagtgccccaaccgcccatccccagcctagacctcctcagggcccactagcgcttcctggcccaagttacgccggaaattctcccttgatcgggaggatctcctttatccgggaacggccttctccgtgtaatggacggaagatccgagtgttgcggcagaagtccgatcatggcgcttacagccagtcaccagccataaagaaacagctcgataggcatctcccaagtccccctactctggatagtattatcaccgagtatctacgtgaacagcacgctaggtgcaaaaacccagttgccacctgcccaccatttagcttatttaccccacatcagtgtcccgaacccaagcagcgccgacaggctcctattaacttcacatcgcggctcaatcgcagggcttcgtttccgaagtacggtggcgttgatggcggatgctttgaccgccacctcatcttctctcggtttaggcctattagtgtctttagagaggctaacgaagatgagagcggttttacctgctgcgcattctccgctcgagagcggtttctgatgcttggcacctgtacaggacaacttaaactgtacaatgtcttttccggccaagaggaggcctcttacaattgtcacaatagcgccatcacacacctcgaaccgtccagagatggaagcttgctgctgactagtgcgacatggtcacaacccctaagtgccctgtggggaatgaaaagtgtctttgatatgaagcattcattcaccgaggatcactacgtggagttctctaaacattcccaggatagagtcatcgggaccaaaggtgacatagcccacatttacgatatacagactggcaacaagctcctgacgctcttcaaccctgacctcgctaacaattataaacgcaattgtgccactttcaatcccacagacgacctggtgctgaatgacggagtgctatgggacgtgagatccgcccaggcaatccacaagtttgataagtttaacatgaacatctcaggcgtattccaccccaatggtttggaggtgataatcaacaccgaaatctgggatcttaggacattccacttgctgcataccgtccccgcactggaccagtgtcgagttgtgttcaatcatacaggcactgttatgtacggtgccatgctccaggccgatgatgaggacgacctgatggaggagagaatgaaatccccgtttgggtcctcatttcgcactttcaacgcaacggattacaagcccatcgcgactatcgacgtgaaaaggaatatttttgatctgtgcaccgatacaaaagattgttatctcgccgtgattgagaatcaaggttcgatggacgcactcaacatggacacagtatgtaggttatacgaggtcgggcgacagaggctggctgaggacgaggatgaagaggaggatcaagaggaggaagaacaggaggaagaagatgacgacgaagacgatgatgacaccgacgacctcgacgagctggacactgaccagctcctggaggcagagctcgaggaggacgacaacaatgagaacgccggagaagatggcgataacgacttttctccgtctgatgaagaacttgctaacctgctggaggaaggggaggacggtgaagatgaagacagtgatgccgatgaagaggtggagctgatactgggggataccgacagctccgacaattcagatctggaagatgacattattctgtctctcaatgagtag

SEQ ID NO: 181678 - DNA, 4529 bp, Artificial Sequence
  derived and/or modified sequence
gtttgcatgcatccccacaatgttctgtctgatgtggtgaactataccctgtggttaatggagtgttctcatgcttcaggatgctgccatgctaccatgtttttttcaatttgcttctcatttcgggccgtcttggagctctttgaccgctatgatggtcttcgtcgtctggtgaacttgatcagtactttggagattctaaatttggaagatcagggtgcacttctgagtgatgatgaaatatttgctagccgccaaactgggaaacatacctgcatggccttgcgcaaatactttgaggctcacctggccattaaattggaacaagtgaagcagtcacttcagaggactgagggtggcattcttgtccacccacaacccccgtacaaggcatgctcatatactcatgaacagattgtggaaatgatggaatttttgatagaatatggcccagcgcagctatattgggaaccagctgaagttttcctcaaactttcttgtgtgcaactcttgttgcagcttatttctattgcctgcaattggaagacctattatgcaaggaatgacactgtgcgctttgctttggatgtcctggctattcttactgtggtgccaaaaatccagctccagttggcagaatcagtggacgtgttggatgaggctggatctacagtctctactgtaggtatcagcattattttgggagtggctgagggtgagttcttcatccatgatgctgaaattcagaagtcagcacttcagattatcatcaattgtgtgtgtggcccagataaccgaatatccagtattggtaaatttatctctggtactcctcggagaaagctgcctcagaaccctaaaagcagtgagcacaccctggccaagatgtggaatgtggttcagtccaacaacggcatcaaggtgctcctgtccttactgtccattaagatgcccatcacagatgcagaccaaatccgggccctggcctgcaaagccctagtgggcctgtctcgcagtagcactgtccggcagatcatcagtaaactgccccttttcagcagctgccagatccagcagctgatgaaggagcctgtgctgcaggacaagcgcagtgaccatgtcaagttctgcaagtatgctgctgaactcattgaacgggtgtcaggaaaaccacttctcattggcactgatgtttccctagcacgactgcagaaagcagatgttgttgcccagtcaaggatctccttccctgagaaagagctgcttttgttgatacgaaaccatcttatttctaaagggcttggagaaacagcaaccgtgctgacaaaagaggctgacctgcccatgactgctgcctcccattcttctgcctttaccccagtcactgctgctgcttctcctgtctctctaccccgaacccctcgtatcgctaatggcattgcaactcgtctgggcagccatgctgctgtgggtgcctctgcgccttctgcccctactgctcatcctcagccacggcccccccagggtccgctagctctgcccggcccatcttatgcaggcaactcccctttgattggtagaatcagttttatcagagagaggccatcaccctgcaatggcaggaaaatcagagtgttgcggcagaagtcggaccatggtgcctacagccaaagcccagccataaaaaaacagctggacagacatcttccttccccacctacgctggacagtataatcacagagtatcttagagaacaacatgctcgctgcaagaatccagttgccacctgcccacctttctccctctttactcctcaccaatgtcctgagccaaaacagaggcggcaagcgccaataaactttacgtcaaggctaaaccgcagggcatcatttccaaagtatggaggggtggatggcggatgctttgataggcaccttatctttagcagattccgtcctatttcagtgttccgggaagccaatgaagatgagagtggcttcacctgctgtgcattctcagcacgggagcggttcctgatgcttggcacctgcacagggcagctgaagctctataatgtgtttagtggacaggaggaggccagctataactgtcacaactcagccatcacacatcttgaaccttccagggatgggtccttgctgctgacatctgctacttggagccagcctttgtctgcactttggggaatgaagtcagtatttgatatgaagcattccttcacagaagatcactatgttgagttcagtaagcactcccaggatcgggtcatcggcacaaaaggagacattgcccacatttatgatattcagactggcaacaagctgttgactctgtttaacccagatcttgccaacaactacaagaggaactgtgccacctttaatcctacagatgatcttgtcttaaatgatggcgtcctctgggatgtccgctctgcacaggccatccacaagtttgacaagttcaatatgaacatcagtggtgttttccatccaaatggactggaggtgatcattaatactgagatttgggaccttcgaacttttcatcttttgcatactgttcccgctctggatcagtgtcgcgtggtgttcaatcacacgggaacagtgatgtatggagctatgttgcaggcagatgatgaagatgacttaatggaagagaggatgaaaagcccctttgggtcatccttccgaacatttaatgcaactgactacaaacctatagcaaccattgatgtgaaacggaacatctttgacctgtgtacagacaccaaagactgctatcttgctgtcattgagaatcaaggcagcatggatgccctgaacatggacacagtatgcaggctgtatgaagtgggcaggcagcgtctggcagaggatgaggatgaagaggaggaccaggaagaggaagaacaggaggaagaagatgatgatgaagatgatgatgacaccgatgatttagatgagcttgacactgaccagttgctggaggcggagttggaggaggacgacaataatgagaacgcaggggaagatggggacaatgacttctctccctctgatgaggagctagcaaaccttctagaggagggagaggacggggaggatgaagactctgatgcagatgaggaggtggaactgatcctgggggacactgacagctctgacaactctgatttggaagatgacatcatcttatctctgaatgagtgaggagccatcactgcttggaagagattcttggcagagagaagaggggacaaatttggttgtgaagtaaacaagaaacacaagacggctaaaactctccaggggcaggtaaagccctgctgggctcagaagcactatagaatttgctgtacacactgaagtgggtctgtgtcacacaggtatttcttggtcctctggagagcagaggactcactcagctctttgcttcatgcctcgctttaatggtagtaaacacttaaccagtggaatagtctgactgctggtactgatggcatcagaagaaaacaggttaacaatcaagtagtgaaagcactatattctagtcattaactcaacggagccagtctcaactctgctgggagcacccacaggtctctgtgggggagacagggactataacagggaggcagaattcaggttggcttgacaacacaccttaggaacatgtgctaaggggctaaggaggcatcagctgtcttccttattctaccagggctgaaaatcggagtcacttaggaggcagcatgagaacagtggcacaccaccagtgaggcacatgttgcctttttgtctttaagcaacaccttagacagggcctgaaccctgggtgggggcactggatgcctgaagtaagtaagttttctcagtggggcagtctcataaaatcaccaggacattgaccacctgacctcccctaactagtgctggccaaggcctgagagttcacagaacctgctaggtcttaagagccaaaggaaggaagtggttgagggccaggaaagagaaggaatgtcatgccagggtgttactcctcaccaaaacttggcagttctttttggggccatgggacacctttctctgaagaggggttggataaggcaaaggttgaagtgtcttctctaggcacgttttctagcatgtttccttttacttggttctgtctcacaaagctgggaggtagatgattcttccgggtcctgagcacctgcttcatgaaggaagataggtagcccagagaagaagttttggacttaacaacataccaaggcagctctggcctgtgactcaggcgtttgttggagagctgcaggaaaaccactgcagtgtgcctgcaacaggacaagacccactcctgtttctggcggtaccagctaccctggaatggtggcgtgtcctgctgtacccaactgacttgcttaggtacctggcagctgtgaccacagctcaagtaaaaaaacaaaaacaggcaaataaataaacatgcttaacatgtc

SEQ ID NO: 181679 - DNA, 3237 bp, Artificial Sequence
  derived and/or modified sequence
gtctgcatgcacccgcacaatgtgttatcagatgtggtgaattacaccctgtggttgatggaatgttctcacgcgtctggatgttgtcacgcaacaatgttcttctctatctgttttagttttagggcagtgcttgagctcttcgatcgctatgatggactgcggaggctggtgaacctaatcagcactttggaaattttaaacttggaggaccagggggctctcctgtcagatgatgagattttcgcatctagacagactgggaagcatacttgcatggctctgcggaagtactttgaggcacatctggcaataaaactggagcaggtcaaacagtcactgcagaggactgaggggggaattcttgtgcacccccaacccccatataaggcttgttcctatacgcacgaacagattgtggagatgatggaattcttgatcgaatacggacccgctcagctctactgggaaccagctgaggttttcttgaaacttagctgtgtgcagctgctcctgcagctgatctctatcgcctgcaactggaaaacgtattacgcccgtaatgataccgtgaggttcgccttagacgtattggcaattctgacagtagtgcctaaaatccagctccagctggcagagagcgtagatgttctggatgaagcagggtccaccgtgagcaccgtgggcatcagtataatcttaggggtggctgagggagagttcttcatccatgacgctgagatccagaaaagtgccctgcagatcattatcaactgcgtgtgcggccctgataacaggatctcttccattggaaagtttattagtggcaccccgcgacggaaattaccgcagaatcccaaatcgagcgagcatacccttgctaagatgtggaatgtggttcagtccaataatgggataaaagtcctcctgtcactcctatccataaagatgccaattactgatgctgaccagatacgagcactggcctgcaaagcactcgtaggcctgagccgttcgtctactgtgcgccagatcatatctaaattaccgctctttagtagctgtcagatccagcagttgatgaaggagcccgtgctgcaggacaaaaggtcagatcacgtgaagttctgtaaatacgctgctgagcttattgagcgggtcagcgggaaaccactgcttataggtacagatgtttctctagcccgactccagaaggcggatgtggtggcccaatcccgcatcagctttccagaaaaggagcttctcttgctgatccggaatcacttgatcagtaagggcctgggagagactgccacggtgctcactaaagaggccgatctgccaatgaccgccgctagccattctagcgcctttaccccggtgactgccgcagcctcgccagtgtctctgcctcgaaccccaagaattgccaacggaattgctaccagactgggctctcatgcagccgttggagcttcagccccttcagcacctaccgcccacccccagcccagaccaccacagggccctttggcccttccgggtccttcctatgcaggcaacagtcctctgatcgggcgtatctcattcatcagggaacggccatccccgtgcaacggtcggaagattagagtactgcgccaaaagagtgaccacggtgcatattcgcagtctcccgctattaagaagcagctggaccggcatttgcccagtcctcctactttggattccattatcacggaatacctgcgagagcagcatgccagatgcaagaaccccgtcgccacctgccctccgttctcactgttcaccccccatcagtgccccgaacctaagcagcgacggcaagcccctattaatttcacctccaggctcaataggcgcgcttcttttcccaaatacgggggagttgatggtggctgtttcgataggcatcttatctttagtagattccgcccaatctccgtgtttagggaggcaaacgaagacgagtctgggtttacgtgctgcgctttctctgcgcgagaacgattcctcatgctgggcacctgcaccggccagttaaagctgtataatgtcttttctgggcaggaggaggctagctataactgtcacaactcagcaatcacccatctcgaaccctctagagacgggagtctcctgttgacttctgcaacgtggtcccaaccgttatctgcactctgggggatgaagtccgtgttcgatatgaaacatagctttactgaggaccattatgtcgagttctccaaacatagccaggacagggtaatcggcaccaaaggggatatcgcccatatttacgacattcagacaggcaataagctgcttaccttatttaaccctgatctggccaataattataaacgaaactgcgctactttcaatcctacagacgatcttgtcctcaatgatggggtcttgtgggacgtgcggagcgcccaggcaattcacaaattcgacaagttcaacatgaacattagcggcgttttccatcctaatggcttagaagtgattatcaacactgagatctgggacttgcgtacattccacttgctgcacaccgtgccagctctcgaccaatgtcgggtggtctttaatcacactgggacagtaatgtatggggctatgctgcaggcagatgacgaagacgatttgatggaagaacgcatgaagagtcctttcggatccagctttcggactttcaatgccacagattataagcctattgctacaatagacgtgaaacgtaatatcttcgatttgtgtaccgatacaaaggactgctatctcgccgtcattgagaatcaggggagtatggacgcgctgaacatggacactgtgtgtcgattgtatgaggtcggccgacagcggctggcagaagacgaggatgaggaagaggaccaagaggaagaggagcaagaagaagaagacgatgacgaggacgacgatgacacagacgacttggacgagctcgacactgatcaattacttgaagccgaactcgaagaagacgataacaacgaaaacgccggagaagacggcgacaacgacttttcccccagcgacgaagagctcgcgaatttgctcgaggaaggagaagacggagaggacgaggactccgatgccgatgaggaagtcgagctgatactcggggacacagactcttccgacaacagtgatctggaagacgacattatcctgtctttgaatgaatag

SEQ ID NO: 181680 - DNA, 4524 bp, Artificial Sequence
  derived and/or modified sequence
atgaccaccgtggtggtgcacgtggacagcaaggccgagctgaccaccctgctggagcagtgggagaaggagcacggcagcggccaggacatggtgcccatcctgaccagaatgagccagctgatcgagaaggagaccgaggagtacagaaagggcgaccccgaccccttcgacgacagacaccccggcagagccgaccccgagtgcatgctgggccacctgctgagaatcctgttcaagaacgacgacttcatgaacgccctggtgaacgcctacgtgatgaccagcagagagccccccctgaacaccgccgcctgcagactgctgctggacatcatgcccggcctggagaccgccgtggtgttccaggagaaggagggcatcgtggagaacctgttcaagtgggccagagaggccgaccagcccctgagaacctacagcaccggcctgctgggcggcgccatggagaaccaggacatcgccgccaactacagagacgagaacagccagctggtggccatcgtgctgagaagactgagagagctgcagctgcaggaggtggccctgagacaggagaacaagagacccagccccagaaagctgagcagcgagcccctgctgcccctggacgaggaggccgtggacatggactacggcgacatggccgtggacgtggtggacggcgaccaggaggaggccagcggcgacatggagatcagcttccacctggacagcggccacaagaccagcagcagagtgaacagcaccaccaagcccgaggacggcggcctgaagaagaacaagagcgccaagcagggcgacagagagaacttcagaaaggccaagcagaagctgggcttcagcagcagcgaccccgacagaatgttcgtggagctgagcaacagcagctggagcgagatgagcccctgggtgatcggcaccaactacaccctgtaccccatgacccccgccatcgagcagagactgatcctgcagtacctgacccccctgggcgagtaccaggagctgctgcccatcttcatgcagctgggcagcagagagctgatgatgttctacatcgacctgaagcagaccaacgacgtgctgctgaccttcgaggccctgaagcacctggccagcctgctgctgcacaacaagttcgccaccgagttcgtggcccacggcggcgtgcagaagctgctggagatccccagacccagcatggccgccaccggcgtgagcatgtgcctgtactacctgagctacaaccaggacgccatggagagagtgtgcatgcacccccacaacgtgctgagcgacgtggtgaactacaccctgtggctgatggagtgcagccacgccagcggctgctgccacgccaccatgttcttcagcatctgcttcagcttcagagccgtgctggagctgttcgacagatacgacggcctgagaagactggtgaacctgatcagcaccctggagatcctgaacctggaggaccagggcgccctgctgagcgacgacgagatcttcgccagcagacagaccggcaagcacacctgcatggccctgagaaagtacttcgaggcccacctggccatcaagctggagcaggtgaagcagagcctgcagagaaccgagggcggcatcctggtgcacccccagcccccctacaaggcctgcagctacacccacgagcagatcgtggagatgatggagttcctgatcgagtacggccccgcccagctgtactgggagcccgccgaggtgttcctgaagctgagctgcgtgcagctgctgctgcagctgatcagcatcgcctgcaactggaagacctactacgccagaaacgacaccgtgagattcgccctggacgtgctggccatcctgaccgtggtgcccaagatccagctgcagctggccgagagcgtggacgtgctggacgaggccggcagcaccgtgagcaccgtgggcatcagcatcatcctgggcgtggccgagggcgagttcttcatccacgacgccgagatccagaagagcgccctgcagatcatcatcaactgcgtgtgcggccccgacaacagaatcagcagcatcggcaagttcatcagcggcacccccagaagaaagctgccccagaaccccaagagcagcgagcacaccctggccaagatgtggaacgtggtgcagagcaacaacggcatcaaggtgctgctgagcctgctgagcatcaagatgcccatcaccgacgccgaccagatcagagccctggcctgcaaggccctggtgggcctgagcagaagcagcaccgtgagacagatcatcagcaagctgcccctgttcagcagctgccagatccagcagctgatgaaggagcccgtgctgcaggacaagagaagcgaccacgtgaagttctgcaagtacgccgccgagctgatcgagagagtgagcggcaagcccctgctgatcggcaccgacgtgagcctggccagactgcagaaggccgacgtggtggcccagagcagaatcagcttccccgagaaggagctgctgctgctgatcagaaaccacctgatcagcaagggcctgggcgagaccgccaccgtgctgaccaaggaggccgacctgcccatgaccgccgccagccacagcagcgccttcacccccgtgaccgccgccgccagccccgtgagcctgcccagaacccccagaatcgccaacggcatcgccaccagactgggcagccacgccgccgtgggcgccagcgcccccagcgcccccaccgcccacccccagcccagacccccccagggccccctggccctgcccggccccagctacgccggcaacagccccctgatcggcagaatcagcttcatcagagagagacccagcccctgcaacggcagaaagatcagagtgctgagacagaagagcgaccacggcgcctacagccagagccccgccatcaagaagcagctggacagacacctgcccagcccccccaccctggacagcatcatcaccgagtacctgagagagcagcacgccagatgcaagaaccccgtggccacctgcccccccttcagcctgttcaccccccaccagtgccccgagcccaagcagagaagacaggcccccatcaacttcaccagcagactgaacagaagagccagcttccccaagtacggcggcgtggacggcggctgcttcgacagacacctgatcttcagcagattcagacccatcagcgtgttcagagaggccaacgaggacgagagcggcttcacctgctgcgccttcagcgccagagagagattcctgatgctgggcacctgcaccggccagctgaagctgtacaacgtgttcagcggccaggaggaggccagctacaactgccacaacagcgccatcacccacctggagcccagcagagacggcagcctgctgctgaccagcgccacctggagccagcccctgagcgccctgtggggcatgaagagcgtgttcgacatgaagcacagcttcaccgaggaccactacgtggagttcagcaagcacagccaggacagagtgatcggcaccaagggcgacatcgcccacatctacgacatccagaccggcaacaagctgctgaccctgttcaaccccgacctggccaacaactacaagagaaactgcgccaccttcaaccccaccgacgacctggtgctgaacgacggcgtgctgtgggacgtgagaagcgcccaggccatccacaagttcgacaagttcaacatgaacatcagcggcgtgttccaccccaacggcctggaggtgatcatcaacaccgagatctgggacctgagaaccttccacctgctgcacaccgtgcccgccctggaccagtgcagagtggtgttcaaccacaccggcaccgtgatgtacggcgccatgctgcaggccgacgacgaggacgacctgatggaggagagaatgaagagccccttcggcagcagcttcagaaccttcaacgccaccgactacaagcccatcgccaccatcgacgtgaagagaaacatcttcgacctgtgcaccgacaccaaggactgctacctggccgtgatcgagaaccagggcagcatggacgccctgaacatggacaccgtgtgcagactgtacgaggtgggcagacagagactggccgaggacgaggacgaggaggaggaccaggaggaggaggagcaggaggaggaggacgacgacgaggacgacgacgacaccgacgacctggacgagctggacaccgaccagctgctggaggccgagctggaggaggacgacaacaacgagaacgccggcgaggacggcgacaacgacttcagccccagcgacgaggagctggccaacctgctggaggagggcgaggacggcgaggacgaggacagcgacgccgacgaggaggtggagctgatcctgggcgacaccgacagcagcgacaacagcgacctggaggacgacatcatcctgagcctgaacgagtag

SEQ ID NO: 181681 - DNA, 4524 bp, Artificial Sequence
  derived and/or modified sequence
atgaccacagttgtagtccacgtggatagtaaggctgaactgaccactctgctcgagcagtgggaaaaagagcacggctccgggcaggacatggtacctattttaactagaatgtcacagctcatcgagaaggagacggaggaatataggaagggtgatcctgatccattcgatgacaggcaccccgggcgagccgacccagagtgcatgctcggccacctcttaaggattctattcaagaatgatgactttatgaacgccctggtgaatgcttacgttatgacttctagggaaccccccctgaataccgccgcctgtagacttttgcttgacattatgccagggttggaaactgccgtggtgttccaagagaaggagggcattgtcgaaaatctctttaagtgggcccgcgaagctgatcagcccctgcgcacctattcaactgggctcttgggcggagccatggaaaaccaggacatagccgcaaactacagggacgagaacagccagttggtagcaattgtcctgcgccgtttacgcgaactgcagctgcaggaggtcgccttgaggcaggaaaacaaaaggccttccccgcgtaaactcagttccgagccgctgctgcctttagatgaggaagcagtagatatggactacggtgatatggctgtcgacgtggtggacggagatcaggaagaagcttcgggcgatatggaaatctcattccacctggacagcggccacaagacttctagtcgtgtgaactctaccaccaaaccagaagatgggggactcaagaagaataagagcgccaagcagggtgacagggagaatttccgcaaagcaaagcaaaaacttggcttcagttcctcagatccagacaggatgttcgttgagctgtctaattcgagttggtcggaaatgtccccgtgggttatcggaacaaactacaccctatatccaatgacccccgccattgaacagaggctgattctgcagtacctcacaccactgggcgaatatcaggagctactgcctattttcatgcagctcggctctagagagctgatgatgttttatatagacctcaaacagactaatgacgtcttattgacgttcgaagctctgaaacatctggcctctctactcttgcacaataagttcgcaacagagttcgtagcacatggtggggtgcagaaattgttggagatcccacgcccgtcgatggccgccacaggggtatcaatgtgtctatactacctaagctataaccaggatgccatggaacgagtatgcatgcatccacataatgttctatcggacgttgtcaattatacattatggctcatggaatgcagccatgcgagcggttgttgtcacgcaaccatgttctttagtatctgctttagctttagagcagtgctggagttgtttgatagatatgatgggctgaggaggctagttaatctcatctccacgctggagatcctgaatcttgaggaccaaggagctttgctgtctgatgacgaaatattcgcatccaggcagactggcaagcatacttgcatggctctccggaaatactttgaagcgcatttggcaataaagctcgaacaggtgaagcagtctctgcaacggaccgagggaggaatccttgtgcacccacagcccccctataaggcatgctcatatactcatgagcagatagtggagatgatggagtttctaatcgagtatggtcctgcacagttatactgggagcccgccgaggtgttcctcaaattaagctgcgtgcagctgctgctgcagctcatatctatcgcttgtaattggaagacatactacgcgagaaatgacaccgtccgtttcgccctggacgtcctcgctattcttacagtggtacctaaaatccagctccagctcgccgagtcagttgacgtgttggacgaagcaggctctactgtgtccaccgtcggcatttctatcatcctgggcgtcgccgagggggagttctttattcatgatgcagaaatccaaaagagtgccctccaaatcatcataaattgcgtgtgtggccctgataatcgtatcagttccatcgggaagttcatttccggaacaccccgccgaaagctcccccaaaatcccaagtcttccgaacatacactggctaaaatgtggaatgtggtgcagtccaacaacggtatcaaggtactgctgagtctactttcgattaagatgcccataactgacgctgatcaaataagggcactggcttgcaaagctcttgtcgggctctcacggtcgtctaccgtgagacagattatatcaaagcttccattattcagctcctgccagattcagcagctaatgaaggaaccagtgctgcaagataagcgcagcgaccatgttaaattttgtaagtacgcagcagagttgattgaacgagtctcagggaagccccttctgattgggaccgacgtgtccttagccagactgcagaaggcagacgtcgtggcccagagtcgcatttcttttcccgaaaaggaactccttctgctgattcggaatcacctcatcagcaagggcctcggcgagactgcaactgtattgaccaaagaggccgacctgcctatgaccgccgcgtcacacagtagcgcttttacacctgtgaccgccgctgccagtcctgtgagccttcctaggactccccgtattgccaacggtattgccacacgactggggtcgcatgctgcggtcggcgcctcagccccgtccgcccctacagcgcatcctcagccacgaccgccccagggccctttggccctcccgggaccttcttacgcaggtaatagccctctgatcgggcggatttccttcatccgagaacggcctagcccatgcaacggacgcaagatcagggtccttcggcagaagtccgaccatggcgcttattcacagtctcctgcaatcaaaaaacaacttgatcgacatctaccatcacctccaacactagacagtattataacagaatacctgcgggaacagcatgcaaggtgtaaaaacccagttgctacatgtcccccattcagtctgtttacacctcaccagtgtcccgaacccaaacaacggcgtcaggccccaataaactttacttccagacttaaccggagagctagcttccccaagtacggcggggtcgacggggggtgtttcgacagacatctcattttttctcgattcaggcccatctcggtatttagggaagcgaatgaggacgagtccggttttacttgttgcgccttcagcgctcgcgagcggttcctcatgctggggacttgtacagggcagcttaagctgtacaacgttttttctggccaggaggaagcaagctataattgccacaatagtgccataacccacctggagccgtcgagagatggttcactcctgctcacttcagctacatggtcacaacccctcagcgcattgtggggcatgaagagcgtgttcgatatgaagcactcatttaccgaggatcattacgtcgaattctccaagcacagtcaggaccgggttataggtacgaagggagacatcgcccacatatacgatattcagaccggcaataaactgctcaccctgttcaacccagacctggccaataactataagcgaaactgcgcaacattcaaccctaccgatgacctggtgctcaatgatggggtgctgtgggatgtccgatctgcacaggccatacataaatttgataaatttaacatgaatatctctggcgtctttcatcccaatggtctcgaggtcataatcaacaccgagatctgggacctccggacattccacttgcttcatacagtccccgccctcgaccagtgtcgcgtggtcttcaatcatacgggtaccgttatgtacggcgcaatgctacaggcggatgatgaggatgacctgatggaggaaaggatgaaatctccattcggcagctcattcaggacttttaacgctactgattataagccgatcgcgaccatagatgtgaagagaaacatttttgacctctgtacagatacgaaagactgttatctggctgtcattgagaatcagggaagcatggacgcattgaatatggacactgtctgcagattgtacgaggttggacggcagagactggctgaagacgaggacgaagaggaagaccaagaggaggaggagcaggaggaggaagacgacgatgaggacgacgatgacacagacgacctggatgagctcgacacagatcagctactggaggcggaactggaggaggacgataacaatgagaacgccggcgaggatggggataatgactttagcccatctgatgaagaattagctaatctactcgaagaaggagaggatggagaggacgaggacagtgatgctgacgaagaggttgagctgatcttgggcgacacggacagctcagataattctgacctggaggacgatatcatcctctccctcaacgagtag

SEQ ID NO: 181682 - DNA, 4524 bp, Artificial Sequence
  derived and/or modified sequence
atgacaacagttgtcgttcatgtggacagtaaagccgaactgacaacactcctggagcagtgggagaaggagcacggttcaggacaggatatggtgcccattcttaccagaatgtctcaactcatagagaaagaaaccgaggagtaccgaaaaggggatccagacccattcgatgatagacatccaggtagagcagaccccgagtgcatgctgggtcatttgctgcggattctcttcaaaaacgacgatttcatgaacgccctggtcaacgcctacgtcatgacgagcagagaaccccctcttaacactgccgcgtgcagactcttattggacatcatgcctgggctcgagacagccgttgtgtttcaggagaaagaaggcatagttgaaaacctgttcaaatgggcccgcgaggccgatcagcccctgcgcacatactctaccggtctgctcggaggcgcaatggagaaccaggacatcgctgcaaactatagagacgagaactcacagttggtggccatcgtgttacgtagactgcgcgaacttcagctacaggaagttgcattgcgtcaagaaaacaagagaccgtcaccccgcaaattgtcatccgaacctctcctgcctctcgacgaggaggccgtggacatggactatggcgacatggctgtggatgtggtcgatggcgaccaagaggaggcaagcggggacatggaaattagtttccacctagactctggacacaaaacatcatcacgcgttaactcaaccacaaaaccagaggatggtggactcaagaaaaacaagagtgcaaagcagggggacagagagaactttcggaaggccaaacagaagctcggcttcagcagcagtgatccagacagaatgttcgtagaacttagtaactcttcgtggtcagaaatgagtccgtgggttattgggaccaactacactctttatcccatgacaccagccatcgagcagcgactcatattgcaatacctcaccccactgggggagtatcaggagctgctgcccattttcatgcagctaggatcccgtgagcttatgatgttttacattgacctcaagcaaaccaacgatgtcctgttaacctttgaggcactgaagcacctggcaagcttgcttttgcacaacaaattcgctacggaattcgtggcccatggaggcgtgcagaagctactggaaatcccccgcccatccatggccgccacaggcgtctccatgtgcctctactatctgtcctacaatcaggacgctatggagcgcgtttgcatgcatccacacaacgttctgagtgatgtagtcaactacaccttatggcttatggaatgctcccatgcctccggctgttgccatgccactatgttcttctctatctgtttcagcttcagggccgtgttggagctcttcgatcgctacgatggactgaggcggctggtgaatctgatttctacacttgagatcctgaacctggaagaccagggagcccttctgagtgacgatgagatcttcgcgagccgtcaaacaggtaaacatacctgtatggccttgcgcaagtacttcgaagcacacttggctatcaagctggagcaggtgaaacagtccctccagagaactgaggggggaatactcgtgcaccctcaaccaccttacaaagcttgcagctatactcacgagcagatcgttgagatgatggagtttttgattgaatacggccctgcacagctgtactgggagcccgccgaggtgtttctgaagctgtcctgcgtgcagctcctgctccagctcatatcaatcgcatgtaattggaagacctattacgcaagaaacgataccgtacgctttgcccttgatgttctggcaatccttaccgtcgtccctaaaattcagttgcagctggccgaaagcgtagacgtgctcgatgaggcgggcagcaccgttagtaccgttgggatttctatcatactaggagtggcagaaggagagttcttcatccatgacgccgagattcagaaaagtgccctccagatcattattaattgtgtatgcggccctgataatcggatttcatccatcggcaaatttatatcagggaccccacgccgcaaactaccccagaaccccaaaagttctgaacacacattagctaagatgtggaatgtagttcaaagtaacaacggaatcaaagttctgctcagtctgctgtccattaaaatgccaatcacagatgccgaccagatcagggccctggcttgtaaagccctcgtcggcctttcaaggagtagtaccgttcgacaaatcatatcaaagctaccactgttttccagttgtcagattcagcaacttatgaaagagcccgttctgcaggataagaggagcgatcatgtgaaattctgcaagtatgcagcagagctcatcgaacgagtctcgggcaagccattgctgataggcaccgatgtctcccttgctcggctgcaaaaggccgacgtagtagcccagagccgcatctctttccccgaaaaagaactgctattgctgatccggaaccatctaattagcaaaggcctcggcgagacggccaccgtcttgactaaggaagccgatctgcccatgacggctgccagtcacagtagtgcctttacccctgtgacggccgcagcctctccagtttcactgcctcgcactccaagaattgctaatggaattgccactcgtttgggttcccacgctgctgtaggggcttcagccccaagtgcgcccactgctcacccacagcctaggccgccacagggtcctctggctcttcccggcccctcgtatgctggtaactcacccctaattgggcgtattagttttattagggagcgtccctccccctgtaacggccgtaaaatacgtgtgctgcgccagaaaagtgatcacggggcctattcacagagtccagcaatcaagaagcagttggatcggcacctgccgagcccgccaactcttgatagcatcataactgaataccttagggagcagcatgctcggtgcaaaaaccccgtggctacgtgccccccattctctctattcactccccaccagtgtccagagccaaaacagaggaggcaagctccgattaacttcactagccgactgaacagacgcgcctcatttcctaagtatggtggtgtcgatggaggctgctttgatcggcatcttatctttagcagatttcgtcccatatccgtcttccgcgaggcaaacgaggatgaaagcggattcacctgttgcgcatttagtgcccgcgagaggttcctgatgctcggaacttgcaccggtcaattgaagttgtataacgtatttagtggtcaggaggaggcctcatacaattgtcacaatagcgcaattactcacctggaaccctccagggacggcagcttattattgacatctgctacctggtcccagcccctgagtgcgctttggggcatgaaatccgtcttcgatatgaaacactctttcacggaagaccactatgtcgaatttagtaagcacagccaagacagggtcattggtaccaaaggtgacattgcacatatctatgatatacaaacaggcaacaaactactcacgcttttcaaccctgatctggccaataactacaaaagaaactgtgcaacttttaatcctaccgacgacctggtactaaacgatggcgtgctgtgggatgttcggtcagctcaagcaattcataaattcgataagtttaatatgaatatctccggtgtttttcatccaaatggcctggaggtgattattaataccgagatctgggatctccgtacattccatctgctgcatactgttcctgccctggatcaatgcagagtcgtttttaatcataccggaactgtaatgtatggcgctatgctgcaggccgacgatgaggacgacctcatggaagaaagaatgaagagcccattcgggtcttcatttcgcacgtttaatgcaactgactataaaccaatcgctacaatagacgtaaaacgcaacatcttcgacctttgcactgacactaaagattgttatttagctgtgatagagaatcagggttctatggacgcactcaatatggacactgtctgcagactgtatgaagtgggtagacagcggctcgccgaggacgaagacgaagaggaggatcaggaggaggaagagcaagaggaagaagatgacgatgaggacgacgacgatacagatgatttagatgagctggatactgaccaactgttggaggctgagcttgaagaggacgacaacaacgagaatgccggagaagatggggataatgactttagccccagtgatgaggagctggctaacctgttagaggagggcgaagatggcgaggacgaggatagcgatgccgacgaggaagtggagctgattcttggggatacagattccagcgataattccgatttggaagatgacataatactgtctcttaacgaatag

SEQ ID NO: 181683 - DNA, 4524 bp, Artificial Sequence
  derived and/or modified sequence
atgaccaccgtggtggtgcacgtggacagcaaggccgagctgaccaccctgctggagcagtgggagaaggagcacggcagcggccaggacatggtgcccatcctgaccaggatgagccagctgattgagaaggagacagaggagtacagaaaaggagaccctgacccctttgatgacagacaccctggccgggctgaccctgagtgcatgctgggccacctgctgcgcatcctcttcaagaatgatgacttcatgaatgccctggtgaatgcctacgtgatgaccagccgggagccccccctgaacacagctgcctgccgcctgctgctggacatcatgcctggcctggagacagctgtggtgttccaggagaaggagggcatcgtggagaacctcttcaagtgggcccgggaggccgaccagcccctgcggacctacagcacaggcctgctgggcggggccatggagaaccaggacattgctgccaactacagagatgagaacagccagctggtggccatcgtgctgcggcggctgcgggagctgcagctgcaggaggtggccctgcggcaggagaacaagaggcccagccccaggaagctgagcagcgagcccctgctgcccctggatgaggaggccgtggacatggactatggagacatggctgtggatgtggtggatggagaccaggaggaggccagcggggacatggagatctccttccacctggacagcggccacaagaccagcagccgggtgaacagcaccaccaagccagaagatggcggcctgaagaagaacaagagcgccaagcagggcgaccgggagaacttcaggaaggccaagcagaagctgggcttcagcagcagtgaccctgacaggatgtttgtggagctgagcaacagctcctggagcgagatgagcccctgggtgattggcaccaactacaccctgtaccccatgaccccagccatcgagcagaggctcatcctgcagtacctgacccccctgggggagtaccaggagctgctgcccatcttcatgcagctgggcagccgggagctgatgatgttctacatcgacctgaagcagaccaatgatgtgctgctgacctttgaggccctgaagcacctggccagcctgctgctgcacaacaagtttgccacagaatttgtggcccacggcggcgtgcagaagctgctggagatcccccggcccagcatggccgccactggagtgtccatgtgcctgtactacctgagctacaaccaggatgccatggagcgggtgtgcatgcacccccacaacgtgctgagtgatgtggtgaactacaccctgtggctgatggagtgcagccacgccagcggctgctgccacgccaccatgttcttcagcatctgcttctccttccgggctgtgctggagctgtttgacagatatgatggcctgcggcggctggtgaacctgatcagcaccctggagatcctgaacctggaggaccagggcgccctgctgagtgatgatgagatctttgccagccggcagacaggcaagcacacctgcatggccctgaggaagtactttgaggcccacctggccatcaagctggagcaggtgaagcagagcctgcagaggacagagggcggcatcctggtgcacccccagcccccctacaaggcctgcagctacacccatgagcagatcgtggagatgatggagttcctgattgaatatggccctgcccagctgtactgggagcctgctgaggtgttcctgaagctgagctgtgtgcagctgctgctgcagctgatcagcatcgcctgcaactggaagacctactatgccagaaatgacacagtgcgctttgccctggatgtgctggccatcctgactgtggtgcccaagatccagctgcagctggccgagagcgtggatgtgctggatgaggccggcagcacagtgtccacagtgggcatcagcatcatcctgggcgtggccgagggggagttcttcatccatgatgctgagatccagaagagcgccctgcagatcatcatcaactgtgtgtgtggccctgacaaccgcatcagcagcatcggcaagttcatcagcggcacccccaggaggaagctgccccagaaccccaagagcagcgagcacaccctggccaagatgtggaatgtggtgcagagcaacaacggcatcaaggtgctgctgagcctgctgagcatcaagatgcccatcacagatgctgaccagatccgggccctggcctgcaaggccctggtgggcctgagccgcagcagcacagtgcggcagatcatcagcaagctgcccctcttcagcagctgccagatccagcagctgatgaaggagcctgtgctgcaggacaagagaagtgaccacgtgaagttctgcaagtatgctgctgagctgattgagcgggtgtctgggaagcccctgctgattggaacagatgtgtccctggcccggctgcagaaggcagatgtggtggcccagagccgcatctccttccctgagaaggagctgctgctgctgatccggaaccacctgatcagcaagggcctgggggagacagccaccgtgctgaccaaggaggccgacctgcccatgacagctgccagccacagcagcgccttcacccctgtgacagctgctgccagccctgtgtccctgcccaggaccccaagaattgccaatggaattgccacccggctgggcagccatgctgctgtgggcgccagcgcccccagcgcccccacagcccacccccagcccaggcctccccagggccccctggccctgcccggccccagctatgccggcaacagccccctcatcggccgcatctccttcatccgggagcggcccagcccctgcaatggaaggaagatccgggtgctgcggcagaagagtgaccatggagcctacagccagagccctgccatcaagaagcagctggacagacacctgcccagcccccccaccctggacagcatcatcacagagtacctgcgggagcagcacgcccgctgcaagaaccctgtggccacctgcccccccttcagcctcttcaccccccaccagtgcccagagcccaagcagaggcggcaggcccccatcaacttcaccagccggctgaacagaagagccagcttccccaagtatggaggagtggatggcggctgctttgacagacacctgatcttcagccgcttccggcccatcagcgtcttccgggaggccaatgaagatgagagcggcttcacctgctgtgccttcagcgcccgggagcgcttcctgatgctgggcacctgcaccggccagctgaagctgtacaacgtgttcagcggccaggaggaggccagctacaactgccacaacagcgccatcacccacctggagcccagcagagatggcagcctgctgctgaccagcgccacctggagccagcccctgagcgccctgtggggcatgaagtctgtgtttgacatgaagcacagcttcacagaggaccactacgtggagttcagcaagcacagccaggacagagtgattggcaccaagggggacatcgcccacatctatgacatccagacaggcaacaagctgctgaccctcttcaacccagacctggccaacaactacaagaggaactgtgccaccttcaaccccacagatgacctggtgctgaatgatggagtgctgtgggatgtgcgcagcgcccaggccatccacaagtttgacaagttcaacatgaacatctctggagtcttccaccccaacggcctggaggtgatcatcaacacagagatctgggacctgcggaccttccacctgctgcacacagtgcctgccctggaccagtgccgggtggtgttcaaccacacaggcaccgtgatgtatggagccatgctgcaggctgatgatgaagatgacctgatggaggagaggatgaagagccccttcggcagcagcttccgcaccttcaatgccacagactacaagcccatcgccaccattgatgtgaagaggaacatctttgacctgtgcacagacaccaaggactgctacctggccgtgattgagaaccagggctccatggatgccctgaacatggacacagtgtgccgcctgtatgaggtgggccggcagaggctggccgaggatgaagatgaggaggaggaccaggaggaggaggagcaggaggaggaggatgatgatgaagatgatgatgacacagatgacctggatgagctggacacagaccagctgctggaggccgagctggaggaggatgacaacaatgaaaatgctggggaggatggagacaatgacttcagccccagtgatgaggagctggccaacctgctggaggagggagaagatggagaagatgaggacagtgatgctgatgaggaggtggagctgatcctgggggacacagacagcagtgacaacagcgacctggaggatgacatcatcctgagcctgaatgaatag

SEQ ID NO: 181684 - DNA, 4524 bp, Artificial Sequence
  derived and/or modified sequence
atgaccaccgtggtggtgcacgtggacagcaaggccgagctgaccacgctgttagagcaatgggaaaaggagcacggctctggccaggatatggtgcccattttaacgagaatgtcccagctgatagagaaggagaccgaggaataccgcaagggagacccagacccgttcgatgatcgccatcctggtagggccgatcccgaatgcatgctggggcacttgctaaggattctatttaagaatgacgatttcatgaatgccctcgtcaacgcatacgtgatgacctcacgcgagccgcccctgaatactgccgcctgtagacttttgctggacataatgccaggcctggagaccgccgtagtctttcaggagaaagagggaatcgttgaaaacttgttcaagtgggctcgggaagccgaccagccactgcgcacctactcgactgggctgctgggtggtgcaatggagaatcaggatattgctgccaattacagggacgaaaatagccagctggtggccattgttctccggaggttgagagagcttcaactacaggaggttgctcttagacaggagaacaaacgacctagtcctagaaaactgagtagcgagcccctcctgccacttgatgaggaggccgttgacatggattacggagatatggccgttgatgtggtggacggggaccaagaagaggcctcaggtgacatggaaatttccttccacttggacagtggccacaagaccagctccagagtgaacagtactaccaagccagaagatggaggcctgaaaaagaacaagtccgctaaacagggagatagagagaattttcggaaagctaaacaaaagttgggcttcagtagtagcgatcctgatcggatgtttgtcgagctgagtaattcttcctggtcagagatgtctccatgggtgattggcaccaattacactttgtatcctatgaccccggccattgagcagcgtctcattctgcaatatcttacaccactgggagaatatcaggaactgctccctatcttcatgcagcttggctcccgcgagctgatgatgttttacatcgacctcaagcaaaccaatgacgtgctccttacatttgaagcactgaaacacctcgcatccttgctgcttcataacaagttcgctactgaattcgttgctcatgggggagtccaaaaactgctcgaaatcccccggcccagcatggcagcaacgggggtctctatgtgtctctattacctgtcttacaaccaggacgccatggagcgagtgtgtatgcacccgcacaatgtcttgtcagacgttgtgaactacactctgtggctgatggagtgttctcacgccagtggatgttgccacgccactatgttctttagcatctgctttagcttccgtgcagtgttggagctgttcgatcgatacgacggacttcgccgcctagtcaacctgatttcgacccttgaaatacttaacttagaggatcagggcgcgctactgtctgatgatgaaatctttgcttccaggcaaaccggcaaacacacatgcatggcacttaggaagtattttgaggcccacttggccatcaaactggaacaagtgaaacagtccctacagcgcacggagggtgggattttggtgcacccacaacccccttataaagcctgctcttatacacatgagcagatcgttgagatgatggagttcctgattgagtatggccctgcccagctttactgggagcctgcggaagtattcttgaagctaagttgtgtgcagcttctcctgcaattaatcagtatcgcttgcaattggaaaacttactacgctcgcaatgatacggtcagatttgccctggatgtcctagccattctgaccgtggtgccaaaaattcagctccagctggccgagtccgtggacgtcctcgatgaggcaggctcaacagtctccacagtagggatctcaattatcctgggcgtggccgagggagaatttttcattcacgatgctgagatccaaaagtccgcactgcagattatcatcaactgcgtctgcggtccggacaataggattagctcaatcggcaagtttattagtggcacaccaaggcggaagctacctcagaatcctaaatccagcgagcataccctggctaaaatgtggaatgtggtgcagagcaacaacgggatcaaggttctgctgtcattactgtccataaagatgcctatcactgatgcagaccagattcgggctttagcctgcaaggcccttgttggcctgagccgttctagtactgtgcgacaaatcatatcaaagctacctctgttttcatcttgtcagattcaacagctgatgaaggagccagtcttacaggacaaacggtcagatcatgtcaaattctgcaaatatgcagccgagttgattgagcgtgtcagcggaaaaccgctactcattggaacagacgtgtccctggccagacttcagaaggcggatgtggtcgcgcagtcaaggatctcctttccagaaaaagaactgctcctgcttatacgaaaccacctgatttcaaagggcctgggcgagacagctactgttcttacaaaagaagcagatctgcctatgacagctgccagtcactcttccgcgttcacgcctgtaactgcagctgcgagtcctgtttccctgccacgaaccccccgcatcgccaacgggatcgcaacccgcttgggatcccacgctgccgttggtgccagcgccccgtcagctcctacagctcatccccagccacggcctccacaggggccactggccttacccggcccttcatacgctggaaacagtccacttatagggcgtatctcctttatccgcgagcggccctcaccatgtaacggacgcaagatacgggtgctgcgacagaagtcagatcatggggcatattcccagagccctgccataaaaaagcagctcgaccggcaccttccctcccctcccactttggattccattattacagaatatcttcgggagcaacacgccagatgtaagaacccagtggctacatgtcccccgtttagcctctttacaccccatcagtgccccgagcccaaacaacgtagacaggccccaatcaactttaccagcaggctgaatagacgagctagcttccccaaatacggcggagttgacggcggctgtttcgaccgacatcttattttttctcggttccgacccatcagtgtctttagggaggccaatgaggatgagtccggctttacctgctgtgccttctcagcacgggagcgtttcctgatgctaggaacctgcacgggccaactcaagctgtacaacgtattttctggccaggaggaggctagttataattgtcacaattccgcaataacccacctggagccctccagggacggatccctactgctcacatccgcaacatggtcccagccactgagcgcactgtggggaatgaagtcagttttcgacatgaaacacagttttaccgaagatcattatgttgagttcagtaagcatagtcaggacagggtaatagggacaaagggcgacatcgcccatatttacgacatccaaacaggaaataaactgctgacactattcaatcctgaccttgccaataactacaagaggaactgcgctacatttaatcccaccgatgatctagtgctaaatgacggcgtactctgggacgtcaggagtgctcaagctattcataaatttgacaaattcaacatgaatatctctggcgttttccatccaaatggtttggaggtcattattaacaccgaaatttgggaccttagaacatttcatctgctacacactgtgcctgccctggatcagtgtcgggtggtttttaaccacacaggcaccgtgatgtacggcgccatgttgcaggcagacgatgaagatgacctcatggaagagaggatgaagagcccctttgggagctccttcagaacatttaacgcaactgattataaaccgattgccaccatagatgtgaagaggaatatattcgacctgtgtacagacactaaagactgttatctggcagtgatcgaaaatcaggggtccatggacgcgctgaatatggacaccgtgtgccggctctatgaggtggggcgccaaagacttgccgaagacgaggacgaagaggaagaccaggaggaagaggaacaggaagaggaggacgatgatgaagatgacgatgatacagatgacctcgatgagctcgacacagatcaactgctggaggcagagttagaggaagacgataataacgaaaatgccggcgaggatggtgacaacgactttagcccctcagacgaggagttagccaatttactggaagagggggaagatggcgaagatgaagattccgatgccgacgaggaagtggagcttatcctgggagacactgattcatccgataactctgacctagaagatgatattatcctgtctctcaatgaatag

SEQ ID NO: 181685 - DNA, 4524 bp, Artificial Sequence
  derived and/or modified sequence
atgaccaccgtggtggtgcacgtggacagcaaggccgagctgaccaccctcttggaacagtgggagaaagagcatggtagtggtcaggacatggtgccaatactaactcgcatgtctcagctgattgagaaggagactgaagaatacaggaagggagatcccgatccttttgatgatcgccaccccggaagggcagaccctgagtgtatgctgggccatttgctacgtatcctgttcaaaaacgatgatttcatgaacgccctggttaatgcctatgttatgacctccagggaaccacccttgaatacagcagcctgcaggttgctgttagacattatgccgggcttggaaactgcagtggtattccaggagaaagagggcatcgtggaaaacctctttaaatgggctagagaggccgatcagcctctcagaacgtacagcaccggacttcttggcggcgccatggaaaaccaagatatagctgccaactaccgggacgagaatagccagctagttgcaatagtcctgagacgtttgcgagaactccagttacaggaggtggccctgaggcaggagaacaagcgtcctagcccccgcaagctcagttcagagcctctactgccacttgatgaagaagcagtcgatatggattatggcgatatggcagtggatgtggtggacggagaccaagaggaagcaagcggcgatatggaaatctctttccacctcgattccggccataagacatcctcccgcgtgaacagtacaacaaaaccagaagacggagggctcaagaaaaacaaatcagctaagcagggcgaccgcgagaatttcaggaaggctaagcaaaaattgggatttagttcctctgaccctgaccgaatgttcgtggaactaagcaactctagctggagtgagatgtctccttgggtgattgggacaaactacaccctgtaccccatgacccctgcgatcgagcagagattgattctgcaatatctgacaccgctgggagagtaccaagagttgctcccaatattcatgcagctgggatcccgggagctcatgatgttttatattgacctcaaacagacaaatgatgttcttctgaccttcgaagcgttgaaacacttggcaagcctgcttctgcacaacaagttcgctactgagttcgtagcccacgggggcgtccagaagctcctcgagatccctcggccatcaatggccgcaaccggcgtgtccatgtgcctttactacctgagttacaatcaggatgcaatggagagagtttgcatgcatcctcacaacgtgctttccgacgtggttaattacaccctctggctcatggagtgcagccacgccagtgggtgctgccacgcgactatgttcttttcaatatgcttctcgtttagagcagtgctggaactgttcgataggtacgatggactgcgcaggcttgtgaatctcatcagcaccctggaaattttaaacttggaagatcagggggccctcctctcagatgacgaaatctttgcatcgcggcaaactggcaaacatacatgcatggccctgaggaagtattttgaagcccatctggcaatcaaactggaacaggttaagcagtcattgcagcggaccgaaggaggcatcctcgtgcaccctcagcccccctacaaggcttgttcctacacacatgaacaaattgtggaaatgatggagtttctgatagaatacgggccagcccagctgtactgggagcccgccgaggtattcctcaaactcagctgtgtgcagttgcttctgcagctgatctccatcgcctgtaattggaagacttattacgcccgaaacgacactgtgaggtttgctctggatgtgctcgccatcctcacggtcgtccctaagatccagcttcagttggctgagtcagttgacgtgctcgatgaggcagggagtactgtcagcaccgtggggatctccatcatcctgggggttgcggagggagagttctttatccatgacgctgagatccagaagtcagccctgcaaatcattatcaactgcgtgtgtggacccgataataggatctcttccatcggcaaatttatctccgggacgccaagacgtaaacttccgcagaacccaaaatcgagtgaacacacactggcaaaaatgtggaacgtggtacagtctaataatgggatcaaggttctccttagcctactcagcattaagatgcctatcaccgacgccgatcagattcgggctctggcctgcaaggctctggtgggcctgtctcggtcatccaccgtacgccagatcattagtaaactgcctctgtttagtagttgccagatccagcagctgatgaaggagcctgttctgcaagataagcggtcggaccacgtcaagttctgcaaatacgctgccgagttgatcgagagagtgtcagggaaaccgctccttattggaacggacgtatccctggcacgcctgcagaaggctgatgtagtggctcagtctaggatctctttccctgaaaaggagctgctcctgctcatcaggaatcaccttatctcgaagggactgggtgagacggcaactgttctgactaaggaagccgatcttcctatgaccgcagcgtcccactctagtgcttttacgccagtgaccgccgccgccagtcccgtaagcctccccagaactcctcggatcgctaacgggattgcaaccagactgggctcccatgccgccgtgggagctagtgctccttccgctccaacagcacatccacagcctaggcccccccagggtcccctcgccctacccgggcccagctatgctggaaatagccctctcatcggtcggattagttttatccgtgagaggccctcaccgtgcaacggtcggaagattcgagtgctccgacaaaaatcagatcacggggcctacagccaaagcccggccataaagaaacagctcgacaggcatctccccagcccccccacccttgacagtataataacagagtacctgagggagcagcacgccaggtgtaaaaatccggttgccacctgtcccccgttctctctgtttacaccacatcagtgccccgaacccaagcagaggagacaggcaccaattaactttacatcccgcctgaataggcgagcatctttccccaagtacggaggtgtcgatggagggtgctttgatagacacttaatcttttctcgatttagacctatttccgtgtttagagaggcaaacgaagatgagagtggattcacttgctgtgcattctccgctcgggaaaggtttctgatgcttggtacttgtaccggccagctgaagttgtacaacgtattctccggccaggaagaggccagttacaactgtcataacagcgcaattacacatctggagcccagccgcgatggcagcctgctcttaaccagtgctacgtggagccaacccctttccgccctatggggaatgaagagtgtattcgacatgaagcacagtttcacggaagaccattatgtggagttcagcaaacactctcaagatagagtcattggtacaaaaggcgacatagcgcatatttatgatatccaaactggaaacaaattgttgaccttgttcaaccctgatctcgccaataattataagagaaactgtgcgacttttaacccgaccgacgacctggtcctgaacgacggggtgctctgggacgtgcggtctgctcaagcgatacataagtttgacaagttcaacatgaatatttctggcgtgtttcaccctaatggtctagaggtaattataaacaccgagatctgggacctgagaaccttccatttgctgcataccgtgccagcccttgaccagtgccgagtggtgtttaaccataccggtaccgtgatgtacggagccatgctacaggcagatgatgaggatgatcttatggaggaacggatgaaaagcccttttgggtctagcttcaggacattcaatgcaactgattacaagcctattgcaaccatcgacgttaaacgcaatattttcgacctgtgcacagacactaaagactgctatctcgcggtcattgaaaatcagggaagcatggacgcactcaatatggacacagtttgccgcctctatgaggtgggcaggcagcggttggccgaggacgaagacgaggaggaagatcaggaagaggaagaacaagaagaagaggacgatgatgaggacgacgatgatacagacgaccttgatgaactggatacggatcaactcctggaagccgaacttgaggaagacgataataacgagaacgctggtgaggacggcgacaatgattttagcccctctgacgaagaactagccaatctcctggaggagggagaagatggggaggacgaggattccgacgccgacgaagaagtcgaactgatcctgggtgacactgattcaagcgacaattctgacctcgaggacgatattatcctgtcgctgaacgaatag

SEQ ID NO: 181686 - DNA, 4524 bp, Artificial Sequence
  derived and/or modified sequence
atgacaaccgtagtcgtccacgtcgactcaaaagcagagctcacaactctgcttgagcaatgggagaaggagcacggttccggccaggacatggtgcctattctgacccggatgtctcagctgatagagaaagagaccgaagagtaccggaaaggtgatcccgaccccttcgacgaccgacatccgggaagagcagatcccgaatgtatgcttggtcacctcttgcgcatcctcttcaagaatgacgactttatgaacgccctcgttaacgcgtacgtgatgacttcaagagaaccacctttgaacacagccgcatgtcgcctcctacttgacataatgcccggacttgagacagccgtggtcttccaagaaaaagaagggatcgttgagaacctgtttaaatgggccagagaggccgaccagcctctgaggacgtactcaaccggactgctagggggtgcaatggaaaaccaggatatcgccgctaactaccgcgatgagaatagccaactcgttgcgatcgtcctaaggcgcctccgggagttgcagctccaggaagtggctttgcgtcaggagaacaagcggccatctccccgtaaattgtcaagtgaacccctgctgccactggacgaagaggcagttgacatggactacggggacatggccgtggacgttgttgatggggatcaggaggaggcatccggtgacatggaaatcagctttcatctggattcagggcataagacctcgtcaagagtaaattccactacgaaaccagaggacgggggtttgaaaaagaacaagtctgccaagcagggcgacagggaaaattttcgaaaggccaagcaaaaactcggcttttcctccagcgacccagataggatgttcgtggaactgtccaacagcagctggtccgagatgagtccctgggtcatcgggaccaattacactctttacccaatgacccctgccattgagcaacggttaatccttcagtatttaacgcctctcggcgagtatcaagaactgttacctatttttatgcagttgggaagccgggagttgatgatgttttacatcgatctgaaacaaacgaacgatgttcttctgacgttcgaggccctcaaacatctcgcctctctgttgctccataacaagttcgcaaccgagttcgtggcccatgggggagtgcagaagctactagagatccctagacccagtatggctgccactggtgtcagcatgtgtctgtattacttaagctataatcaggatgcaatggaacgggtttgcatgcatcctcacaatgtcctaagtgacgtcgtcaactacaccttgtggctgatggagtgctcacacgccagcggctgctgtcacgccacgatgtttttttcaatatgttttagctttcgggctgtcctggagttatttgaccgatacgacggactgaggcgactggtaaacttgattagcacacttgagatccttaacctagaagatcagggggcactgctgtccgacgacgagatttttgcgagtcgacagactggaaaacatacctgtatggcactgagaaaatacttcgaggcccatttagccatcaaactggagcaagtcaagcagtcacttcagaggaccgaaggcggtatcctggttcacccacagccaccctacaaggcatgctcatatacccacgagcaaatcgtggaaatgatggagtttcttatcgaatatggccctgctcagctctattgggaacccgcagaggtgttcttgaaattgtcctgcgtgcaacttttgctccagcttatcagcattgcctgtaactggaagacatactatgcccgtaatgacaccgtgcgcttcgcactggacgtcctggcaatcctgaccgtggtgccaaagattcagttgcagctggccgaaagtgtggacgttctggatgaggctgggtccacggtctctacggtgggaatcagtatcatcctgggggtggcagaaggagagttctttatacatgatgccgagattcaaaagagcgcattacaaataatcattaattgcgtttgtggccctgataaccgaatttcttcaattggaaagttcataagcgggaccccaaggcgtaaattgccccagaatcctaagtcctcagaacatacattagccaaaatgtggaatgtcgtacagagcaacaatggtatcaaagtgcttcttagtctcctgtcgatcaagatgcccatcacggacgcggaccagattagagccctggcctgcaaagctctagtggggctgagccggagttccactgtcaggcagatcatatccaaattacctcttttcagcagctgccagatccaacagcttatgaaggagccagtcctccaggataaacggtccgatcatgtaaagttctgtaagtacgctgcagaattgatcgagagggtgagcggaaagccgctgttgatcggcaccgacgtgagtcttgcaaggctccaaaaggccgatgttgtcgcgcaaagtcgaatttcctttcctgagaaagaattactgcttctgattcggaaccatctcatcagcaaggggctgggggaaacagctaccgtcctcacaaaagaagccgacttacctatgactgccgcaagccactcctcagcgtttacacctgtcacagctgcggcaagccctgtgagcctgcctaggacaccccgaatcgccaatggaatcgccaccaggctgggcagtcatgccgctgtcggtgccagtgcaccgtccgcgccaaccgcgcatcctcagccacggccacctcaaggcccactggcactaccaggacctagctacgctggcaatagccctcttatcggtagaatatcatttatcagagagagacccagcccctgtaatggaagaaaaatccgagtgctgaggcagaaaagcgatcacggagcctacagccagagtcccgcaatcaaaaagcagctcgatcggcacctaccttcccctccaaccctcgacagtatcattacagaatacctgagagagcagcacgctcgctgcaagaaccctgttgctacctgccccccttttagtctcttcacccctcaccagtgcccagagcccaagcagagacgccaagccccaattaattttacatcacgcctgaaccgtagggcttccttcccaaagtatgggggagtggacggtgggtgctttgatcgccatctgatattttcccgatttagaccaatctcagtttttcgggaggccaacgaagatgagagcggtttcacctgttgcgcgttttccgccagagaaagatttctcatgctcgggacctgtaccggacaactgaagctgtataacgttttctctggacaagaggaagcaagctacaattgccataactccgcgataacgcaccttgaaccctctagggatggctcactgctcctcactagcgctacctggtcacaacccctcagcgccctgtggggcatgaagagtgttttcgatatgaagcactccttcacagaggatcactacgttgaattttccaagcatagtcaggacagagtcattggaacgaaaggcgacatcgcacatatttacgatattcagaccgggaacaaactcctgaccctatttaatcccgacctggccaataattacaagcggaattgcgctacgttcaatcccactgacgatttggtcctgaacgacggggtgctttgggacgtgcggtcagctcaggccattcacaagttcgacaaattcaacatgaacatctctggggtatttcacccaaacggcctggaagttatcataaataccgaaatttgggatcttcggactttccatctcctgcataccgtccccgctctggaccagtgtcgagtagtgtttaatcacacgggcacagtaatgtacggcgcaatgctgcaggccgacgatgaggacgaccttatggaggaaagaatgaaaagcccatttggctcctctttcagaacgttcaatgcaaccgattataagcctatagccactattgatgtaaagaggaatattttcgatctgtgtacagacaccaaagattgttaccttgccgttatcgagaatcagggtagcatggacgcattgaacatggatactgtctgtaggctgtacgaggtgggacggcagagattagcagaagatgaggatgaggaagaagatcaggaagaagaagagcaggaggaggaagacgacgatgaagacgatgacgatacagacgatcttgatgaattggacactgatcaattattggaggccgaactagaggaggatgacaataacgagaacgccggagaggacggcgataatgacttcagcccttctgatgaagaacttgcaaacttactggaagagggagaggacggcgaggatgaagacagcgacgccgacgaggaagttgagcttatcctgggtgacacagattcttccgataactcagacctggaggatgacattattctgagcttaaatgagtag

SEQ ID NO: 181687 - DNA, 4524 bp, Artificial Sequence
  derived and/or modified sequence
atgacaacagtggtcgtccatgtagattccaaagctgaattaaccacactgctcgagcagtgggaaaaggaacacgggagtgggcaggacatggttccaatactcactcgaatgagccaattgatcgagaaggagaccgaggaatatcgcaaaggtgatcccgatcctttcgacgaccggcaccccggacgtgcagacccagagtgcatgctgggccacctgctaaggatcctcttcaaaaacgatgacttcatgaacgcactagttaacgcttacgtgatgacctcccgcgagccgcctctgaacacagcggcatgtcggcttctgctcgatatcatgcctgggttggaaaccgccgtggtctttcaagaaaaagaaggaatcgtggaaaacctgtttaagtgggccagagaggcggaccagccacttagaacctacagcaccggcctgctgggaggcgctatggagaaccaggatattgctgcaaactatcgggatgaaaacagtcaactagtggctattgttctacgcagattgagagaacttcaacttcaagaagttgcacttcgtcaagaaaacaagcgcccttccccacggaaactgtccagcgaacctctcttgcctctggacgaggaggccgtagacatggactatggcgatatggctgtcgacgtcgtggatggggaccaggaagaggcaagtggagatatggaaatatcttttcatctcgactctggacataagacgtcttctagggtcaacagcaccacaaagcctgaggacggtggcctgaagaagaacaagtccgcgaaacagggcgaccgcgaaaattttcggaaggcaaagcagaaattaggcttttcctcttctgaccccgaccgtatgtttgtggaattgagcaacagctcctggtcagagatgagcccatgggtgattgggactaattataccctataccccatgaccccggcaatcgaacagcgacttatccttcagtacctgacacctctcggagaataccaggaactgttacctatatttatgcaattgggttctagggagcttatgatgttctacatcgacttgaaacagaccaatgacgtgctgctgacgtttgaagcattgaaacatctagcctcactgctcttacataataaattcgccacagagttcgtcgcgcacggcggtgttcagaagttgctagaaatccctaggccctcaatggccgctacaggagtatcaatgtgtctatactatttgagctataaccaggacgcgatggagcgcgtctgcatgcacccacataatgttctgagcgatgttgtgaattataccctgtggctcatggaatgttcccatgcttcaggctgctgtcatgcaaccatgtttttcagcatttgcttctcgtttagagcggtgctcgagctgtttgatagatacgacgggctccgtcggttagtgaaccttataagcacactggagatcctcaatctggaagaccagggcgctctgttgtcagatgacgagattttcgcttcccgacagactggcaagcacacgtgcatggcacttcggaagtattttgaagcccacttggccatcaagctggaacaggtgaagcaatccctacagagaaccgaaggaggcattctggtacatccgcaacccccttacaaagcctgttcttatacccacgagcagattgtggaaatgatggagttcctcattgaatacggcccagctcagctctattgggagcctgccgaggtgttcctcaagctctcctgcgtgcagttgttgctacagctcatttcaatcgcatgcaactggaagacttactacgcaaggaatgatactgtcaggttcgcactagacgtgctggccatcttgaccgttgtgccaaaaatccagctgcagttggctgaatcggtcgatgtcttggatgaggctggatccactgtgtcgacggtgggcatctcaatcatactgggagtcgcagagggtgaattctttatacatgacgcagagatccagaagagcgctttgcagattatcataaattgtgtatgcggtcccgacaaccgcatttctagcatcggcaagtttatctccggcacacccagacgcaagcttccacagaatccaaagagctctgaacacacgctggctaagatgtggaatgtggttcagtccaataacggaatcaaagtcctactgagcctgctttctatcaagatgcccattaccgatgcagaccagatacgcgcattggcctgcaaagccctggtaggcttgtccaggtcttccactgtccggcaaattatctcaaagttgcccctcttttcgtcctgccagattcaacagctaatgaaagagcctgttctccaggataaaagaagcgaccatgtgaagttctgtaagtacgctgccgaactgatagagcgcgtgagcggcaagcccttacttatcgggactgatgtaagcctggcgagactgcagaaagcggacgtggtggctcaatcccgtatcagctttcctgagaaagagctcctgttgcttatcagaaatcatctcatttccaagggactgggggagaccgcaaccgtccttactaaggaggctgatctcccaatgacagctgcctcccactccagtgcattcacacccgttaccgccgctgctagccccgtgtcgctgcccagaacaccacgtatcgctaacggaatcgcgacgcggctaggaagtcacgccgctgtcggcgcttcagctccctctgcccctacggctcacccgcagccccgtccgcctcagggccctctcgctctgcccggtccaagttatgctggcaatagtccactgataggtaggatatcatttattcgcgagaggccttccccctgtaacggcagaaagatacgggtgctccgtcagaagagcgatcacggcgcatacagtcagagtcccgctattaaaaaacagcttgatcgacatctccctagcccgccaacactggacagcatcataacggagtatctgagggagcagcacgctcgctgcaagaatccagtcgcaacctgtccacccttcagcctctttacacctcaccaatgtcccgaacccaagcagaggcgccaagcgcctatcaattttacaagcagattgaaccgcagagccagctttcccaaatacggtggtgtagatggcggttgtttcgacagacacctgatcttttccagatttcggcctatatctgttttccgagaagccaatgaggacgaaagtggcttcacgtgctgcgccttctcggccagagagagattcctcatgctagggacatgtacgggccagctgaagctttataacgtgttcagcggccaggaagaggcaagctacaactgccataacagtgctatcactcatttggagcctagccgggatgggtctttgctgctcacctcagccacttggtctcagcccctgtctgcactgtggggaatgaagtctgtgttcgacatgaagcatagctttaccgaggaccactacgtggagtttagcaagcactcccaggatcgagttattggcactaagggggatatcgctcatatctatgacatccagaccggtaataagctgttaaccttgttcaatccagacctggcaaacaactacaaacggaattgcgcaaccttcaatccaacagatgacctcgtactgaatgatggggtgctgtgggatgttagatcagcccaggctatccataagtttgataagttcaacatgaatatttcaggtgtgtttcacccaaatggcttagaggtcataattaatacagaaatctgggacctgagaacgtttcacttactgcacacagtgccagcactggatcaatgccgcgtagtttttaaccacaccgggaccgtcatgtatggcgcaatgcttcaggcagatgacgaggatgatttaatggaagaaaggatgaaatctccatttgggtcatcgtttcggacttttaatgctacagactataagcctatagccactatcgacgttaaacgcaatatcttcgacctgtgcactgacaccaaagattgctaccttgcagttatcgagaatcaagggtccatggatgctttgaacatggacacggtgtgtaggctgtacgaggtaggtagacagaggctggccgaggacgaggatgaagaagaggaccaggaggaggaagagcaggaggaggaagatgatgatgaggacgatgacgacacagatgatctggatgaacttgacacagaccagttattggaagcagaattggaggaagacgataataacgagaatgccggagaagacggtgacaacgattttagcccaagtgacgaggagctcgccaatctccttgaagagggcgaggacggcgaagacgaagactcagacgccgacgaagaggtggaactcatcctgggagacaccgactcctctgacaacagtgaccttgaagacgatataatcctcagtcttaacgagtag

SEQ ID NO: 181688 - DNA, 5946 bp, Artificial Sequence
  derived and/or modified sequence
agccgtggtcgcgctgtgtgtgtgtgtgagtggagagtgagtgcgggacctgaggctgtgtgtgtgtgaactgtggccactggcggggtcgggggggggcagcggcggagccgcctcggacggcaaagccatgactacagtagtggtacatgtggactccaaagctgagctcactaccctgctggagcagtgggaaaaggaacatggcagtgggcaggacatggtacctatccttaccaggatgtctcaattgattgaaaaagaaactgaagagtatcgtaaaggggatccagacccatttgatgatcgacatcctggtcgagctgatccagagtgtatgctgggccacttgctgagaatactcttcaagaatgatgatttcatgaatgcactggtgaatgcatatgtgatgacaagccgagagccccctttaaacactgcagcttgcagactcctattagacatcatgccagggctggaaactgctgtcgtctttcaagaaaaggagggaattgtcgagaatcttttcaaatgggcccgagaggccgatcaaccattgaggacatattctactggactgttaggaggtgctatggaaaatcaagacattgctgccaactatagagatgaaaattcacagctggtggcaatagtgcttcgaagactgagggagctacagctacaggaagtggctttgcggcaggaaaacaagcgtcccagtccacggaagctctcttctgaaccccttttgcctctggatgaggaggctgtggatatggactatggtgacatggctgtagatgtagtggatggagaccaagaggaagcttctggagacatggagatctcctttcatcttgattcaggccacaagactagtagcagagtgaactcaacaaccaaacctgaggatggaggattaaagaaaaacaagtcagcaaaacagggtgacagagagaactttaggaaagccaagcaaaagttgggtttctcatcttctgatccagatcgcatgtttgttgagctgtctaatagcagttggtcagaaatgtctccctgggtgattggcaccaattataccctttatcctatgactcctgctatcgagcagcgactcattctccaatatttgacccctctaggagaatatcaggagctacttcccatattcatgcaacttggatcacgggagctgatgatgttctatattgacctgaagcaaactaatgatgtcctgcttacatttgaggcactaaagcacctagcatctctcctgctccataacaaatttgccacagaatttgttgcgcatggtggagtacagaaattactggaaatacctcgtccttctatggctgcaaccggtgtgtctatgtgtttgtattacctatcctacaatcaggatgccatggaaagagtttgcatgcatccccacaatgttctgtctgatgtggtgaactataccctgtggttaatggagtgttctcatgcttcaggatgctgccatgctaccatgtttttttcaatttgcttctcatttcgggccgtcttggagctctttgaccgctatgatggtcttcgtcgtctggtgaacttgatcagtactttggagattctaaatttggaagatcagggtgcacttctgagtgatgatgaaatatttgctagccgccaaactgggaaacatacctgcatggccttgcgcaaatactttgaggctcacctggccattaaattggaacaagtgaagcagtcacttcagaggactgagggtggcattcttgtccacccacaacccccgtacaaggcatgctcatatactcatgaacagattgtggaaatgatggaatttttgatagaatatggcccagcgcagctatattgggaaccagctgaagttttcctcaaactttcttgtgtgcaactcttgttgcagcttatttctattgcctgcaattggaagacctattatgcaaggaatgacactgtgcgctttgctttggatgtcctggctattcttactgtggtgccaaaaatccagctccagttggcagaatcagtggacgtgttggatgaggctggatctacagtctctactgtaggtatcagcattattttgggagtggctgagggtgagttcttcatccatgatgctgaaattcagaagtcagcacttcagattatcatcaattgtgtgtgtggcccagataaccgaatatccagtattggtaaatttatctctggtactcctcggagaaagctgcctcagaaccctaaaagcagtgagcacaccctggccaagatgtggaatgtggttcagtccaacaacggcatcaaggtgctcctgtccttactgtccattaagatgcccatcacagatgcagaccaaatccgggccctggcctgcaaagccctagtgggcctgtctcgcagtagcactgtccggcagatcatcagtaaactgccccttttcagcagctgccagatccagcagctgatgaaggagcctgtgctgcaggacaagcgcagtgaccatgtcaagttctgcaagtatgctgctgaactcattgaacgggtgtcaggaaaaccacttctcattggcactgatgtttccctagcacgactgcagaaagcagatgttgttgcccagtcaaggatctccttccctgagaaagagctgcttttgttgatacgaaaccatcttatttctaaagggcttggagaaacagcaaccgtgctgacaaaagaggctgacctgcccatgactgctgcctcccattcttctgcctttaccccagtcactgctgctgcttctcctgtctctctaccccgaacccctcgtatcgctaatggcattgcaactcgtctgggcagccatgctgctgtgggtgcctctgcgccttctgcccctactgctcatcctcagccacggcccccccagggtccgctagctctgcccggcccatcttatgcaggcaactcccctttgattggtagaatcagttttatcagagagaggccatcaccctgcaatggcaggaaaatcagagtgttgcggcagaagtcggaccatggtgcctacagccaaagcccagccataaaaaaacagctggacagacatcttccttccccacctacgctggacagtataatcacagagtatcttagagaacaacatgctcgctgcaagaatccagttgccacctgcccacctttctccctctttactcctcaccaatgtcctgagccaaaacagaggcggcaagcgccaataaactttacgtcaaggctaaaccgcagggcatcatttccaaagtatggaggggtggatggcggatgctttgataggcaccttatctttagcagattccgtcctatttcagtgttccgggaagccaatgaagatgagagtggcttcacctgctgtgcattctcagcacgggagcggttcctgatgcttggcacctgcacagggcagctgaagctctataatgtgtttagtggacaggaggaggccagctataactgtcacaactcagccatcacacatcttgaaccttccagggatgggtccttgctgctgacatctgctacttggagccagcctttgtctgcactttggggaatgaagtcagtatttgatatgaagcattccttcacagaagatcactatgttgagttcagtaagcactcccaggatcgggtcatcggcacaaaaggagacattgcccacatttatgatattcagactggcaacaagctgttgactctgtttaacccagatcttgccaacaactacaagaggaactgtgccacctttaatcctacagatgatcttgtcttaaatgatggcgtcctctgggatgtccgctctgcacaggccatccacaagtttgacaagttcaatatgaacatcagtggtgttttccatccaaatggactggaggtgatcattaatactgagatttgggaccttcgaacttttcatcttttgcatactgttcccgctctggatcagtgtcgcgtggtgttcaatcacacgggaacagtgatgtatggagctatgttgcaggcagatgatgaagatgacttaatggaagagaggatgaaaagcccctttgggtcatccttccgaacatttaatgcaactgactacaaacctatagcaaccattgatgtgaaacggaacatctttgacctgtgtacagacaccaaagactgctatcttgctgtcattgagaatcaaggcagcatggatgccctgaacatggacacagtatgcaggctgtatgaagtgggcaggcagcgtctggcagaggatgaggatgaagaggaggaccaggaagaggaagaacaggaggaagaagatgatgatgaagatgatgatgacaccgatgatttagatgagcttgacactgaccagttgctggaggcggagttggaggaggacgacaataatgagaacgcaggggaagatggggacaatgacttctctccctctgatgaggagctagcaaaccttctagaggagggagaggacggggaggatgaagactctgatgcagatgaggaggtggaactgatcctgggggacactgacagctctgacaactctgatttggaagatgacatcatcttatctctgaatgagtgaggagccatcactgcttggaagagattcttggcagagagaagaggggacaaatttggttgtgaagtaaacaagaaacacaagacggctaaaactctccaggggcaggtaaagccctgctgggctcagaagcactatagaatttgctgtacacactgaagtgggtctgtgtcacacaggtatttcttggtcctctggagagcagaggactcactcagctctttgcttcatgcctcgctttaatggtagtaaacacttaaccagtggaatagtctgactgctggtactgatggcatcagaagaaaacaggttaacaatcaagtagtgaaagcactatattctagtcattaactcaacggagccagtctcaactctgctgggagcacccacaggtctctgtgggggagacagggactataacagggaggcagaattcaggttggcttgacaacacaccttaggaacatgtgctaaggggctaaggaggcatcagctgtcttccttattctaccagggctgaaaatcggagtcacttaggaggcagcatgagaacagtggcacaccaccagtgaggcacatgttgcctttttgtctttaagcaacaccttagacagggcctgaaccctgggtgggggcactggatgcctgaagtaagtaagttttctcagtggggcagtctcataaaatcaccaggacattgaccacctgacctcccctaactagtgctggccaaggcctgagagttcacagaacctgctaggtcttaagagccaaaggaaggaagtggttgagggccaggaaagagaaggaatgtcatgccagggtgttactcctcaccaaaacttggcagttctttttggggccatgggacacctttctctgaagaggggttggataaggcaaaggttgaagtgtcttctctaggcacgttttctagcatgtttccttttacttggttctgtctcacaaagctgggaggtagatgattcttccgggtcctgagcacctgcttcatgaaggaagataggtagcccagagaagaagttttggacttaacaacataccaaggcagctctggcctgtgactcaggcgtttgttggagagctgcaggaaaaccactgcagtgtgcctgcaacaggacaagacccactcctgtttctggcggtaccagctaccctggaatggtggcgtgtcctgctgtacccaactgacttgcttaggtacctggcagctgtgaccacagctcaagtaaaaaaacaaaaacaggcaaataaataaacatgcttaacatgtc

SEQ ID NO: 181689 - DNA, 5984 bp, Artificial Sequence
  derived and/or modified sequence
cgcgctgtgtgtgtgtgtgagtggagagtgagtgcgggacctgaggctgtgtgtgtgtgaactgtggccactggcggggtcgggggggggcagcggcggagccgcctcggacgataaggaaattgagatttggagaagttaaataaccaagacttcacaggcaaagccatgactacagtagtggtacatgtggactccaaagctgagctcactaccctgctggagcagtgggaaaaggaacatggcagtgggcaggacatggtacctatccttaccaggatgtctcaattgattgaaaaagaaactgaagagtatcgtaaaggggatccagacccatttgatgatcgacatcctggtcgagctgatccagagtgtatgctgggccacttgctgagaatactcttcaagaatgatgatttcatgaatgcactggtgaatgcatatgtgatgacaagccgagagccccctttaaacactgcagcttgcagactcctattagacatcatgccagggctggaaactgctgtcgtctttcaagaaaaggagggaattgtcgagaatcttttcaaatgggcccgagaggccgatcaaccattgaggacatattctactggactgttaggaggtgctatggaaaatcaagacattgctgccaactatagagatgaaaattcacagctggtggcaatagtgcttcgaagactgagggagctacagctacaggaagtggctttgcggcaggaaaacaagcgtcccagtccacggaagctctcttctgaaccccttttgcctctggatgaggaggctgtggatatggactatggtgacatggctgtagatgtagtggatggagaccaagaggaagcttctggagacatggagatctcctttcatcttgattcaggccacaagactagtagcagagtgaactcaacaaccaaacctgaggatggaggattaaagaaaaacaagtcagcaaaacagggtgacagagagaactttaggaaagccaagcaaaagttgggtttctcatcttctgatccagatcgcatgtttgttgagctgtctaatagcagttggtcagaaatgtctccctgggtgattggcaccaattataccctttatcctatgactcctgctatcgagcagcgactcattctccaatatttgacccctctaggagaatatcaggagctacttcccatattcatgcaacttggatcacgggagctgatgatgttctatattgacctgaagcaaactaatgatgtcctgcttacatttgaggcactaaagcacctagcatctctcctgctccataacaaatttgccacagaatttgttgcgcatggtggagtacagaaattactggaaatacctcgtccttctatggctgcaaccggtgtgtctatgtgtttgtattacctatcctacaatcaggatgccatggaaagagtttgcatgcatccccacaatgttctgtctgatgtggtgaactataccctgtggttaatggagtgttctcatgcttcaggatgctgccatgctaccatgtttttttcaatttgcttctcatttcgggccgtcttggagctctttgaccgctatgatggtcttcgtcgtctggtgaacttgatcagtactttggagattctaaatttggaagatcagggtgcacttctgagtgatgatgaaatatttgctagccgccaaactgggaaacatacctgcatggccttgcgcaaatactttgaggctcacctggccattaaattggaacaagtgaagcagtcacttcagaggactgagggtggcattcttgtccacccacaacccccgtacaaggcatgctcatatactcatgaacagattgtggaaatgatggaatttttgatagaatatggcccagcgcagctatattgggaaccagctgaagttttcctcaaactttcttgtgtgcaactcttgttgcagcttatttctattgcctgcaattggaagacctattatgcaaggaatgacactgtgcgctttgctttggatgtcctggctattcttactgtggtgccaaaaatccagctccagttggcagaatcagtggacgtgttggatgaggctggatctacagtctctactgtaggtatcagcattattttgggagtggctgagggtgagttcttcatccatgatgctgaaattcagaagtcagcacttcagattatcatcaattgtgtgtgtggcccagataaccgaatatccagtattggtaaatttatctctggtactcctcggagaaagctgcctcagaaccctaaaagcagtgagcacaccctggccaagatgtggaatgtggttcagtccaacaacggcatcaaggtgctcctgtccttactgtccattaagatgcccatcacagatgcagaccaaatccgggccctggcctgcaaagccctagtgggcctgtctcgcagtagcactgtccggcagatcatcagtaaactgccccttttcagcagctgccagatccagcagctgatgaaggagcctgtgctgcaggacaagcgcagtgaccatgtcaagttctgcaagtatgctgctgaactcattgaacgggtgtcaggaaaaccacttctcattggcactgatgtttccctagcacgactgcagaaagcagatgttgttgcccagtcaaggatctccttccctgagaaagagctgcttttgttgatacgaaaccatcttatttctaaagggcttggagaaacagcaaccgtgctgacaaaagaggctgacctgcccatgactgctgcctcccattcttctgcctttaccccagtcactgctgctgcttctcctgtctctctaccccgaacccctcgtatcgctaatggcattgcaactcgtctgggcagccatgctgctgtgggtgcctctgcgccttctgcccctactgctcatcctcagccacggcccccccagggtccgctagctctgcccggcccatcttatgcaggcaactcccctttgattggtagaatcagttttatcagagagaggccatcaccctgcaatggcaggaaaatcagagtgttgcggcagaagtcggaccatggtgcctacagccaaagcccagccataaaaaaacagctggacagacatcttccttccccacctacgctggacagtataatcacagagtatcttagagaacaacatgctcgctgcaagaatccagttgccacctgcccacctttctccctctttactcctcaccaatgtcctgagccaaaacagaggcggcaagcgccaataaactttacgtcaaggctaaaccgcagggcatcatttccaaagtatggaggggtggatggcggatgctttgataggcaccttatctttagcagattccgtcctatttcagtgttccgggaagccaatgaagatgagagtggcttcacctgctgtgcattctcagcacgggagcggttcctgatgcttggcacctgcacagggcagctgaagctctataatgtgtttagtggacaggaggaggccagctataactgtcacaactcagccatcacacatcttgaaccttccagggatgggtccttgctgctgacatctgctacttggagccagcctttgtctgcactttggggaatgaagtcagtatttgatatgaagcattccttcacagaagatcactatgttgagttcagtaagcactcccaggatcgggtcatcggcacaaaaggagacattgcccacatttatgatattcagactggcaacaagctgttgactctgtttaacccagatcttgccaacaactacaagaggaactgtgccacctttaatcctacagatgatcttgtcttaaatgatggcgtcctctgggatgtccgctctgcacaggccatccacaagtttgacaagttcaatatgaacatcagtggtgttttccatccaaatggactggaggtgatcattaatactgagatttgggaccttcgaacttttcatcttttgcatactgttcccgctctggatcagtgtcgcgtggtgttcaatcacacgggaacagtgatgtatggagctatgttgcaggcagatgatgaagatgacttaatggaagagaggatgaaaagcccctttgggtcatccttccgaacatttaatgcaactgactacaaacctatagcaaccattgatgtgaaacggaacatctttgacctgtgtacagacaccaaagactgctatcttgctgtcattgagaatcaaggcagcatggatgccctgaacatggacacagtatgcaggctgtatgaagtgggcaggcagcgtctggcagaggatgaggatgaagaggaggaccaggaagaggaagaacaggaggaagaagatgatgatgaagatgatgatgacaccgatgatttagatgagcttgacactgaccagttgctggaggcggagttggaggaggacgacaataatgagaacgcaggggaagatggggacaatgacttctctccctctgatgaggagctagcaaaccttctagaggagggagaggacggggaggatgaagactctgatgcagatgaggaggtggaactgatcctgggggacactgacagctctgacaactctgatttggaagatgacatcatcttatctctgaatgagtgaggagccatcactgcttggaagagattcttggcagagagaagaggggacaaatttggttgtgaagtaaacaagaaacacaagacggctaaaactctccaggggcaggtaaagccctgctgggctcagaagcactatagaatttgctgtacacactgaagtgggtctgtgtcacacaggtatttcttggtcctctggagagcagaggactcactcagctctttgcttcatgcctcgctttaatggtagtaaacacttaaccagtggaatagtctgactgctggtactgatggcatcagaagaaaacaggttaacaatcaagtagtgaaagcactatattctagtcattaactcaacggagccagtctcaactctgctgggagcacccacaggtctctgtgggggagacagggactataacagggaggcagaattcaggttggcttgacaacacaccttaggaacatgtgctaaggggctaaggaggcatcagctgtcttccttattctaccagggctgaaaatcggagtcacttaggaggcagcatgagaacagtggcacaccaccagtgaggcacatgttgcctttttgtctttaagcaacaccttagacagggcctgaaccctgggtgggggcactggatgcctgaagtaagtaagttttctcagtggggcagtctcataaaatcaccaggacattgaccacctgacctcccctaactagtgctggccaaggcctgagagttcacagaacctgctaggtcttaagagccaaaggaaggaagtggttgagggccaggaaagagaaggaatgtcatgccagggtgttactcctcaccaaaacttggcagttctttttggggccatgggacacctttctctgaagaggggttggataaggcaaaggttgaagtgtcttctctaggcacgttttctagcatgtttccttttacttggttctgtctcacaaagctgggaggtagatgattcttccgggtcctgagcacctgcttcatgaaggaagataggtagcccagagaagaagttttggacttaacaacataccaaggcagctctggcctgtgactcaggcgtttgttggagagctgcaggaaaaccactgcagtgtgcctgcaacaggacaagacccactcctgtttctggcggtaccagctaccctggaatggtggcgtgtcctgctgtacccaactgacttgcttaggtacctggcagctgtgaccacagctcaagtaaaaaaacaaaaacaggcaaataaataaacatgcttaacatgtc

SEQ ID NO: 181690 - protein, 1954 aa, Artificial Sequence
  derived and/or modified sequence
VIASFRGTVPYGLSLEIGDTVQILEKCDGWYRGFALKNPNIKGIFPSSYVHLKNACVKNKGQFEMVIPTEDSVITEMTSTLRDWGTMWKQLYVRNEGDLFHRLWHIMNEILDLRRQVLVGHLTHDRMKDVKRHITARLDWGNEQLGLDLVPRKEYAMVDPEDISITELYRLMEHRHRKKDTPVQASSHHLFVQMKSLMCSNLGEELEVIFSLFDSKENRPISERFFLRLNRNGLPKAPDKPERHCSLFVDLGSSELRKDIYITVHIIRIGRMGAGEKKNACSVQYRRPFGCAVLSIADLLTGETKDDLILKVYMCNTESEWYQIHENIIKKLNARYNLTGSNAGLAVSLQLLHGDIEQIRREYSSVFSHGVSITRKLGFSNIIMPGEMRNDLYITIERGEFEKGGKSVARNVEVTMFIVDSSGQTLKDFISFGSGEPPASEYHSFVLYHNNSPRWSELLKLPIPVDKFRGAHIRFEFRHCSTKEKGEKKLFGFSFVPLMQEDGRTLPDGTHELIVHKCEENTNLQDTTRYLKLPFSKGIFLGNNNQAMKATKESFCITSFLCSTKLTQNGDMLDLLKWRTHPDKITGCLSKLKEIDGSEIVKFLQDTLDTLFGILDENSQKYGSKVFDSLVHIINLLQDSKFHHFKPVMDTYIESHFAGALAYRDLIKVLKWYVDRITEAERQEHIQEVLKAQEYIFKYIVQSRRLFSLATGGQNEEEFRCCIQELLMSVRFFLSQESKGSGALSQSQAVFLSSFPAVYSELLKLFDVREVANLVQDTLGSLPTILHVDDSLQAIKLQCIGKTVESQLYTNPDSRYILLPVVLHHLHIHLQEQKDLIMCARILSNVFCLIKKNSSEKSVLEEIDVIVASLLDILLRTILEITSRPQPSSSAMRFQFQDVTGEFVACLLSLLRQMTDRHYQQLLDSFNTKEELRDFLLQIFTVFRILIRPEMFPKDWTVMRLVANNVIITTVLYLSDALRKNFLNENFDYKIWDSYFYLAVIFINQLCLQLEMFTPSKKKKVLEKYGDMRVTMGCEIFSMWQNLGEHKLHFIPALIGPFLEVTLIPQPDLRNVMIPIFHDMMDWEQRRSGNFKQVEAKLIDKLDSLMSEGKGDETYRELFNSILLKKIERETWRESGVSLIATVTRLMERLLDYRDCMKMGEVDGKKIGCTVSLLNFYKTELNKEEMYIRYIHKLYDLHLKAQNFTEAAYTLLLYDELLEWSDRPLREFLTYPMQTEWQRKEHLHLTIIQNFDRGKCWENGIILCRKIAEQYESYYDYRNLSKMRMMEASLYDKIMDQQRLEPEFFRVGFYGKKFPFFLRNKEFVCRGHDYERLEAFQQRMLNEFPHAIAMQHANQPDETIFQAEAQYLQIYAVTPIPESQEVLQREGVPDNIKSFYKVNHIWKFRYDRPFHKGTKDKENEFKSLWVERTSLYLVQSLPGISRWFEVEKREVVEMSPLENAIEVLENKNQQLKTLISQCQTRQMQNINPLTMCLNGVIDAAVNGGVSRYQEAFFVKEYILSHPEDGEKIARLRELMLEQAQILEFGLAVHEKFVPQDMRPLHKKLVDQFFVMKSSLGIQEFSACMQASPVHFPNGSPRVCRNSAPASVSPDGTRVIPRRSPLSYPAVNRYSSSSLSSQASAEVSNITGQSESSDEVFNMQPSPSTSSLSSTHSASPNVTSSAPSSARASPLLSDKHKHSRENSCLSPRERPCSAIYPTPVEPSQRMLFNHIGDGALPRSDPNLSAPEKAVNPTPSSWSLDSGKEAKNMSDSGKLISPPVPPRPTQTASPARHTTSVSPSPAGRSPLKGSVQSFTPSPVEYHSPGLISNSPVLSGSYSSGISSLSRCSTSETSGFENQVNEQSAPLPVPVPVPVPSYGGEEPVRKESKTPPPYSVYERTLRRPVPLPHSLSIPVTSEPPALPPKPLAARSSHLENGARRTDPGPRPRPLPRKVSQL

SEQ ID NO: 181691 - protein, 1966 aa, Artificial Sequence
  derived and/or modified sequence
MWIPTEHEKYGVVIASFRGTVPYGLSLEIGDTVQILEKCDGWYRGFALKNPNIKGIFPSSYVHLKNACVKNKGQFEMVIPTEDSVITEMTSTLRDWGTMWKQLYVRNEGDLFHRLWHIMNEILDLRRQVLVGHLTHDRMKDVKRHITARLDWGNEQLGLDLVPRKEYAMVDPEDISITELYRLMEHRHRKKDTPVQASSHHLFVQMKSLMCSNLGEELEVIFSLFDSKENRPISERFFLRLNRNGLPKAPDKPERHCSLFVDLGSSELRKDIYITVHIIRIGRMGAGEKKNACSVQYRRPFGCAVLSIADLLTGETKDDLILKVYMCNTESEWYQIHENIIKKLNARYNLTGSNAGLAVSLQLLHGDIEQIRREYSSVFSHGVSITRKLGFSNIIMPGEMRNDLYITIERGEFEKGGKSVARNVEVTMFIVDSSGQTLKDFISFGSGEPPASEYHSFVLYHNNSPRWSELLKLPIPVDKFRGAHIRFEFRHCSTKEKGEKKLFGFSFVPLMQEDGRTLPDGTHELIVHKCEENTNLQDTTRYLKLPFSKGIFLGNNNQAMKATKESFCITSFLCSTKLTQNGDMLDLLKWRTHPDKITGCLSKLKEIDGSEIVKFLQDTLDTLFGILDENSQKYGSKVFDSLVHIINLLQDSKFHHFKPVMDTYIESHFAGALAYRDLIKVLKWYVDRITEAERQEHIQEVLKAQEYIFKYIVQSRRLFSLATGGQNEEEFRCCIQELLMSVRFFLSQESKGSGALSQSQAVFLSSFPAVYSELLKLFDVREVANLVQDTLGSLPTILHVDDSLQAIKLQCIGKTVESQLYTNPDSRYILLPVVLHHLHIHLQEQKDLIMCARILSNVFCLIKKNSSEKSVLEEIDVIVASLLDILLRTILEITSRPQPSSSAMRFQFQDVTGEFVACLLSLLRQMTDRHYQQLLDSFNTKEELRDFLLQIFTVFRILIRPEMFPKDWTVMRLVANNVIITTVLYLSDALRKNFLNENFDYKIWDSYFYLAVIFINQLCLQLEMFTPSKKKKVLEKYGDMRVTMGCEIFSMWQNLGEHKLHFIPALIGPFLEVTLIPQPDLRNVMIPIFHDMMDWEQRRSGNFKQVEAKLIDKLDSLMSEGKGDETYRELFNSILLKKIERETWRESGVSLIATVTRLMERLLDYRDCMKMGEVDGKKIGCTVSLLNFYKTELNKEEMYIRYIHKLYDLHLKAQNFTEAAYTLLLYDELLEWSDRPLREFLTYPMQTEWQRKEHLHLTIIQNFDRGKCWENGIILCRKIAEQYESYYDYRNLSKMRMMEASLYDKIMDQQRLEPEFFRVGFYGKKFPFFLRNKEFVCRGHDYERLEAFQQRMLNEFPHAIAMQHANQPDETIFQAEAQYLQIYAVTPIPESQEVLQREGVPDNIKSFYKVNHIWKFRYDRPFHKGTKDKENEFKSLWVERTSLYLVQSLPGISRWFEVEKREVVEMSPLENAIEVLENKNQQLKTLISQCQTRQMQNINPLTMCLNGVIDAAVNGGVSRYQEAFFVKEYILSHPEDGEKIARLRELMLEQAQILEFGLAVHEKFVPQDMRPLHKKLVDQFFVMKSSLGIQEFSACMQASPVHFPNGSPRVCRNSAPASVSPDGTRVIPRRSPLSYPAVNRYSSSSLSSQASAEVSNITGQSESSDEVFNMQPSPSTSSLSSTHSASPNVTSSAPSSARASPLLSDKHKHSRENSCLSPRERPCSAIYPTPVEPSQRMLFNHIGDGALPRSDPNLSAPEKAVNPTPSSWSLDSGKEAKNMSDSGKLISPPVPPRPTQTASPARHTTSVSPSPAGRSPLKGSVQSFTPSPVEYHSPGLISNSPVLSGSYSSGISSLSRCSTSETSGFENQVNEQSAPLPVPVPVPVPSYGGEEPVRKESKTPPPYSVYERTLRRPVPLPHSLSIPVTSEPPALPPKPLAARSSHLENGARRTDPGPRPRPLPRKVSQL

SEQ ID NO: 181692 - protein, 1105 aa, Artificial Sequence
  derived and/or modified sequence
WIPSEKQTFFTVIASFRGTVPYGLSLEIGDTVQILEKCDGWYRGFALKNPNIKGIFPSSYVHLKNACVKNKGQFEMVIPTEDSVITEMTSTLRDWGTMWKQLYVRNEGDLFHRLWHIMNEILDLRRQVLVGHLTHDRMKDVKRHITARLDWGNEQLGLDLVPRKEYAMVDPEDISITELYRLMEHRHRKKDTPVQASSHHLFVQMKSLMCSNLGEELEVIFSLFDSKENRPISERFFLRLNRNGLPKAPDKPERHCSLFVDLGSSELRKDIYITVHIIRIGRMGAGEKKNACSVQYRRPFGCAVLSIADLLTGETKDDLILKVYMCNTESEWYQIHENIIKKLNARYNLTGSNAGLAVSLQLLHGDIEQIRREYSSVFSHGVSITRKLGFSNIIMPGEMRNDLYITIERGEFEKGGKSVARNVEVTMFIVDSSGQTLKDFISFGSGEPPASEYHSFVLYHNNSPRWSELLKLPIPVDKFRGAHIRFEFRHCSTKEKGEKKLFGFSFVPLMQEDGRTLPDGTHELIVHKCEENTNLQDTTRYLKLPFSKGIFLGNNNQAMKATKESFCITSFLCSTKLTQNGDMLDLLKWRTHPDKITGCLSKLKEIDGSEIVKFLQDTLDTLFGILDENSQKYGSKVFDSLVHIINLLQDSKFHHFKPVMDTYIESHFAGALAYRDLIKVLKWYVDRITEAERQEHIQEVLKAQEYIFKYIVQSRRLFSLATGGQNEEEFRCCIQELLMSVRFFLSQESKGSGALSQSQAVFLSSFPAVYSELLKLFDVREVANLVQDTLGSLPTILHVDDSLQAIKLQCIGKTVESQLYTNPDSRYILLPVVLHHLHIHLQEQKDLIMCARILSNVFCLIKKNSSEKSVLEEIDVIVASLLDILLRTILEITSRPQPSSSAMRFQFQDVTGEFVACLLSLLRQMTDRHYQQLLDSFNTKEELRDFLLQIFTVFRILIRPEMFPKDWTVMRLVANNVIITTVLYLSDALRKNFLNENFDYKIWDSYFYLAVIFINQLCLQLEMFTPSKKKKVLEKYGDMRVTMGCEIFSMWQNLGEHKLHFIPALRQENRLNLGGGGCSEPRACHCTPAWATKRDCVSKKKEKKT

SEQ ID NO: 181693 - DNA, 5865 bp, Artificial Sequence
  derived and/or modified sequence
gtcattgcctcctttcgggggactgtgccctacggactgagtctggaaattggcgacacagtacaaatactggagaagtgcgatggttggtatcgcggcttcgccctgaagaaccctaacatcaagggcattttcccaagcagttacgttcatctgaagaatgcatgcgtgaagaacaagggccaatttgaaatggtcattcctacagaagactccgtgataacagaaatgacatctacactccgggactggggtactatgtggaagcagctgtatgtgcgcaacgagggcgatttattccacaggttgtggcacattatgaatgagatcttagatctgcgcagacaagtgctggtgggccatctgacacatgaccggatgaaggacgtgaagagacacatcaccgctcggctcgactgggggaacgagcagctcggactcgacctagtgccgcggaaggagtacgccatggtggatcccgaggatatctcaatcacagaactttatcgcctaatggagcacaggcaccgaaagaaagacaccccagtgcaagcgtctagccaccatctgttcgttcagatgaaaagtttgatgtgctcaaacctgggcgaggagctggaggtcatcttctcactgtttgattccaaggagaacagaccgatatccgaaaggttcttcttacgcctgaacagaaatgggctgccaaaagctcctgataaacccgaacgccattgttccttgttcgtagatctcggaagtagcgaacttagaaaagacatttatatcactgtccacatcattcgcattggcagaatgggtgccggagagaaaaagaatgcatgctccgtccagtatcggagaccgtttggttgcgctgtcctaagcatcgctgatctcttgacaggggagacgaaggatgacctaatcctcaaggtgtatatgtgcaacacagagagcgagtggtaccagatccacgaaaatatcatcaagaagctcaacgctagatacaatttaaccggctccaatgccgggctggcagtgtctctgcagctcttacatggggatattgagcagatacggcgggagtactctagcgtgttctcacacggggtgtctattacaagaaagttgggcttctctaatatcatcatgcctggggagatgaggaatgatctgtatatcacgattgagcggggggagttcgagaagggcggaaagtctgtggctaggaatgtcgaggttaccatgtttatagtcgacagcagtgggcagacattgaaagacttcatcagttttgggtcgggggagcctcccgcgtccgaatatcactcatttgtactgtatcacaacaactctccaagatggagtgaactactaaagcttcccattcccgtggacaaatttcggggtgcccatattcggttcgagtttcgtcactgctctaccaaagagaagggcgaaaaaaaactgtttggattctcctttgtgcctctcatgcaggaggacggcagaaccctccccgacgggacacacgagctgatcgtacataaatgtgaggaaaatactaatttgcaagatacgaccaggtatctgaaattaccattcagtaaagggatcttccttgggaataataaccaggcaatgaaggccacaaaagagagcttttgcatcacaagcttcttgtgcagcacgaagctcacccaaaatggggatatgttggacctactgaagtggcggacacaccccgacaagatcaccggttgcctatcaaaactgaaagagattgacggctccgaaatcgtcaagttcttgcaggacacacttgatactctgttcgggatcctggatgagaacagccaaaaatatggctcgaaggtcttcgacagtctcgtgcatatcatcaatctgctccaagacagcaagttccaccattttaaaccagtcatggacacttatattgagagccacttcgccggagcgctggcatatagggatttgatcaaggtgctgaagtggtatgtggatcgaatcacggaggcagaacgacaggagcatatccaggaagtcttgaaggctcaggaatatatctttaaatatattgttcaatccagaagattattctcactggcgacgggaggccaaaatgaagaggagtttcgttgctgcatccaggagctcttaatgtctgtgagatttttcctgtctcaggagtccaagggctccggagcattaagccaatcccaggcagtattcctgtcctctttccccgcagtctactctgagcttcttaaattgttcgacgtcagagaggtcgccaatctagtgcaggatacactcggttctctccccaccattctgcatgttgatgactccctgcaggccatcaagctgcagtgcatcggaaaaactgtggaatctcagctgtatacaaatcctgacagccgttacatccttctgccggttgtgttacaccacctccacattcacctgcaggaacagaaggatttgataatgtgcgcaagaatactgagcaatgtgttctgccttatcaagaagaactcctcagaaaagtcagtacttgaggagatcgatgtcatcgtggcatccctgttagacatcctcctgcgcacgattcttgagatcacatctcgtccacaaccctctagctcagcgatgcgattccagttccaggacgtgaccggggagttcgtcgcttgcttgctaagccttctgcgacagatgaccgaccggcactaccagcagttactggactcctttaacactaaggaggagttgcgagatttcctgttacagattttcacggtcttcagaattctgatacggcccgagatgtttcccaaagactggacggtgatgcggctggtggctaataatgtcatcattacaaccgtcctttacctgagcgacgcccttcgtaagaacttcctgaacgagaattttgattataagatatgggactcgtacttctacctggctgtgatttttataaatcagctttgcctgcagctggagatgttcaccccatcaaaaaagaagaaagtcctggagaagtatggagacatgcgcgtgactatggggtgtgagatttttagcatgtggcagaatcttggtgagcacaagctgcacttcattcctgccctcataggcccattcttggaagtgacactcatcccacagccggatctgcgcaatgtgatgattcctatcttccacgacatgatggactgggagcaacgccgctctggcaacttcaagcaagtggaggctaagttaatcgataagcttgattccctaatgagcgagggcaagggggacgaaacatatcgcgaattgttcaattctatcctgttgaagaaaattgagagggagacttggcgtgaaagtggcgttagcctcattgccactgttacacgactgatggaacgacttctggactatcgcgattgcatgaaaatgggtgaggtggacgggaagaaaatcggctgcacagtgagcctcttaaatttctataaaactgagctgaacaaggaggagatgtacatacgctacattcacaagttatatgaccttcatttgaaggcacagaacttcacagaggctgcttacacactgctgctctatgacgagcttttggagtggtcagaccgccccctcagggagtttctcacataccccatgcagactgaatggcaacgcaaagagcacctgcacctcacaatcatacagaacttcgaccggggaaagtgttgggagaacgggattattctgtgccgtaaaatcgcagagcagtatgagtcctattatgattaccgcaatctgagtaagatgaggatgatggaggcgtccttgtatgacaaaatcatggatcagcagcgcctggagccagaattctttcgcgttgggttctatggaaagaagtttccattttttctgcggaataaagagtttgtgtgccggggccatgactatgagaggctcgaagcttttcagcagaggatgctgaacgaattcccacacgctattgcaatgcaacatgctaaccagcccgatgaaaccatctttcaggcagaggcccaatacttgcagatctacgctgtcacccctatacctgaaagtcaggaggtgctacagcgagaaggagttccagacaatataaagtcattctacaaggttaaccacatttggaaatttcgttacgaccgcccatttcataaaggcaccaaggataaggaaaacgaattcaagtcactctgggtggagaggacgtctctctaccttgttcaaagcctgccgggcatctccaggtggttcgaggtcgagaagagagaagttgtcgagatgtccccattagaaaacgctatcgaagtgctcgagaacaaaaatcagcagctcaaaaccctgattagccagtgtcagacccgtcaaatgcaaaatatcaacccactgactatgtgtcttaacggggttattgacgccgctgtgaatggcggcgtgagtcgctaccaagaggctttttttgtgaaggaatacattctttctcatcctgaagacggcgagaaaattgctaggctccgggagctcatgctcgagcaagcacagatattagaattcgggctagcagtgcatgagaagttcgtgccccaggacatgcggccactccataagaaactcgtggaccaattcttcgtgatgaagagctcactgggaatccaagaattttccgcctgcatgcaggccagtcccgtacacttccctaatggatctcctagagtgtgtcggaacagcgcgccagcaagcgttagccccgacggcacccgtgtgatccctcgccgaagtccactcagttaccccgcggtgaaccgatacagctcaagcagcctgtcttcccaggcctctgctgaggtatctaacatcacgggccagagcgaatcctccgatgaggtgttcaacatgcagcctagcccttccacctcctcactgagctctacccactccgcctcacccaatgtgaccagcagcgccccgtcgtcggccagagctagccccttactttcagacaaacacaaacactctcgtgagaatagctgtttgagtcctagagaacgaccttgcagtgcaatctatcccacccccgttgagccgagccagaggatgctatttaatcacatcggggatggagcactgccccgaagtgaccctaatctctcagctcccgaaaaagctgtaaatcccacgccctcaagctggtctctcgacagtgggaaagaggcaaagaacatgagcgactcaggcaaactcatttctccacctgtgcccccgcgccccacgcagaccgcatcccctgcaagacacaccacatcagtcagccctagtcctgccggcagaagtcccctgaagggatctgtccagagcttcacgcctagtcctgtggagtaccatagtcctgggctgatcagtaattcccccgtgctgtcgggtagctactccagcgggatttcctcactgtctagatgctccacttccgagacatccggctttgagaatcaggtcaacgagcagagtgctcccctacctgtgcctgtaccagtgcccgtgccctcatatggtggcgaagagcccgtcaggaaagagtccaagactccgcctccgtacagcgtttacgaaagaacgctcaggcggcccgttcccctccctcatagcctgtccatcccagtcacgagtgagccacccgcccttccacccaagccgctcgcagctcgaagttcgcatttggagaatggtgctcgcagaaccgacccaggccccaggcctcggccgctacctcgaaaggtgagccagctttag

SEQ ID NO: 181694 - DNA, 5901 bp, Artificial Sequence
  derived and/or modified sequence
atgtggattccaaccgagcacgagaagtacggcgtggtaattgcctcatttcggggcaccgtcccctacggtctgtctctggaaattggagacacagtgcagattctcgagaaatgcgatggatggtatcgcgggttcgctctgaaaaatcctaatattaaggggatcttcccttcaagttatgtgcatctaaaaaacgcgtgtgttaagaataagggacaattcgaaatggtaatccccacagaagactccgtgatcacagagatgacatctactcttcgagattggggtaccatgtggaagcagctgtacgtgcgaaacgagggcgacctgtttcataggttatggcacattatgaacgaaattctggatctgagacgccaggttttggtgggccacctcacacatgatagaatgaaggatgtgaagagacacatcacagcgcgcctagactgggggaacgagcaactgggactcgatcttgtccccaggaaggaatacgccatggttgatcccgaggacattagtattactgaactgtaccggttaatggagcaccgccaccgcaaaaaggatacccccgtacaggcctcatctcatcatctctttgtgcagatgaaatccttgatgtgttccaaccttggtgaagagctggaagtcatttttagtctgttcgacagcaaagagaaccggcctatctcggaaaggttttttttacgactaaacaggaatgggttgcctaaggccccagacaaaccggagcgtcactgcagtctctttgtggatctcggatcctccgagcttagaaaagacatctacataacagttcacatcatccgcatcggaaggatgggagctggcgagaaaaaaaacgcctgtagcgtccagtatcggcgtcctttcggttgcgccgtgctgagcatcgctgatctgctcacaggtgagacaaaggatgacctaatcctcaaagtgtatatgtgcaataccgaatcggagtggtaccaaatccacgagaatattataaagaagctcaatgctaggtataacctgacaggttctaacgctgggctggccgtatccctccagttactgcatggagatatcgagcaaattagacgagaatattcatccgtgtttagccatggagtctctatcacacgaaagctcgggttttccaatatcattatgccaggagagatgcgcaatgacctgtacatcaccattgagaggggcgaattcgaaaaaggggggaagagcgtcgctcgaaacgtggaagtaaccatgtttatagtggacagcagtggccagactctcaaggacttcatttctttcggctcgggagaaccaccagcctcagaataccatagcttcgtgttataccataacaatagcccccgttggagcgagttgctcaaactgcctatcccagttgacaagttcaggggagcgcacatcagattcgaatttcggcactgctccacaaaagagaagggcgaaaaaaagttgtttggtttttcctttgtgcccctgatgcaggaagacggccgcacgctacccgacggaactcatgaactgatcgtgcataagtgtgaggaaaacaccaacctacaggataccacacgttacctgaaactcccctttagcaaagggatttttcttgggaacaacaaccaagcaatgaaggcgaccaaggagtctttttgcataaccagctttttatgctccacaaagctgacccagaacggtgacatgctcgacctcttgaaatggcggactcaccccgacaaaatcacaggatgcttgtcaaagctgaaggagatcgacggctcggagatcgtgaaattcctccaagatacactggatacattattcgggattctggacgagaattcacaaaagtatggaagtaaagtcttcgactccctcgtgcatatcataaatttgctgcaggactcgaaatttcaccactttaaaccagtgatggacacctacattgagagtcacttcgccggcgcgctcgcttatcgcgatcttattaaagtgctgaagtggtatgtggaccgcattaccgaagccgagcgacaggagcacattcaggaagtgctgaaggctcaggagtatatcttcaagtacattgtccagtcacgccggttattctccctcgccaccggaggccagaatgaggaggaatttagatgctgcattcaagaactgttaatgtctgtcagattctttctgtcgcaagaatcgaagggcagcggggccctgtcacagtcacaagctgtgttcttatcatcgttcccagcagtgtatagcgagctcttgaagctctttgacgtgagagaggtagcaaacctcgtccaggatacacttggctcgctgcccaccatcctccatgtagacgatagtttgcaagctatcaagttgcagtgcatcggcaagactgttgagagtcagctgtacacaaacccagatagccgatatattctgttgcctgtggtgttgcaccacctgcacatccacctacaagagcagaaagacctcatcatgtgtgcgcggattcttagtaacgtcttttgcttaataaagaagaattcgtctgagaaatcagttctggaagaaatcgatgtgatcgtcgcaagcttgttagacatactgctcagaacaattctggagatcacctctcgtccccagcccagcagcagtgccatgcgcttccagtttcaggatgtgacgggtgagtttgtggcttgtttgctatccctgctgcgccagatgaccgatagacactatcagcaactgttggattcatttaacaccaaggaggaactgagagatttcctcctccaaattttcacagtgttcagaattctcattcgaccagaaatgtttcccaaggattggacagtgatgcggctggtcgccaataatgtgattatcacgacggtcctgtacctgtccgacgcgctgcgcaagaatttcctgaacgagaacttcgactataagatctgggattcatacttttatttggccgtaatcttcatcaatcagctgtgcctgcagctcgaaatgttcacgccgtccaagaaaaaaaaagtcctcgaaaaatacggtgatatgagagtaacaatgggttgcgagatcttcagcatgtggcagaacttaggcgagcacaaattgcacttcattcccgcactgataggaccctttttagaagtcacgctcatccctcaacccgacttgaggaacgtgatgattcccatatttcacgatatgatggactgggagcagcgccgatcagggaatttcaagcaggtggaggctaaactgattgacaaactggattcgctgatgagtgaagggaaaggggatgaaacttacagggaactgtttaattccatccttctgaaaaaaatagaacgggaaacttggcgcgaaagcggggtgagtctgattgcaaccgtgacgagattgatggagcgcttgctcgactacagggattgtatgaagatgggggaggtggatggcaaaaagattggttgcacggtgtcgttgctgaatttttataaaactgaattgaacaaagaggaaatgtacattcggtatattcataagctgtatgatcttcacttgaaggctcagaactttacagaggctgcttatacactcctgctttacgatgaactactagagtggtctgataggcccttacgggagtttctgacctatcccatgcagacagaatggcaaagaaaggaacatctgcatctgacgatcattcaaaactttgacagagggaaatgttgggagaatgggatcatcctatgtcgaaagattgctgagcagtacgagtcctactatgattacaggaacttgagtaagatgaggatgatggaagcttccctctacgacaagataatggaccaacagaggctcgagccagagttctttagagtaggcttctacggaaaaaaattccccttttttctgaggaataaggagttcgtgtgcagaggtcacgattacgaacgactagaagccttccagcagcggatgcttaacgagttcccccatgcaatcgctatgcagcatgcaaatcaacctgacgaaacaatctttcaggctgaggcccagtacctacagatctatgcagtaacccctattccggaaagccaggaggttctccagagagagggagtaccagataatatcaagagcttttataaggttaatcacatctggaagtttcgatatgatcgcccctttcacaagggcacgaaggacaaagagaacgagtttaaatccctctgggtggaacgaacatctctgtatctcgttcagtcattgcccggcatttctagatggtttgaggtcgagaaacgcgaggtagttgagatgagtccactcgaaaatgcgattgaggttctggaaaataagaaccagcagctgaaaacgctgatttcacagtgtcagacgcgccagatgcagaatatcaaccctttgaccatgtgtctcaatggtgtgattgatgccgccgtaaacggaggggtgagccgttatcaggaggcattctttgtgaaggaatacattttaagccaccctgaggacggagagaaaatcgcgcggctgcgcgaactaatgctggaacaggcccaaatcctcgagtttggcctggccgtccacgaaaaattcgttccgcaagacatgcgacctctgcacaagaagctagtagaccagtttttcgtgatgaaaagctcactgggcattcaggagttttctgcctgcatgcaggcttccccggttcactttccgaatggatccccccgggtctgccggaacagcgcacctgcctctgtctcccccgatggtaccagagtgatcccaaggcgctctcctctgtcatacccagctgtgaacaggtactcttctagctctctatcttctcaggccagcgcagaggtatccaacataaccggtcagtccgaaagcagtgacgaggttttcaacatgcagccttccccttctacatcttctttgagttccacccatagtgcctcgcccaacgtgacctcttccgcacccagctcagcaagggccagcccactgctgtctgacaagcataaacatagtagggaaaactcttgtctgagcccccgcgaaagaccatgttctgctatctaccccacaccagtcgaaccttcacagagaatgttgtttaatcatataggcgatggggccctgcccagatcagaccccaacctgtcagctcccgagaaagcggtgaaccctactccgagttcctggtcacttgactccgggaaggaggcaaagaacatgagcgactcgggaaagctaattagcccaccagtgccaccaaggccgacacaaacagcctctcctgcgcgacatacaacatcggtttctccctctcctgctgggagatctccactgaagggatcagttcagtcctttaccccttcccctgttgagtaccactcacctggacttatctccaactcaccagtcctttctggatcatacagtagcggaatctcgtctctgagccgctgcagcacatctgaaacaagtggctttgaaaaccaggtgaacgaacaaagtgccccactccctgtccccgtgccggttcccgtgccgtcttacggcggagaagaaccagtccgcaaagaaagtaaaacccccccgccttactccgtctatgagcggactctccggcggcccgtgcccctgcctcatagcctgtctattcccgtaactagcgaacccccagctctgcccccgaagccattggcagctagatcctcccacctcgaaaacggagcccgaagaaccgatccgggcccacgaccacggccactgcctaggaaggtatctcagctctag

SEQ ID NO: 181695 - DNA, 5865 bp, Artificial Sequence
  derived and/or modified sequence
gtcatcgccagcttccggggcaccgtgccctacggcctgagcctggagattggagacacagtgcagatcctggagaagtgtgatggctggtaccggggctttgccctgaagaaccccaacatcaagggcatcttccccagcagctatgtgcacctgaagaatgcctgtgtgaagaacaagggccagtttgagatggtgatccccacagaggacagcgtcatcacagagatgaccagcaccctgcgggactggggcaccatgtggaagcagctgtatgtgagaaatgaaggagacctcttccaccggctgtggcacatcatgaatgagatcctggacctgcggcggcaggtgctggtgggccacctgacccatgacaggatgaaggatgtgaagaggcacatcacagcccggctggactggggcaatgagcagctgggcctggacctggtgcccaggaaggagtatgccatggtggaccctgaggacatcagcatcacagagctgtaccgcctgatggagcaccgccacaggaagaaggacacccctgtgcaggccagcagccaccacctgtttgtgcagatgaagagcctgatgtgcagcaacctgggggaggagctggaggtgatcttcagcctgtttgacagcaaagaaaatcggcccatcagcgagcgcttcttcctgcggctgaacagaaatggcctgcccaaggccccagacaagccagagcggcactgcagcctgtttgtggacctgggcagcagcgagctgaggaaggacatctacatcaccgtgcacatcatcagaattggaaggatgggcgctggggagaagaagaatgcctgcagcgtgcagtaccgccggcccttcggctgtgctgtgctgagcattgctgacctgctgactggagagaccaaggatgacctgatcctgaaggtgtacatgtgcaacacagaaagtgagtggtaccagatccacgagaacatcatcaagaagctgaatgcccgctacaacctgaccggcagcaatgccggcctggccgtgtccctgcagctgctgcatggagacatcgagcagatccggcgggagtacagctctgtgttcagccatggagtgtccatcaccaggaagctgggcttcagcaacatcatcatgcctggagagatgagaaatgacctgtacatcaccatcgagcggggggagtttgagaagggcggcaagtctgtggccagaaatgtggaggtgaccatgttcatcgtggacagcagcggccagaccctgaaggacttcatcagctttggcagcggggagcccccagccagcgagtaccacagctttgtgctgtaccacaacaacagcccccgctggagcgagctgctgaagctgcccatccctgtggacaagttccggggggcccacatccgctttgagttccgccactgcagcaccaaggagaagggggagaagaagctgtttggcttctcctttgtgcccctgatgcaggaggatggccgcaccctgcctgatggcacccatgagctgattgtgcacaagtgtgaggagaacaccaacctgcaggacaccacccgctacctgaagctgcccttcagcaagggcatcttcctgggcaacaacaaccaggccatgaaggccaccaaggagagcttctgcatcaccagcttcctgtgcagcaccaagctgacccagaatggagacatgctggacctgctgaagtggaggacccacccagacaagatcaccggctgcctgagcaagctgaaggagattgatggcagcgagatcgtgaagttcctgcaggacaccctggacaccctgtttggcatcctggatgagaacagccagaagtatggcagcaaggtgtttgacagcctggtgcacatcatcaacctgctgcaggacagcaagttccaccacttcaagcctgtgatggacacctacatcgagagccactttgctggggccctggcctacagagacctgatcaaggtgctgaagtggtacgtggaccgcatcacagaggccgagcggcaggagcacatccaggaggtgctgaaggcccaggagtacatcttcaagtacatcgtgcagagccggcggctcttcagcctggccactggaggccagaatgaggaggagttccgctgctgcatccaggagctgctgatgtctgtgcgcttcttcctgagccaggagagcaaaggaagtggggccctgagccagagccaggccgtgttcctgagcagcttccctgctgtgtacagcgagctgctgaagctgtttgatgtgcgggaggtggccaacctggtgcaggacaccctgggcagcctgcccaccatcctgcacgtggatgacagcctgcaggccatcaagctgcagtgcatcggcaagacagtggagagccagctgtacaccaacccagacagccgctacatcctgctgcctgtggtgctgcaccacctgcacatccacctgcaggagcagaaggacctgatcatgtgtgcccgcatcctgagcaatgtgttctgcctgatcaagaagaacagcagcgagaagtctgtgctggaggagattgatgtgattgtggccagcctgctggacatcctgctgcggaccatcctggagatcaccagccggccccagcccagcagcagcgccatgaggttccagttccaggatgtgactggagaatttgtggcctgcctgctgagcctgctgcggcagatgacagacagacactaccagcagctgctggacagcttcaacaccaaggaggagctgcgggacttcctgctgcagatcttcaccgtcttccgcatcctgatccggcctgagatgttccccaaggactggacagtgatgaggctggtggccaacaacgtcatcatcaccaccgtgctgtacctgagtgatgccctgaggaagaacttcctgaatgaaaattttgactacaagatctgggacagctacttctacctggccgtcatcttcatcaaccagctgtgcctgcagctggagatgttcacccccagcaagaagaagaaggtgctggagaagtatggagacatgagggtgaccatgggctgtgagatcttctccatgtggcagaacctgggggagcacaagctgcacttcatcccagccctgattggccccttcctggaggtgaccctcatcccccagcctgacctgagaaatgtgatgatccccatcttccatgacatgatggactgggagcagaggaggagcggcaacttcaagcaggtggaggccaagctgattgacaagctggacagcctgatgtctgagggcaaaggagatgagacctaccgggagctgttcaacagcatcctgctgaagaagattgagcgggagacctggagggagagcggcgtgtccctcatcgccaccgtgacccggctgatggagcggctgctggactacagagactgcatgaagatgggagaggtggatggcaagaagattggctgcaccgtgtccctgctgaacttctacaagacagagctgaacaaggaggagatgtacatccgctacatccacaagctgtatgacctgcacctgaaggcccagaacttcacagaagctgcctacaccctgctgctgtatgatgagctgctggagtggagcgaccggcccctgcgggagttcctgacctaccccatgcagacagagtggcagaggaaggagcacctgcacctgaccatcatccagaactttgaccggggcaagtgctgggagaatggcatcatcctgtgcaggaagattgctgagcagtatgagagctactatgactacagaaacctgagcaagatgaggatgatggaggccagcctgtatgacaagatcatggaccagcagaggctggagcctgagttcttccgggtgggcttctacggcaagaagttccccttcttcctgaggaacaaggagtttgtgtgccggggccatgactatgaaaggctggaggccttccagcagaggatgctgaatgagttcccccacgccatcgccatgcagcacgccaaccagccagatgagaccatcttccaggccgaggcccagtacctgcagatctatgctgtgacccccatccctgagagccaggaggtgctgcagcgggagggcgtgcctgacaacatcaagagcttctacaaggtgaaccacatctggaagttccgctatgaccggcccttccacaagggcaccaaggacaaggaaaatgagttcaagagcctgtgggtggagaggaccagcctgtacctggtgcagagcctgcccggcatcagccgctggtttgaggtggagaagcgggaggtggtggagatgagccccctggagaatgccatcgaggtgctggagaacaagaaccagcagctgaagaccctcatcagccagtgccagacccggcagatgcagaacatcaaccccctgaccatgtgcctgaatggagtgattgatgctgctgtgaatggaggagtgagccgctaccaggaggccttctttgtgaaggagtacatcctgagccacccagaagatggagagaagatcgcccggctgcgggagctgatgctggagcaggcccagatcctggagtttggcctggccgtgcatgagaagtttgtgccccaggacatgaggcccctgcacaagaagctggtggaccagttctttgtgatgaagagcagcctgggcatccaggagttcagcgcctgcatgcaggccagccctgtgcacttccccaacggcagcccccgggtgtgcaggaacagcgccccagcctctgtgtccccagatggcaccagggtcatccccaggaggagccccctgagctacccagctgtgaaccgctacagcagcagcagcctgagcagccaggccagcgctgaggtgagcaacatcaccggccagagcgagagcagtgatgaggtgttcaacatgcagcccagccccagcaccagcagcctgagcagcacccacagcgccagccccaacgtgaccagcagcgcccccagcagcgcccgggccagccccctgctgagtgacaagcacaagcacagccgggagaacagctgcctgagcccccgggagcggccctgcagcgccatctaccccacccctgtggagcccagccagaggatgctgttcaaccacatcggagatggagccctgcccaggagtgaccccaacctgagcgcccctgagaaggctgtgaaccccacccccagctcctggagcctggacagcggcaaggaggccaagaacatgtctgacagcggcaagctgatcagcccccctgtgcccccccggcccacccagacagccagccctgcccggcacaccacctctgtgagccccagccctgctggccgcagccccctgaagggctctgtgcagagcttcacccccagccctgtggagtaccacagccctggcctcatcagcaacagccctgtgctgagcggcagctacagcagcggcatcagcagcctgagccgctgcagcaccagcgagaccagcggctttgagaaccaggtgaatgagcagagcgcccccctgcctgtgcctgtgcctgtgcctgtgcccagctatggaggagaggagcctgtgaggaaggagagcaagaccccaccaccctacagcgtgtatgaaagaaccctgcggcggcctgtgcccctgccccacagcctgagcatccctgtgaccagcgagcccccagccctgccccccaagcccctggccgcccggagcagccacctggagaatggagcccggaggacagaccccggcccccggccccggcccctgcccaggaaggtgtcccagctgtag

SEQ ID NO: 181696 - DNA, 5901 bp, Artificial Sequence
  derived and/or modified sequence
atgtggatccccacagaacatgagaagtatggagtggtgattgccagcttccggggcaccgtgccctacggcctgagcctggagattggagacacagtgcagatcctggagaagtgtgatggctggtaccggggctttgccctgaagaaccccaacatcaagggcatcttccccagcagctatgtgcacctgaagaatgcctgtgtgaagaacaagggccagtttgagatggtgatccccacagaggacagcgtcatcacagagatgaccagcaccctgcgggactggggcaccatgtggaagcagctgtatgtgagaaatgaaggagacctcttccaccggctgtggcacatcatgaatgagatcctggacctgcggcggcaggtgctggtgggccacctgacccatgacaggatgaaggatgtgaagaggcacatcacagcccggctggactggggcaatgagcagctgggcctggacctggtgcccaggaaggagtatgccatggtggaccctgaggacatcagcatcacagagctgtaccgcctgatggagcaccgccacaggaagaaggacacccctgtgcaggccagcagccaccacctgtttgtgcagatgaagagcctgatgtgcagcaacctgggggaggagctggaggtgatcttcagcctgtttgacagcaaagaaaatcggcccatcagcgagcgcttcttcctgcggctgaacagaaatggcctgcccaaggccccagacaagccagagcggcactgcagcctgtttgtggacctgggcagcagcgagctgaggaaggacatctacatcaccgtgcacatcatcagaattggaaggatgggcgctggggagaagaagaatgcctgcagcgtgcagtaccgccggcccttcggctgtgctgtgctgagcattgctgacctgctgactggagagaccaaggatgacctgatcctgaaggtgtacatgtgcaacacagaaagtgagtggtaccagatccacgagaacatcatcaagaagctgaatgcccgctacaacctgaccggcagcaatgccggcctggccgtgtccctgcagctgctgcatggagacatcgagcagatccggcgggagtacagctctgtgttcagccatggagtgtccatcaccaggaagctgggcttcagcaacatcatcatgcctggagagatgagaaatgacctgtacatcaccatcgagcggggggagtttgagaagggcggcaagtctgtggccagaaatgtggaggtgaccatgttcatcgtggacagcagcggccagaccctgaaggacttcatcagctttggcagcggggagcccccagccagcgagtaccacagctttgtgctgtaccacaacaacagcccccgctggagcgagctgctgaagctgcccatccctgtggacaagttccggggggcccacatccgctttgagttccgccactgcagcaccaaggagaagggggagaagaagctgtttggcttctcctttgtgcccctgatgcaggaggatggccgcaccctgcctgatggcacccatgagctgattgtgcacaagtgtgaggagaacaccaacctgcaggacaccacccgctacctgaagctgcccttcagcaagggcatcttcctgggcaacaacaaccaggccatgaaggccaccaaggagagcttctgcatcaccagcttcctgtgcagcaccaagctgacccagaatggagacatgctggacctgctgaagtggaggacccacccagacaagatcaccggctgcctgagcaagctgaaggagattgatggcagcgagatcgtgaagttcctgcaggacaccctggacaccctgtttggcatcctggatgagaacagccagaagtatggcagcaaggtgtttgacagcctggtgcacatcatcaacctgctgcaggacagcaagttccaccacttcaagcctgtgatggacacctacatcgagagccactttgctggggccctggcctacagagacctgatcaaggtgctgaagtggtacgtggaccgcatcacagaggccgagcggcaggagcacatccaggaggtgctgaaggcccaggagtacatcttcaagtacatcgtgcagagccggcggctcttcagcctggccactggaggccagaatgaggaggagttccgctgctgcatccaggagctgctgatgtctgtgcgcttcttcctgagccaggagagcaaaggaagtggggccctgagccagagccaggccgtgttcctgagcagcttccctgctgtgtacagcgagctgctgaagctgtttgatgtgcgggaggtggccaacctggtgcaggacaccctgggcagcctgcccaccatcctgcacgtggatgacagcctgcaggccatcaagctgcagtgcatcggcaagacagtggagagccagctgtacaccaacccagacagccgctacatcctgctgcctgtggtgctgcaccacctgcacatccacctgcaggagcagaaggacctgatcatgtgtgcccgcatcctgagcaatgtgttctgcctgatcaagaagaacagcagcgagaagtctgtgctggaggagattgatgtgattgtggccagcctgctggacatcctgctgcggaccatcctggagatcaccagccggccccagcccagcagcagcgccatgaggttccagttccaggatgtgactggagaatttgtggcctgcctgctgagcctgctgcggcagatgacagacagacactaccagcagctgctggacagcttcaacaccaaggaggagctgcgggacttcctgctgcagatcttcaccgtcttccgcatcctgatccggcctgagatgttccccaaggactggacagtgatgaggctggtggccaacaacgtcatcatcaccaccgtgctgtacctgagtgatgccctgaggaagaacttcctgaatgaaaattttgactacaagatctgggacagctacttctacctggccgtcatcttcatcaaccagctgtgcctgcagctggagatgttcacccccagcaagaagaagaaggtgctggagaagtatggagacatgagggtgaccatgggctgtgagatcttctccatgtggcagaacctgggggagcacaagctgcacttcatcccagccctgattggccccttcctggaggtgaccctcatcccccagcctgacctgagaaatgtgatgatccccatcttccatgacatgatggactgggagcagaggaggagcggcaacttcaagcaggtggaggccaagctgattgacaagctggacagcctgatgtctgagggcaaaggagatgagacctaccgggagctgttcaacagcatcctgctgaagaagattgagcgggagacctggagggagagcggcgtgtccctcatcgccaccgtgacccggctgatggagcggctgctggactacagagactgcatgaagatgggagaggtggatggcaagaagattggctgcaccgtgtccctgctgaacttctacaagacagagctgaacaaggaggagatgtacatccgctacatccacaagctgtatgacctgcacctgaaggcccagaacttcacagaagctgcctacaccctgctgctgtatgatgagctgctggagtggagcgaccggcccctgcgggagttcctgacctaccccatgcagacagagtggcagaggaaggagcacctgcacctgaccatcatccagaactttgaccggggcaagtgctgggagaatggcatcatcctgtgcaggaagattgctgagcagtatgagagctactatgactacagaaacctgagcaagatgaggatgatggaggccagcctgtatgacaagatcatggaccagcagaggctggagcctgagttcttccgggtgggcttctacggcaagaagttccccttcttcctgaggaacaaggagtttgtgtgccggggccatgactatgaaaggctggaggccttccagcagaggatgctgaatgagttcccccacgccatcgccatgcagcacgccaaccagccagatgagaccatcttccaggccgaggcccagtacctgcagatctatgctgtgacccccatccctgagagccaggaggtgctgcagcgggagggcgtgcctgacaacatcaagagcttctacaaggtgaaccacatctggaagttccgctatgaccggcccttccacaagggcaccaaggacaaggaaaatgagttcaagagcctgtgggtggagaggaccagcctgtacctggtgcagagcctgcccggcatcagccgctggtttgaggtggagaagcgggaggtggtggagatgagccccctggagaatgccatcgaggtgctggagaacaagaaccagcagctgaagaccctcatcagccagtgccagacccggcagatgcagaacatcaaccccctgaccatgtgcctgaatggagtgattgatgctgctgtgaatggaggagtgagccgctaccaggaggccttctttgtgaaggagtacatcctgagccacccagaagatggagagaagatcgcccggctgcgggagctgatgctggagcaggcccagatcctggagtttggcctggccgtgcatgagaagtttgtgccccaggacatgaggcccctgcacaagaagctggtggaccagttctttgtgatgaagagcagcctgggcatccaggagttcagcgcctgcatgcaggccagccctgtgcacttccccaacggcagcccccgggtgtgcaggaacagcgccccagcctctgtgtccccagatggcaccagggtcatccccaggaggagccccctgagctacccagctgtgaaccgctacagcagcagcagcctgagcagccaggccagcgctgaggtgagcaacatcaccggccagagcgagagcagtgatgaggtgttcaacatgcagcccagccccagcaccagcagcctgagcagcacccacagcgccagccccaacgtgaccagcagcgcccccagcagcgcccgggccagccccctgctgagtgacaagcacaagcacagccgggagaacagctgcctgagcccccgggagcggccctgcagcgccatctaccccacccctgtggagcccagccagaggatgctgttcaaccacatcggagatggagccctgcccaggagtgaccccaacctgagcgcccctgagaaggctgtgaaccccacccccagctcctggagcctggacagcggcaaggaggccaagaacatgtctgacagcggcaagctgatcagcccccctgtgcccccccggcccacccagacagccagccctgcccggcacaccacctctgtgagccccagccctgctggccgcagccccctgaagggctctgtgcagagcttcacccccagccctgtggagtaccacagccctggcctcatcagcaacagccctgtgctgagcggcagctacagcagcggcatcagcagcctgagccgctgcagcaccagcgagaccagcggctttgagaaccaggtgaatgagcagagcgcccccctgcctgtgcctgtgcctgtgcctgtgcccagctatggaggagaggagcctgtgaggaaggagagcaagaccccaccaccctacagcgtgtatgaaagaaccctgcggcggcctgtgcccctgccccacagcctgagcatccctgtgaccagcgagcccccagccctgccccccaagcccctggccgcccggagcagccacctggagaatggagcccggaggacagaccccggcccccggccccggcccctgcccaggaaggtgtcccagctgtag

SEQ ID NO: 181697 - DNA, 5865 bp, Artificial Sequence
  derived and/or modified sequence
gtgatcgccagcttccggggcaccgtgccctacggcctgagcctggagattggcgataccgtccagatcctcgagaaatgcgatggatggtatcgaggcttcgcgctgaagaaccccaatatcaagggtatttttccctcttcctacgtgcacctgaagaatgcttgtgtgaagaataaagggcaatttgagatggtcatcccaaccgaagatagcgtgatcaccgagatgactagcacattgagggactggggaacaatgtggaaacagctgtacgtgcgcaacgagggcgatctgtttcaccgactgtggcatataatgaacgaaatcctcgaccttaggcgccaggtgctggtcggacacttgacccatgaccgtatgaaggacgtgaagcgccatatcaccgcccggctggactgggggaacgagcagctgggtctagacctcgtcccaagaaaggaatacgcaatggtggatcctgaggacatctctattaccgaactgtaccggttgatggaacacaggcacagaaaaaaggatacgcctgtgcaggctagtagccatcatttatttgtgcagatgaagtctctgatgtgtagtaatttgggagaggagctcgaggtgatctttagcttgttcgactccaaggagaaccgccctatcagcgaacgcttcttcctgcgtcttaaccggaatggactgcctaaggcccccgacaaaccagagaggcactgttccctgtttgtggatctcggcagttccgagcttcggaaggacatctatattactgttcacattattcggatagggcgtatgggggctggggaaaagaaaaatgcttgttccgttcagtaccgtagaccttttggctgtgcggtgctgtcaattgccgatctactgactggcgaaacaaaagacgatctgattctgaaggtgtacatgtgtaatacagagagcgaatggtaccagatccacgagaacattatcaaaaagctgaatgctagatacaatctgaccggcagcaatgccggcctggccgtatctctgcagctcctgcacggggacatcgaacagattcgccgggaatactcatcagtgttctctcacggagtgtcaattactagaaaactcggcttctctaacatcataatgcccggagagatgcggaacgatctctatattacgatcgagcgcggagaattcgagaagggcgggaagtcagtggcccgcaacgtcgaagttaccatgtttatcgtcgactctagtggacagactttaaaggatttcataagtttcggaagtggagagcctcctgccagcgaataccacagctttgtgctctaccacaacaacagtcccaggtggtcagagctgctcaaactacctattcctgttgacaaatttcggggcgcgcacattagattcgagtttcggcattgcagcacaaaggagaagggggagaaaaagctgtttgggttttccttcgttcctctcatgcaggaggatgggcgaaccctcccagacggcacacatgaattgattgttcacaagtgcgaggaaaatacgaatctacaggataccacgcggtacctaaagctcccttttagcaagggcatctttctcggaaataacaaccaggccatgaaggctaccaaggagagcttctgcattaccagctttctctgctctaccaaactcacccagaatggtgacatgctggatctactgaagtggagaacccatcccgataagataaccgggtgtctgagcaaactgaaggaaattgatgggagtgagattgtcaagtttctgcaggatacactggatacgctctttggcattttggacgagaactcccagaaatatggttctaaagtgttcgatagcttggtgcacattatcaatctactgcaggactcgaaattccaccatttcaagccagtgatggacacctacattgagagtcattttgcaggcgcattagcttacagagacctgattaaggtcttgaaatggtacgtggaccgcatcaccgaggccgagagacaggaacacatccaggaagtgcttaaggcacaggagtatattttcaagtacattgtccagtctaggaggctattttccctcgctacaggcgggcaaaatgaggaggagttccggtgttgcatccaggagcttctgatgtccgtccggttcttcctgtctcaggagtctaagggcagtggtgccttatcacaatctcaagctgtctttctgtcttctttccccgccgtgtactcagaactgctgaagctgtttgatgtgcgagaggtggccaatctcgtccaggatacattaggctccttgcccactatacttcatgttgatgattctctgcaggctatcaagctccagtgcattgggaaaactgtggaatctcaactatacacgaaccccgactccaggtacattttactgcccgtggtcttgcaccacctccatatccatctgcaagaacagaaagatctcatcatgtgtgccaggatcttgtctaacgtcttctgtctgatcaaaaagaactcaagcgagaaatcggtcctcgaggaaatcgatgtgattgtcgcatctctcctggatattttgcttcgaacgattttagaaatcacaagccgccctcagccaagttcttctgcaatgagattccagttccaggatgttactggggagttcgtggcctgcctgttaagtcttttaagacagatgaccgatcgtcattatcagcagctactggatagctttaatacaaaagaagaattaagggattttctgctgcaaatcttcacggtatttcgaattttaataaggccagagatgttccccaaggactggaccgtgatgcgactagtggcaaacaacgtaatcatcactacagtgctatacctttccgatgctttgcgtaaaaatttcttaaacgaaaattttgactacaaaatctgggattcatacttttacctcgccgtgattttcatcaatcaactgtgtttacagctggaaatgtttacacccagcaaaaagaaaaaggtgctcgagaagtatggggacatgcgggttactatgggctgcgaaatttttagcatgtggcagaatttgggtgagcacaaacttcatttcattcctgcactgataggaccattcttggaagtgacattgatacctcagccggacctcagaaatgtaatgatccccatcttccacgacatgatggactgggaacagcgcaggagtggcaattttaagcaagtggaggctaagttaatagataagctggactcattgatgagtgaaggcaagggagacgagacttaccgcgagctgtttaatagtattttgctaaagaagatcgagagggaaacctggagagagtctggggttagtctgatagccacagtgacgagactgatggaaaggctcctggactacagagattgcatgaagatgggcgaggtggatgggaaaaagatcggttgtaccgtttccctgcttaacttctacaagactgaactcaacaaggaggaaatgtatatccgatatatacataaattgtatgacctccatttgaaagcccagaatttcacagaggccgcatacacgttactactgtacgacgagctactggagtggtctgatagacccctgagggagttcctgacgtatccaatgcagacagagtggcagcgaaaagagcatctacatctgaccattattcagaattttgataggggaaaatgctgggagaatgggatcattctgtgccggaagattgctgagcagtacgaaagttattatgactaccgcaacctctcgaaaatgcgcatgatggaagcaagcttgtacgataaaattatggatcagcagagactggaacccgaattcttccgggttggcttttatggtaagaaatttccctttttccttaggaataaagaatttgtgtgcagaggacacgactacgaaaggcttgaggcattccagcagcgaatgctgaacgaattcccacacgctattgccatgcagcatgcaaaccagcccgacgaaacgatcttccaagccgaagcccagtacttacagatctatgctgtcacaccaatccccgaaagccaagaagtgctgcaacgcgagggagtccccgacaacatcaagtctttttataaagtcaaccacatctggaagtttcggtacgaccggcccttccacaaaggcaccaaggacaaggagaacgaattcaaatccttgtgggtcgagcgaacatccttatacctcgtccagagccttcccggtatctctagatggtttgaagttgagaaacgggaggtagttgagatgtcacctcttgagaacgccatagaagttcttgaaaataagaaccagcagctgaagacactgatctcacagtgtcagacccggcagatgcagaacatcaatcctttgacaatgtgtcttaatggcgtaatcgacgcggctgtcaacgggggtgtgtcgaggtatcaggaggcttttttcgtgaaggagtatatactgtcacacccagaagacggagaaaagattgctcgattgagagagctgatgttggagcaggcacaaatcctcgagtttggactggctgtacacgagaagtttgttccacaggacatgaggcctctacataaaaaactggtggaccaattctttgtgatgaagagcagcctggggatccaggaattcagcgcttgcatgcaagcaagtcctgtgcacttccctaacgggtctccccgcgtgtgcaggaattcagctcccgctagtgtcagcccagatggcactcgggtaattcctaggcggagtcctctgtcctatccagccgtcaacagatacagttcttcttccctctcatcccaggctagtgccgaagtgagtaatattactggacagtccgaaagctccgacgaggttttcaatatgcaacctagcccctcgacaagctccctgtctagtacgcattctgcatctcctaatgttaccagcagcgccccgtcttccgcgcgagccagccctctgctctcggataaacataagcacagcagagaaaactcatgtctatcccccagagaacgaccctgttcagcaatctacccgactccagtagagccttctcagcgcatgctgttcaatcatatcggggatggggcgctcccacggagtgatccaaacctcagcgcacctgagaaggcagtgaatccgactccttcatcatggagcctagattctgggaaggaggccaaaaatatgtcagactctggaaagctgatttcccccccggtgcctccaaggcccacccagacagcaagccccgcacggcacaccacctccgtgtctcctagccccgctggtcgctctccgctcaaaggatctgtacagtcattcaccccatctcccgtggagtatcacagtccgggcctgatttcaaattccccagtgctgagtggctcctattcgagcggcatctcctccctaagccgctgctccaccagcgagacaagcggattcgagaaccaggtaaatgaacagtctgcccctctgcccgtgccggtccctgttccagtgccaagctacggaggtgaagagccagtcagaaaggaatcaaaaacaccaccaccttactcagtatacgagagaactttgaggcgacctgtcccgcttccccactctctgagcattcccgtgacgtctgagccaccagccctgccgccgaaacccttggctgcccgaagcagtcacctcgagaacggtgcccggcggactgacccaggtcccagacctcgtcccctgcctaggaaagtgtctcagctctag

SEQ ID NO: 181698 - DNA, 5901 bp, Artificial Sequence
  derived and/or modified sequence
atgtggatccccaccgagcacgagaagtacggcgtggtgatcgcctcatttaggggtacagtcccctacggcctgtctctggagatcggggacacggtgcagatactggagaagtgtgacggctggtaccgcggcttcgccctgaaaaacccaaacattaaagggatcttcccaagctcctatgtccacctgaaaaacgcttgtgtgaaaaataagggtcaatttgaaatggtaataccaaccgaggacagtgttatcactgaaatgacgtccaccctgcgcgattggggaactatgtggaagcagctttacgtgagaaatgaaggcgatctctttcatcgtctttggcacattatgaacgagatcctggacttgcggcggcaggtcctcgttggacatctcacacacgaccgcatgaaagatgtcaagcggcacatcacagccaggctcgattggggcaacgaacaattggggctggacttagtgcccagaaaggagtacgctatggtggacccagaggatatcagcattacagagctttaccgactgatggagcatagacaccgcaaaaaagacacacctgttcaggcgagcagtcaccatctgtttgttcaaatgaagtcattgatgtgctcgaatctgggagaagagcttgaagtcatcttcagcctgttcgatagcaaggaaaacagaccgatatcagagcggttcttcctgcgcctgaacaggaacggtttaccaaaagcccccgacaagccagagagacattgtagcctctttgtagaccttgggtcctccgagcttaggaaggacatttacatcactgtgcacattatcaggatcggccggatgggagcgggggaaaagaagaacgcctgtagtgttcagtatcgccggcctttcgggtgcgcagtgctgtctatcgctgatctgttgactggagagactaaggatgacctcattttgaaggtttacatgtgcaacaccgaatctgagtggtaccagatccacgagaacatcattaaaaagctgaacgcgaggtacaacttgacaggaagcaacgccggactcgcagtttccctccagttgctgcatggcgacatcgaacagatccgacgcgaatactcatccgttttctcgcatggagtatcaatcacccgcaaactggggttttccaacataatcatgccgggcgaaatgaggaatgacctctacattaccatcgagaggggggagttcgagaaggggggcaagtcagtcgctcgaaacgtggaggtgacaatgtttatcgttgacagctccggacagacactaaaagacttcataagcttcggcagcggcgaaccgccagccagcgagtaccacagctttgtcctgtaccacaacaactccccccggtggtctgagttgctcaaattgcctatcccggttgataagtttaggggggcccacatcaggtttgaattcagacactgcagtactaaagagaagggagaaaaaaagctctttggctttagcttcgtgccactgatgcaggaggatggccgtacactcccggacggcacacacgagctaattgtacataagtgcgaggagaacaccaatctgcaggatactacccgctaccttaaattgcctttttcaaagggcattttcctggggaataacaaccaggccatgaaagctaccaaagagagcttctgcataaccagtttcctgtgcagcacaaagctgactcaaaacggcgatatgctcgatcttctaaagtggcggacccaccccgataagatcacagggtgtctgagcaagctgaaggagatcgacgggtccgaaatcgtgaaatttcttcaggacactcttgacactttgtttggaatcctcgatgagaattctcagaaatacgggagtaaggtattcgactcgcttgtgcatatcataaacctgttgcaagattccaagtttcatcactttaaaccagttatggatacttacatagagagccattttgccggagctctggcataccgagatctaatcaaagttctcaaatggtacgtggaccggattactgaggcggagcggcaggagcacatccaagaggttttaaaggcccaggagtatatcttcaagtacatagtgcagagcagacgcttattctctctggcgactggaggacagaacgaggaggaattccgctgttgtattcaggagctgctgatgagtgtccggttttttttgagtcaggagtcaaaaggttcaggggctctaagtcagtctcaagcggtgttcctctcctctttccctgcggtgtatagcgaactcctgaagctgttcgatgtaagagaagtggccaacctcgtgcaggatacactgggctccctgcctaccattctgcacgtcgatgacagtctgcaagccattaaattgcagtgtatcgggaaaaccgtggaaagtcaactgtacaccaaccccgactctaggtacatcctgctcccggtggttctccatcacttgcacatccacctgcaagagcagaaggatctcataatgtgtgcaagaattctctcaaatgtgttctgtttgatcaaaaaaaattcctctgagaaatcagtgctcgaggagatagacgtgatcgtggcaagtcttcttgatatcctcctgcgcacaattttagagataaccagccggcctcagccttcgtctagcgccatgagatttcagttccaggatgtgaccggggagtttgttgcttgtctcctcagcctgctgcgccaaatgaccgaccggcactatcagcaactcctcgacagcttcaacacaaaggaggaattacgggacttcctgctgcagatttttactgtgtttaggatcctcattagacctgaaatgttcccaaaggactggactgtcatgcggttagtggcaaataacgtgataattaccaccgtgctgtacctgagcgacgcgctcaggaaaaatttccttaacgaaaatttcgactacaagatctgggattcatatttctatcttgctgtgatattcatcaaccagctgtgtctgcagctggagatgttcactccctcaaagaagaagaaggtgctcgagaagtatggagatatgagagtgaccatgggttgtgagattttttcgatgtggcagaacctgggcgagcataagctacacttcattcccgccctgatcgggcccttcctggaggttaccctgattccacagcccgacttgcgcaatgtgatgatccccatctttcatgacatgatggactgggagcaaaggaggagcgggaattttaaacaagtagaagctaaattaatagataagctggattctctcatgtcagagggtaaaggagatgaaacctatcgcgaactgtttaactccattttattgaaaaagatagagagggagacctggcgcgagagcggggtctctcttatcgctaccgtaacacgcctaatggaacgactactggactatcgggattgtatgaaaatgggcgaggtggacggcaagaagattggctgcactgtgtccctgttgaatttctataagacggaactcaataaggaggagatgtatatcagatatatccacaagctgtacgacctacacctgaaggcccagaactttacggaggccgcctataccctgctgctttacgacgagctccttgaatggtccgaccgtccgctgcgtgaatttctgacctatcccatgcagaccgagtggcaaaggaaagagcatcttcatttgactatcatccagaactttgaccgagggaaatgttgggaaaacggcattatactctgccgcaagatagccgaacagtacgagtcctattacgactaccgcaacctgtctaagatgcgaatgatggaggcatccctgtacgataaaataatggaccagcaacggctagagccagagtttttcagagtggggttctacgggaaaaaatttccattcttcctgagaaataaggaattcgtgtgtcggggccacgactatgagcgcctggaagcctttcaacagaggatgttaaacgagttccctcacgccatcgcaatgcagcatgcgaaccagccagacgaaacgatcttccaggccgaagcccagtacctgcagatttatgcagtcactcccatcccagagtcccaggaggtgctgcagagagagggcgtgcccgataatatcaagtcattttacaaggttaaccacatatggaaatttagatacgaccgccccttccacaagggaacaaaggacaaggagaacgagtttaagtccctgtgggtggagagaacctctctgtacctcgtccagtcactccctggtatttccaggtggtttgaagtggagaagagagaggtcgtcgaaatgagtcccctggagaacgccattgaagttctggagaataaaaatcaacagcttaagaccctcatcagccaatgtcagacccggcagatgcagaatatcaaccccttgaccatgtgtctaaatggagttattgacgcagccgtcaatgggggtgtgagccgctatcaagaggccttcttcgtgaaggagtatattctgtctcatcccgaggacggcgaaaaaattgcccggttaagagagcttatgcttgagcaggctcagatcttggagtttgggctcgctgtgcacgagaagtttgtgccacaagatatgcgaccgctgcacaaaaagttggtagatcaattttttgtgatgaagagctccttaggtattcaagagtttagcgcctgtatgcaagcatctccggtgcatttccctaatggttccccgagggtctgtaggaatagcgcccctgcatcagtctctccagacggaaccagggttatccctcgacggtctcctctgagttacccagccgtgaacagatacagcagctctagtctttcctcacaggcctctgccgaggtttccaatatcactggacagtcagagagctcagacgaggtttttaacatgcaaccctctcccagtaccagttcactgagctctacgcattctgcttctcctaacgtgacttcctctgctccaagcagtgctagagctagtcctctactcagcgacaagcacaagcactctcgggaaaactcctgcctgtcaccgcgggagcggccctgttctgcaatataccctacaccagtggagccctcccagaggatgctctttaatcatatcggagacggagctcttcctagaagcgatccaaacctctcagcccctgaaaaagcagtgaatcctacccccagttcctggtctctggactccgggaaggaggcgaaaaatatgtctgactcgggcaaactcatatcccctcccgtgccaccacggcccacccagaccgcgtctcctgccagacacacgacgtccgtgagtccttccccggccggacgatccccactaaaaggatccgtccagagtttcactcctagccctgtggagtatcattctccaggactgattagtaacagtcccgtcttatctggcagttattcgagcggaatttctagtttaagccgctgctccacaagcgaaaccagcggcttcgagaaccaagttaatgagcagagtgctcccttgcccgtgcctgtacctgtccccgttcctagttacggtggggaggaacctgtgcgaaaggaaagcaagacacctccgccgtattcggtctacgagaggacacttcggcgcccggtgcccctcccccacagcctctccattcctgttacatcggagcctcctgccttgccaccaaagccccttgccgcacgctcctcccacctggagaacggcgctcggaggactgatcccggacctaggcctaggcctcttccgcggaaagttagtcagctgtag

SEQ ID NO: 181699 - DNA, 5864 bp, Artificial Sequence
  derived and/or modified sequence
gttatcgcaagctttagaggcacagttccatacgggttaagtttggaaattggcgatactgtgcaaatcctagagaagtgtgacggatggtataggggttttgctctgaaaaatcccaacattaagggcattttccctagtagctacgtgcatttaaagaacgcctgcgtgaaaaataaggggcagtttgagatggttattcccactgaggactccgtgattaccgaaatgaccagcaccttgagggactggggcactatgtggaagcaactgtacgtgcgcaatgaaggagatttgttccaccgcttatggcacataatgaacgaaatattagacctgcgcaggcaggtgctcgttggacacctgacacacgatcggatgaaggacgtgaaacgccacatcactgccaggctagactggggtaacgagcagctgggcctggacctggtgccccgtaaagaatatgctatggtcgatcctgaagacataagtattacagaactgtataggctcatggaacaccggcatagaaagaaggacacaccagtgcaggctagtagtcatcatctattcgtgcaaatgaaaagcctgatgtgctccaacctaggagaagagttagaggtcatcttcagcttgtttgattccaaagagaaccggccaatctcagagcgtttctttctgaggctcaaccgcaacgggttacctaaggctcctgataagccggagcggcattgctctcttttcgtggatctgggaagcagcgagttgcggaaagatatttatattacagtgcatatcattcggatcggcagaatgggcgcaggcgagaaaaagaatgcatgcagcgtgcagtatcggagaccttttgggtgtgctgtactgtctatcgcagatctccttactggggaaacaaaggacgatctcatcctcaaagtgtacatgtgcaacacggagtcagagtggtaccaaattcacgagaatatcattaagaaactcaatgctcgatacaatctgactggatctaatgctgggttggccgtcagtcttcaactcttacacggcgacatagagcagattcgtagggaatattcgtccgtcttttctcacggtgtaagtatcactaggaagctgggattctccaatatcatcatgccgggagaaatgcgcaatgacctgtatatcacgatcgaaagaggagagtttgaaaaggggggaaagagcgtcgcccgaaatgtagaggtcacaatgttcattgtcgactcttccggacaaactctcaaggattttatctcttttggatcaggagagcctcccgctagcgagtaccactcctttgtgctttatcataacaacagccctagatggtcagagctgttgaagctgcctatccccgtggacaagtttcgaggggctcatatccgcttcgagtttcggcactgttccaccaaagagaaaggcgaaaagaagcttttcggattttcattcgtccctttgatgcaagaagacgggagaaccctgccggatggtacccacgaattaatagtgcacaagtgcgaagagaataccaaccttcaggacaccactaggtacctgaaactccctttctcaaaaggtatatttcttggaaacaacaaccaagccatgaaggccacaaaagaaagcttctgcataacctcattcttatgttctactaagctcactcagaacggtgacatgcttgatctcctcaagtggagaacccaccctgacaagattaccggatgtctttccaagttgaaagagatcgatggtagcgaaatagtaaaatttcttcaagatacactggacactcttttcgggatcctggacgaaaactctcaaaaatacggatctaaagtttttgattccctcgttcatatcattaatcttctccaggatagcaagttccaccactttaagcccgtcatggatacgtacattgagagccatttcgccggagcattggcctacagagacctcatcaaagtcctcaagtggtatgttgacagaatcactgaagcggagcgacaggagcacatccaggaagtgctcaaagcccaggaatacattttcaagtacatagtgcagtcgcgtcgcctgttttctttggccacaggtggccagaacgaagaggaatttagatgctgcattcaggagctgctgatgtcggtgcgcttttttctgagtcaagaatctaaggggagcggcgctttgagccaaagccaggctgtgttcttgtcaagttttccagctgtctatagcgaattactgaagcttttcgacgtgcgcgaagtcgcgaacctggttcaggacacgctcggatctttgcctaccatccttcacgtggatgatagtctgcaggcaattaagctgcagtgcattggaaagactgtggaaagtcagctgtacacgaacccagattcccggtatattctgctgcccgttgtattgcatcatcttcatatacacttgcaggagcagaaggatctgatcatgtgcgctagaattttgtccaacgttttctgtttgattaaaaaaaacagtagcgagaagtccgtgctagaggagattgacgtgattgtcgcaagcctcctggatatactcttacggactatcctggaaatcaccagcaggcctcaaccttcctccagcgccatgaggttccagttccaggacgtaactggagagttcgtagcttgcctgctgtcactgctccggcagatgacagaccgacactaccagcagctcctggactctttcaatactaaagaggaactgagagattttctgcttcagattttcactgtcttcagaatcctcattagacctgaaatgttccccaaggactggactgtgatgagactggtggctaacaacgtgataattaccacagtactgtacctttccgacgctctccggaagaattttctgaatgagaattttgattacaagatttgggactcctatttctatctcgccgtgatcttcataaaccaactgtgtctccagctcgagatgttcactccaagtaagaagaaaaaagtactcgaaaaatatggtgacatgagagtgaccatggggtgtgagattttcagtatgtggcaaaaccttggtgaacacaaactgcactttataccggctcttatagggccattcttggaggtgaccctgattcctcaaccagacctcaggaatgtcatgatccctattttccatgatatgatggattgggaacagcgcagaagcggcaattttaagcaggtggaggcaaaattgatcgataagttggattctctgatgtcagaaggcaaaggggacgaaacttacagagagctgttcaattctattcttttgaagaaaatagaacgcgagacttggcgagagtctggcgtgtctttgattgccacggtgacacgattaatggaaaggctgttagactaccgtgattgtatgaaaatgggcgaagtggatggtaagaagatcggctgcacagtctcccttttgaacttttacaagactgagttaaacaaggaggagatgtatattcggtatattcacaagttatatgatctgcacttgaaagcgcagaactttaccgaagctgcctacaccctactactctacgacgaactgctcgaatggtctgacagaccccttcgcgagtttttgacctaccccatgcaaaccgaatggcagcgaaaagaacacctccatctgactattatccagaattttgaccggggtaagtgctgggaaaatggcatcattctttgtcggaaaatcgcggagcagtatgaaagttattatgattaccggaacctgtccaagatgaggatgatggaagcaagcctgtacgacaagattatggaccaacaacggctggagcctgaattctttagggtggggttctacggtaaaaaattcccttttttcttacgtaataaggagtttgtgtgtaggggccacgattacgaaaggctggaagctttccagcaacggatgctcaacgagtttcctcatgccattgccatgcagcacgctaatcagccagatgagacaattttccaggcggaggcccagtacttacaaatttacgcagttacccccatcccggagtcacaggaggtgttgcagcgagaaggggtgccggataatattaagtccttttacaaagtgaaccacatatggaagtttcggtacgatcggccttttcataaggggacaaaagataaagagaatgagttcaagtctttgtgggtcgaaagaacaagtctttatcttgtgcagagtttacccggaatcagccggtggtttgaagtggagaaacgtgaagtggtggagatgtcacccctagaaaacgcaattgaagttcttgagaataagaaccaacagctcaagaccctcatttcgcagtgccagactagacaaatgcaaaatattaatcccttgaccatgtgtctgaacggagtgatcgatgcggcagtcaacgggggagtgtcaagatatcaggaggccttcttcgtcaaggaatatattctgtcgcatcccgaggacggggaaaaaatcgcacggctcagagagctgatgctggaacaggcccaaatactggagtttggactggccgttcatgagaagtttgttccccaggatatgcggcctctgcataaaaagcttgtcgaccagttctttgtcatgaagtcgtcccttggaatccaggaattcagtgcctgcatgcaggcttcccccgtgcactttcccaacggatctccaagggtctgccgaaatagcgcgccagcatcagtctcccctgacggaacccgagtcatcccaaggaggagtcctttgtcctaccccgctgtcaatcggtactcttcaagttccctgagttcccaggcctctgcagaggtgagtaacatcactggccagtcggagagtagcgatgaggtcttcaacatgcagccttcccccagtacaagcagcctgtcatccactcatagtgcctcacctaacgttaccagcagcgccccatcatcagctagagccagcccacttctctccgacaaacacaaacatagcagagagaactcttgcctttccccaagagagcggccatgtagtgcaatttacccaactccagtcgagccatctcagcggatgttgttcaatcatatcggagatggtgctttacctaggtctgatcctaacctgagtgctcctgagaaagccgtaaatccaactccatcctcctggtccctcgactcaggaaaggaggccaaaaatatgtctgacagcggcaagctgatttcccctccagtacccccacgcccaacacaaaccgcttcccctgctagacacacaaccagtgtgtctccaagtcccgctggcaggtctccactgaagggatccgttcagagctttacccctagcccagtagagtaccattctccaggactcatttctaacagtcccgtcctgagtgggtcctactccagcggaatcagttctctgtcacggtgctcaacctcagaaacttccggattcgagaaccaagttaatgagcaatctgctcctctgccagtccccgtgcccgtgccagttccctcatacggcggagaagaacccgtgcggaaggaaagtaaaacccctccaccttattccgtgtacgaaagaacattgcgaaggcccgtgcctttgccgcactcattgtctatacccgttacttcagaaccaccagctcttccaccgaagcccctggccgctcgcagctctcatcttgaaaatggggcaagaaggacggatccaggacctcggcctcgaccccttccgaggaaggtgtctcaactgta

SEQ ID NO: 181700 - DNA, 5900 bp, Artificial Sequence
  derived and/or modified sequence
atgtggatccccaccgaacatgaaaagtacggcgtggttattgctagtttcaggggcacagtcccatacggattgtccttggagattggagataccgtccagattctggagaaatgcgatggttggtaccgcggttttgccctgaaaaaccccaacatcaagggcattttcccctcatcctacgttcacctgaaaaacgcctgcgtcaagaataagggacagtttgagatggtaataccgactgaggattcggtcataacagagatgacatctactctcagagactggggtactatgtggaagcagctctacgtacgaaacgaaggtgacctattccatcgtctgtggcacattatgaatgaaattctggatttgcggaggcaggttttggttggtcacttaacccatgacaggatgaaggatgtgaagcggcatattaccgcccgtttagattggggaaacgagcagctgggcctggaccttgtgcccaggaaggagtacgccatggtggaccccgaggacatctctattactgagttatatagacttatggaacacaggcatcgcaaaaaggacacacctgtgcaggcatccagtcaccacctttttgtccagatgaagtccctgatgtgttcgaatctaggcgaggaacttgaggtaatcttctctctgtttgatagcaaagagaatcgccctatttcggagcgcttcttcttgcgcctgaatcggaacgggctgcctaaggcaccagacaaacctgagagacactgttcgttattcgtggatctcgggagcagcgagctaagaaaggatatttacatcactgtacacatcattcgcatcgggcgtatgggtgcaggcgaaaaaaagaatgcctgttccgtccagtataggagacctttcggttgcgcagtcctgtccatcgcagacctactcactggcgaaaccaaggacgacctaattctgaaagtttacatgtgtaatacagagagtgagtggtaccagattcacgagaacataataaagaaactgaacgcccgttataatttgaccggctctaacgccggtcttgccgtgtctctgcagctcctgcatggcgatatagagcaaattcgcagggaatactccagtgtgttctctcacggagtgtccataacacgcaagcttggcttctccaatataattatgccgggagaaatgcgcaatgatctctacattaccattgagagaggcgaattcgaaaaagggggaaagtcagtcgccaggaatgtggaggttaccatgtttatcgtcgatagctccggacagaccttgaaggatttcatctcattcgggagcggtgagccacctgccagcgaataccactcctttgtcctgtaccacaacaacagcccacggtggagcgagctgctgaagttacccatccctgttgataagttccgtggggcacacatccgcttcgaattcaggcattgttccactaaagaaaaaggggaaaagaaactattcgggtttagcttcgtgcctctgatgcaggaagacggaagaactctgccggacggaacacacgaactcattgtccacaagtgtgaggagaacaccaatctgcaagacacgacacgctatcttaagctgccattcagcaagggcatttttctcggcaacaataaccaggccatgaaggctacaaaagaaagcttctgcatcaccagctttctgtgttctaccaaacttacccagaacggggacatgctggacctgctgaaatggcggacccaccccgataagatcaccgggtgtctgtctaagctgaaagagatcgacgggtctgagatcgtcaagtttctccaggacactctggatacattgtttggcattctggatgaaaattcccagaaatatggaagcaaagtattcgattcactggttcacatcatcaacctcctccaggattcaaagttccaccattttaagccagtcatggatacctacatcgagtctcatttcgctggggctctggcttatcgggacttaataaaagtgttgaagtggtacgtggacaggatcactgaggcggaaagacaagagcatattcaggaggttctgaaggcgcaggagtacatattcaagtatatcgtccagagcagacgactgtttagcctcgccactgggggtcagaatgaggaggaatttcgttgctgtatccaagaactcctgatgtctgtgaggtttttcttgagccaggaatccaaagggagtggagctctgagtcagtctcaggctgtctttttatcctcattcccagccgtgtattctgagctccttaaactgttcgacgtccgggaagtagccaatctggttcaagatactctgggctcactgccaactatcttacatgtagatgactccctgcaggccataaaattgcaatgtatcggaaaaacagtagagagccaactgtacactaatccagatagcagatatatcctactccctgttgttttgcaccacctgcatatccacttacaggaacagaaggatctgattatgtgcgcgagaatactgtccaacgtgttttgcctcataaaaaaaaacagctctgaaaagtccgtgctcgaggagatagatgtcattgtggctagcttgttggacatactcctgcgaacaattctggagattacaagcagaccccagcctagtagtagcgccatgaggttccagtttcaggacgttaccggagagtttgtcgcctgcctactgagcctgttgcggcagatgaccgaccgtcattatcaacagctgttggacagttttaacaccaaggaggaattacgcgacttcctcctccagatctttactgtctttcggatccttattcgtccggagatgttccctaaagactggacggtcatgaggttggttgctaataatgtaataattactactgtattatatctgagtgacgccctgaggaagaatttcttgaacgaaaatttcgattacaaaatctgggacagttacttctacctcgccgtgatattcatcaaccagctttgtctgcaattggagatgttcacaccctccaaaaaaaaaaaggttctggaaaaatacggggacatgcgggtaactatgggttgtgaaattttctccatgtggcagaatctcggggaacataagcttcattttatccctgctctcatcgggccattcctggaggttacccttattccccagcctgatctgcgcaacgtcatgatccccatattccatgacatgatggactgggaacaaagacgatccggcaatttcaaacaagtggaagctaaacttatagacaagctcgattccttgatgagcgaaggtaagggagatgagacatacagggagctgtttaactctatccttttgaagaagatcgagcgtgaaacctggagggagagcggagtgtcgctgattgcgaccgtcaccaggcttatggagcgcctgctcgattacagggattgcatgaagatgggcgaggtggacggaaaaaagattggctgcacggttagtctgctgaacttttataaaaccgagttgaacaaggaggagatgtatataagatatatccataagctatacgacctccatctgaaagcccagaattttacagaggccgcatatacactgctgctatacgatgaactgctggagtggagcgatagaccactgcgcgagttcctgacataccccatgcagacagagtggcagagaaaagagcatctccacctgacaatcatccagaatttcgataggggaaaatgttgggaaaacggaatcatcctgtgtcgcaagatcgcagagcaatatgagagctattatgattaccgaaacctgtcgaagatgcgcatgatggaagcatccctgtatgataaaatcatggaccagcaacgattagagcccgagttctttcgcgtaggtttttacggcaagaagttccccttcttccttcggaataaggaatttgtctgtaggggacatgactacgaaagattagaggcctttcaacaaagaatgttaaatgaattcccacacgccattgctatgcagcatgcaaatcagccagacgagacaatttttcaggctgaggctcagtatctccagatttatgccgtcacaccgatccccgagagccaggaagtacttcagcgggagggcgtgcctgacaacatcaaaagtttttacaaagtcaaccacatttggaaatttagatatgatcggccatttcacaaggggaccaaggacaaagagaatgagtttaaatctctctgggtggagcggacctcattgtacctcgtgcaaagtctgccaggaatttcccgctggttcgaagtggaaaagagagaagtggtcgaaatgtcacctctggaaaacgctatagaggtgctcgagaataaaaatcaacaactcaagaccctaatatctcaatgccagacccggcagatgcagaacatcaatcccctgaccatgtgcctaaacggagtcatcgatgctgccgtgaatggtggggtgtcacgatatcaagaagcctttttcgtgaaggaatacatcctgtcccacccagaggatggcgagaagatagctagacttagggagctgatgctggaacaggcacagatccttgagtttggactggccgtgcacgagaagttcgtgccccaggacatgcggccactgcacaagaagcttgtagatcagtttttcgtcatgaaatctagtctggggattcaggagttcagcgcttgcatgcaggcatcacccgtccactttcctaatggtagccccagagtctgtcggaattctgccccagctagtgtctctcccgacgggacccgcgtgataccaaggcggagccccctttcataccccgctgtaaatcgttactccagctccagccttagctctcaggcgtctgccgaagtgtctaatatcacgggtcagtcagagtcatcagacgaggtatttaacatgcagccaagtccgagtactagctccctgagcagcactcattcagcgagccctaatgttacaagttccgccccatcctctgccagggcatcaccactgctgtcagataaacacaaacattctcgggagaattcttgtctgtcgcctcgagagcgaccttgctcagccatatatcctacccccgttgagccctcccaacggatgctcttcaatcacatcggggatggagctctgccgagatcagaccccaatctgtcagccccagagaaagccgttaatccaacacccagctcctggagcctggatagtgggaaagaagctaagaatatgtcagatagcgggaagctaattagcccccctgtgccgcctcgtccaacccaaacggcttcacccgctcgacataccacctcagtcagtccttctcccgcaggtaggagccccctgaaggggagcgtccagtcctttacaccctccccagtagaatatcatagtcccggactgatcagtaattcaccagtactcagtggctcctactcttcaggtatctcaagcttgtcccgatgctccacaagcgaaaccagcggattcgagaaccaggtcaacgagcagagcgctcccctaccagttccagtgcctgtacctgtaccgagctatggcggagaagagcccgtgcggaaagagagcaagacaccccctccatattccgtgtacgagcgcaccctgcggaggcccgttccattaccccatagcctaagcatccccgtgacctcagagccacccgcattaccccctaaaccactcgccgctagatcgtctcatctagaaaatggagccagacgcacggatcctggacctcgcccaaggcccctacctagaaaagtcagtcagctgta

SEQ ID NO: 181701 - DNA, 5865 bp, Artificial Sequence
  derived and/or modified sequence
gtgatcgccagcttcagaggcaccgtgccctacggcctgagcctggagatcggcgacaccgtgcagatcctggagaagtgcgacggctggtacagaggcttcgccctgaagaaccccaacatcaagggcatcttccccagcagctacgtgcacctgaagaacgcctgcgtgaagaacaagggccagttcgagatggtgatccccaccgaggacagcgtgatcaccgagatgaccagcaccctgagagactggggcaccatgtggaagcagctgtacgtgagaaacgagggcgacctgttccacagactgtggcacatcatgaacgagatcctggacctgagaagacaggtgctggtgggccacctgacccacgacagaatgaaggacgtgaagagacacatcaccgccagactggactggggcaacgagcagctgggcctggacctggtgcccagaaaggagtacgccatggtggaccccgaggacatcagcatcaccgagctgtacagactgatggagcacagacacagaaagaaggacacccccgtgcaggccagcagccaccacctgttcgtgcagatgaagagcctgatgtgcagcaacctgggcgaggagctggaggtgatcttcagcctgttcgacagcaaggagaacagacccatcagcgagagattcttcctgagactgaacagaaacggcctgcccaaggcccccgacaagcccgagagacactgcagcctgttcgtggacctgggcagcagcgagctgagaaaggacatctacatcaccgtgcacatcatcagaatcggcagaatgggcgccggcgagaagaagaacgcctgcagcgtgcagtacagaagacccttcggctgcgccgtgctgagcatcgccgacctgctgaccggcgagaccaaggacgacctgatcctgaaggtgtacatgtgcaacaccgagagcgagtggtaccagatccacgagaacatcatcaagaagctgaacgccagatacaacctgaccggcagcaacgccggcctggccgtgagcctgcagctgctgcacggcgacatcgagcagatcagaagagagtacagcagcgtgttcagccacggcgtgagcatcaccagaaagctgggcttcagcaacatcatcatgcccggcgagatgagaaacgacctgtacatcaccatcgagagaggcgagttcgagaagggcggcaagagcgtggccagaaacgtggaggtgaccatgttcatcgtggacagcagcggccagaccctgaaggacttcatcagcttcggcagcggcgagccccccgccagcgagtaccacagcttcgtgctgtaccacaacaacagccccagatggagcgagctgctgaagctgcccatccccgtggacaagttcagaggcgcccacatcagattcgagttcagacactgcagcaccaaggagaagggcgagaagaagctgttcggcttcagcttcgtgcccctgatgcaggaggacggcagaaccctgcccgacggcacccacgagctgatcgtgcacaagtgcgaggagaacaccaacctgcaggacaccaccagatacctgaagctgcccttcagcaagggcatcttcctgggcaacaacaaccaggccatgaaggccaccaaggagagcttctgcatcaccagcttcctgtgcagcaccaagctgacccagaacggcgacatgctggacctgctgaagtggagaacccaccccgacaagatcaccggctgcctgagcaagctgaaggagatcgacggcagcgagatcgtgaagttcctgcaggacaccctggacaccctgttcggcatcctggacgagaacagccagaagtacggcagcaaggtgttcgacagcctggtgcacatcatcaacctgctgcaggacagcaagttccaccacttcaagcccgtgatggacacctacatcgagagccacttcgccggcgccctggcctacagagacctgatcaaggtgctgaagtggtacgtggacagaatcaccgaggccgagagacaggagcacatccaggaggtgctgaaggcccaggagtacatcttcaagtacatcgtgcagagcagaagactgttcagcctggccaccggcggccagaacgaggaggagttcagatgctgcatccaggagctgctgatgagcgtgagattcttcctgagccaggagagcaagggcagcggcgccctgagccagagccaggccgtgttcctgagcagcttccccgccgtgtacagcgagctgctgaagctgttcgacgtgagagaggtggccaacctggtgcaggacaccctgggcagcctgcccaccatcctgcacgtggacgacagcctgcaggccatcaagctgcagtgcatcggcaagaccgtggagagccagctgtacaccaaccccgacagcagatacatcctgctgcccgtggtgctgcaccacctgcacatccacctgcaggagcagaaggacctgatcatgtgcgccagaatcctgagcaacgtgttctgcctgatcaagaagaacagcagcgagaagagcgtgctggaggagatcgacgtgatcgtggccagcctgctggacatcctgctgagaaccatcctggagatcaccagcagaccccagcccagcagcagcgccatgagattccagttccaggacgtgaccggcgagttcgtggcctgcctgctgagcctgctgagacagatgaccgacagacactaccagcagctgctggacagcttcaacaccaaggaggagctgagagacttcctgctgcagatcttcaccgtgttcagaatcctgatcagacccgagatgttccccaaggactggaccgtgatgagactggtggccaacaacgtgatcatcaccaccgtgctgtacctgagcgacgccctgagaaagaacttcctgaacgagaacttcgactacaagatctgggacagctacttctacctggccgtgatcttcatcaaccagctgtgcctgcagctggagatgttcacccccagcaagaagaagaaggtgctggagaagtacggcgacatgagagtgaccatgggctgcgagatcttcagcatgtggcagaacctgggcgagcacaagctgcacttcatccccgccctgatcggccccttcctggaggtgaccctgatcccccagcccgacctgagaaacgtgatgatccccatcttccacgacatgatggactgggagcagagaagaagcggcaacttcaagcaggtggaggccaagctgatcgacaagctggacagcctgatgagcgagggcaagggcgacgagacctacagagagctgttcaacagcatcctgctgaagaagatcgagagagagacctggagagagagcggcgtgagcctgatcgccaccgtgaccagactgatggagagactgctggactacagagactgcatgaagatgggcgaggtggacggcaagaagatcggctgcaccgtgagcctgctgaacttctacaagaccgagctgaacaaggaggagatgtacatcagatacatccacaagctgtacgacctgcacctgaaggcccagaacttcaccgaggccgcctacaccctgctgctgtacgacgagctgctggagtggagcgacagacccctgagagagttcctgacctaccccatgcagaccgagtggcagagaaaggagcacctgcacctgaccatcatccagaacttcgacagaggcaagtgctgggagaacggcatcatcctgtgcagaaagatcgccgagcagtacgagagctactacgactacagaaacctgagcaagatgagaatgatggaggccagcctgtacgacaagatcatggaccagcagagactggagcccgagttcttcagagtgggcttctacggcaagaagttccccttcttcctgagaaacaaggagttcgtgtgcagaggccacgactacgagagactggaggccttccagcagagaatgctgaacgagttcccccacgccatcgccatgcagcacgccaaccagcccgacgagaccatcttccaggccgaggcccagtacctgcagatctacgccgtgacccccatccccgagagccaggaggtgctgcagagagagggcgtgcccgacaacatcaagagcttctacaaggtgaaccacatctggaagttcagatacgacagacccttccacaagggcaccaaggacaaggagaacgagttcaagagcctgtgggtggagagaaccagcctgtacctggtgcagagcctgcccggcatcagcagatggttcgaggtggagaagagagaggtggtggagatgagccccctggagaacgccatcgaggtgctggagaacaagaaccagcagctgaagaccctgatcagccagtgccagaccagacagatgcagaacatcaaccccctgaccatgtgcctgaacggcgtgatcgacgccgccgtgaacggcggcgtgagcagataccaggaggccttcttcgtgaaggagtacatcctgagccaccccgaggacggcgagaagatcgccagactgagagagctgatgctggagcaggcccagatcctggagttcggcctggccgtgcacgagaagttcgtgccccaggacatgagacccctgcacaagaagctggtggaccagttcttcgtgatgaagagcagcctgggcatccaggagttcagcgcctgcatgcaggccagccccgtgcacttccccaacggcagccccagagtgtgcagaaacagcgcccccgccagcgtgagccccgacggcaccagagtgatccccagaagaagccccctgagctaccccgccgtgaacagatacagcagcagcagcctgagcagccaggccagcgccgaggtgagcaacatcaccggccagagcgagagcagcgacgaggtgttcaacatgcagcccagccccagcaccagcagcctgagcagcacccacagcgccagccccaacgtgaccagcagcgcccccagcagcgccagagccagccccctgctgagcgacaagcacaagcacagcagagagaacagctgcctgagccccagagagagaccctgcagcgccatctaccccacccccgtggagcccagccagagaatgctgttcaaccacatcggcgacggcgccctgcccagaagcgaccccaacctgagcgcccccgagaaggccgtgaaccccacccccagcagctggagcctggacagcggcaaggaggccaagaacatgagcgacagcggcaagctgatcagcccccccgtgccccccagacccacccagaccgccagccccgccagacacaccaccagcgtgagccccagccccgccggcagaagccccctgaagggcagcgtgcagagcttcacccccagccccgtggagtaccacagccccggcctgatcagcaacagccccgtgctgagcggcagctacagcagcggcatcagcagcctgagcagatgcagcaccagcgagaccagcggcttcgagaaccaggtgaacgagcagagcgcccccctgcccgtgcccgtgcccgtgcccgtgcccagctacggcggcgaggagcccgtgagaaaggagagcaagaccccccccccctacagcgtgtacgagagaaccctgagaagacccgtgcccctgccccacagcctgagcatccccgtgaccagcgagccccccgccctgccccccaagcccctggccgccagaagcagccacctggagaacggcgccagaagaaccgaccccggccccagacccagacccctgcccagaaaggtgagccagctgtag

SEQ ID NO: 181702 - DNA, 5901 bp, Artificial Sequence
  derived and/or modified sequence
atgtggatccccaccgagcacgagaagtacggcgtggtgatcgccagcttcagaggcaccgtgccctacggcctgagcctggagatcggcgacaccgtgcagatcctggagaagtgcgacggctggtacagaggcttcgccctgaagaaccccaacatcaagggcatcttccccagcagctacgtgcacctgaagaacgcctgcgtgaagaacaagggccagttcgagatggtgatccccaccgaggacagcgtgatcaccgagatgaccagcaccctgagagactggggcaccatgtggaagcagctgtacgtgagaaacgagggcgacctgttccacagactgtggcacatcatgaacgagatcctggacctgagaagacaggtgctggtgggccacctgacccacgacagaatgaaggacgtgaagagacacatcaccgccagactggactggggcaacgagcagctgggcctggacctggtgcccagaaaggagtacgccatggtggaccccgaggacatcagcatcaccgagctgtacagactgatggagcacagacacagaaagaaggacacccccgtgcaggccagcagccaccacctgttcgtgcagatgaagagcctgatgtgcagcaacctgggcgaggagctggaggtgatcttcagcctgttcgacagcaaggagaacagacccatcagcgagagattcttcctgagactgaacagaaacggcctgcccaaggcccccgacaagcccgagagacactgcagcctgttcgtggacctgggcagcagcgagctgagaaaggacatctacatcaccgtgcacatcatcagaatcggcagaatgggcgccggcgagaagaagaacgcctgcagcgtgcagtacagaagacccttcggctgcgccgtgctgagcatcgccgacctgctgaccggcgagaccaaggacgacctgatcctgaaggtgtacatgtgcaacaccgagagcgagtggtaccagatccacgagaacatcatcaagaagctgaacgccagatacaacctgaccggcagcaacgccggcctggccgtgagcctgcagctgctgcacggcgacatcgagcagatcagaagagagtacagcagcgtgttcagccacggcgtgagcatcaccagaaagctgggcttcagcaacatcatcatgcccggcgagatgagaaacgacctgtacatcaccatcgagagaggcgagttcgagaagggcggcaagagcgtggccagaaacgtggaggtgaccatgttcatcgtggacagcagcggccagaccctgaaggacttcatcagcttcggcagcggcgagccccccgccagcgagtaccacagcttcgtgctgtaccacaacaacagccccagatggagcgagctgctgaagctgcccatccccgtggacaagttcagaggcgcccacatcagattcgagttcagacactgcagcaccaaggagaagggcgagaagaagctgttcggcttcagcttcgtgcccctgatgcaggaggacggcagaaccctgcccgacggcacccacgagctgatcgtgcacaagtgcgaggagaacaccaacctgcaggacaccaccagatacctgaagctgcccttcagcaagggcatcttcctgggcaacaacaaccaggccatgaaggccaccaaggagagcttctgcatcaccagcttcctgtgcagcaccaagctgacccagaacggcgacatgctggacctgctgaagtggagaacccaccccgacaagatcaccggctgcctgagcaagctgaaggagatcgacggcagcgagatcgtgaagttcctgcaggacaccctggacaccctgttcggcatcctggacgagaacagccagaagtacggcagcaaggtgttcgacagcctggtgcacatcatcaacctgctgcaggacagcaagttccaccacttcaagcccgtgatggacacctacatcgagagccacttcgccggcgccctggcctacagagacctgatcaaggtgctgaagtggtacgtggacagaatcaccgaggccgagagacaggagcacatccaggaggtgctgaaggcccaggagtacatcttcaagtacatcgtgcagagcagaagactgttcagcctggccaccggcggccagaacgaggaggagttcagatgctgcatccaggagctgctgatgagcgtgagattcttcctgagccaggagagcaagggcagcggcgccctgagccagagccaggccgtgttcctgagcagcttccccgccgtgtacagcgagctgctgaagctgttcgacgtgagagaggtggccaacctggtgcaggacaccctgggcagcctgcccaccatcctgcacgtggacgacagcctgcaggccatcaagctgcagtgcatcggcaagaccgtggagagccagctgtacaccaaccccgacagcagatacatcctgctgcccgtggtgctgcaccacctgcacatccacctgcaggagcagaaggacctgatcatgtgcgccagaatcctgagcaacgtgttctgcctgatcaagaagaacagcagcgagaagagcgtgctggaggagatcgacgtgatcgtggccagcctgctggacatcctgctgagaaccatcctggagatcaccagcagaccccagcccagcagcagcgccatgagattccagttccaggacgtgaccggcgagttcgtggcctgcctgctgagcctgctgagacagatgaccgacagacactaccagcagctgctggacagcttcaacaccaaggaggagctgagagacttcctgctgcagatcttcaccgtgttcagaatcctgatcagacccgagatgttccccaaggactggaccgtgatgagactggtggccaacaacgtgatcatcaccaccgtgctgtacctgagcgacgccctgagaaagaacttcctgaacgagaacttcgactacaagatctgggacagctacttctacctggccgtgatcttcatcaaccagctgtgcctgcagctggagatgttcacccccagcaagaagaagaaggtgctggagaagtacggcgacatgagagtgaccatgggctgcgagatcttcagcatgtggcagaacctgggcgagcacaagctgcacttcatccccgccctgatcggccccttcctggaggtgaccctgatcccccagcccgacctgagaaacgtgatgatccccatcttccacgacatgatggactgggagcagagaagaagcggcaacttcaagcaggtggaggccaagctgatcgacaagctggacagcctgatgagcgagggcaagggcgacgagacctacagagagctgttcaacagcatcctgctgaagaagatcgagagagagacctggagagagagcggcgtgagcctgatcgccaccgtgaccagactgatggagagactgctggactacagagactgcatgaagatgggcgaggtggacggcaagaagatcggctgcaccgtgagcctgctgaacttctacaagaccgagctgaacaaggaggagatgtacatcagatacatccacaagctgtacgacctgcacctgaaggcccagaacttcaccgaggccgcctacaccctgctgctgtacgacgagctgctggagtggagcgacagacccctgagagagttcctgacctaccccatgcagaccgagtggcagagaaaggagcacctgcacctgaccatcatccagaacttcgacagaggcaagtgctgggagaacggcatcatcctgtgcagaaagatcgccgagcagtacgagagctactacgactacagaaacctgagcaagatgagaatgatggaggccagcctgtacgacaagatcatggaccagcagagactggagcccgagttcttcagagtgggcttctacggcaagaagttccccttcttcctgagaaacaaggagttcgtgtgcagaggccacgactacgagagactggaggccttccagcagagaatgctgaacgagttcccccacgccatcgccatgcagcacgccaaccagcccgacgagaccatcttccaggccgaggcccagtacctgcagatctacgccgtgacccccatccccgagagccaggaggtgctgcagagagagggcgtgcccgacaacatcaagagcttctacaaggtgaaccacatctggaagttcagatacgacagacccttccacaagggcaccaaggacaaggagaacgagttcaagagcctgtgggtggagagaaccagcctgtacctggtgcagagcctgcccggcatcagcagatggttcgaggtggagaagagagaggtggtggagatgagccccctggagaacgccatcgaggtgctggagaacaagaaccagcagctgaagaccctgatcagccagtgccagaccagacagatgcagaacatcaaccccctgaccatgtgcctgaacggcgtgatcgacgccgccgtgaacggcggcgtgagcagataccaggaggccttcttcgtgaaggagtacatcctgagccaccccgaggacggcgagaagatcgccagactgagagagctgatgctggagcaggcccagatcctggagttcggcctggccgtgcacgagaagttcgtgccccaggacatgagacccctgcacaagaagctggtggaccagttcttcgtgatgaagagcagcctgggcatccaggagttcagcgcctgcatgcaggccagccccgtgcacttccccaacggcagccccagagtgtgcagaaacagcgcccccgccagcgtgagccccgacggcaccagagtgatccccagaagaagccccctgagctaccccgccgtgaacagatacagcagcagcagcctgagcagccaggccagcgccgaggtgagcaacatcaccggccagagcgagagcagcgacgaggtgttcaacatgcagcccagccccagcaccagcagcctgagcagcacccacagcgccagccccaacgtgaccagcagcgcccccagcagcgccagagccagccccctgctgagcgacaagcacaagcacagcagagagaacagctgcctgagccccagagagagaccctgcagcgccatctaccccacccccgtggagcccagccagagaatgctgttcaaccacatcggcgacggcgccctgcccagaagcgaccccaacctgagcgcccccgagaaggccgtgaaccccacccccagcagctggagcctggacagcggcaaggaggccaagaacatgagcgacagcggcaagctgatcagcccccccgtgccccccagacccacccagaccgccagccccgccagacacaccaccagcgtgagccccagccccgccggcagaagccccctgaagggcagcgtgcagagcttcacccccagccccgtggagtaccacagccccggcctgatcagcaacagccccgtgctgagcggcagctacagcagcggcatcagcagcctgagcagatgcagcaccagcgagaccagcggcttcgagaaccaggtgaacgagcagagcgcccccctgcccgtgcccgtgcccgtgcccgtgcccagctacggcggcgaggagcccgtgagaaaggagagcaagaccccccccccctacagcgtgtacgagagaaccctgagaagacccgtgcccctgccccacagcctgagcatccccgtgaccagcgagccccccgccctgccccccaagcccctggccgccagaagcagccacctggagaacggcgccagaagaaccgaccccggccccagacccagacccctgcccagaaaggtgagccagctgtag

SEQ ID NO: 181703 - DNA, 8027 bp, Artificial Sequence
  derived and/or modified sequence
gttattgccagtttccgaggaaccgttccatatggcctgtcattggaaattggagatacagttcagatcctggagaagtgtgatggctggtacagaggatttgccttaaaaaacccaaatatcaagggtatatttccttccagctacgttcacttgaaaaatgcctgtgtaaagaacaaaggacaatttgaaatggttattcccactgaagactctgttatcacagaaatgacatcaacattaagagactggggaaccatgtggaaacaactctatgtgcgtaatgaaggcgatctcttccaccggctgtggcacatcatgaatgaaatcctggacctgaggcggcaggtgctggtgggccacctcacccacgaccggatgaaggacgtgaagcgccacattactgcccggcttgactggggcaatgaacaactgggactggacctggtgcctaggaaagagtacgcaatggtggatccggaagacatcagcattactgagctctaccgattgatggaacatcgacatcggaagaaagacaccccggtgcaggccagcagtcaccacctctttgtccagatgaagagcctcatgtgttccaacctgggagaggagctggaggtcatcttctcactctttgacagtaaagagaaccggccaatcagtgagagatttttcttgaggctgaatagaaacgggcttcccaaagcccctgataaaccggaacgacattgctccctctttgtggatttgggcagcagtgagctaagaaaggacatttatatcaccgtgcacattatccgaatcggtcgaatgggagcaggagaaaaaaagaatgcctgtagtgtccagtaccgacgaccctttggctgtgcagttcttagcatcgctgacctgctaacaggagagacaaaggatgacctcattctgaaagtatacatgtgtaacacagagagtgagtggtaccaaatccatgagaacatcatcaaaaagctgaatgcacgttataacttgactggctccaatgcaggtttagcagtttccttacagctattgcacggagacattgaacaaatcagaagggaatattcatcagtattttctcatggagtatccataacaaggaagctgggattttcaaatattattatgcctggtgaaatgaggaatgatttatatatcactattgaaaggggagaatttgagaaaggagggaagagcgtggccagaaatgtggaagttacgatgttcattgtagacagtagtggccaaaccctgaaggattttatctccttcggctctggggagccaccagccagtgagtaccactcctttgtgctttaccataacaacagtcccaggtggtctgaactgctgaaacttcccattcctgtggataaattccggggtgcacacatccgcttcgagtttcggcattgttccacaaaggagaaaggagagaagaagttgtttgggttttcttttgtccctctgatgcaagaagatggtaggactcttccagatggcactcatgagctcatcgtgcataagtgtgaagaaaacacaaatcttcaggatactacccgctacctcaaacttcccttttccaagggcattttccttgggaataataatcaagccatgaaggccacaaaggagtccttttgtattacatcttttctctgttccacaaaactcacacaaaatggtgatatgcttgatcttttgaaatggagaacccacccagacaagatcactggctgtctctctaaattaaaagaaattgatggctcagagatagtaaagtttctgcaggatacactggataccttatttggaattttagatgaaaattcccaaaaatatgggtctaaagtgtttgattctttggttcacataataaatttgctgcaagatagcaaatttcatcattttaaacctgtaatggacacttacattgagagtcattttgctggggcacttgcatacagagatctcatcaaagtgctcaaatggtacgtggaccggatcacagaagcagagcggcaagagcatatccaggaggtgctgaaggcacaagaatacatttttaagtatatagttcaatctcgaaggctgttttcccttgccactggtgggcaaaacgaagaggagttccgctgctgcattcaggagcttctcatgtcagtccgtttctttctttcgcaagagagcaaagggtctggagcattatctcagtcacaggctgtgtttctgagctctttccctgccgtgtactcagaactgttgaagctctttgatgtccgggaagtagccaacttggtccaggacaccctgggcagtctgccgaccatcctgcatgtggatgattccctgcaggccatcaaactgcagtgcattggcaaaaccgtggaaagccagctttataccaacccagattcccgatacattcttctgcctgtcgtgttacatcacctccacattcacttgcaagaacagaaggacctgatcatgtgtgcacgtatccttagcaacgtattttgtcttatcaagaaaaatagctcagaaaaatctgtgctggaggaaatagatgtgatagtggccagcttgctggatattctgctgaggaccatattggagatcaccagccgacctcagccatccagctcagcaatgcggttccagttccaggatgtcactggggagtttgttgcttgtctcctgtccctattacgacaaatgacagatagacattatcaacagcttcttgatagttttaatacaaaggaagaactaagggatttcctgctgcagatatttactgtgttccgaatattgatacgcccggagatgtttccaaaggactggactgttatgcgcttggttgctaacaatgttattattacaacagttctatacctctcagatgcacttcgtaagaacttcttaaatgaaaactttgattataagatctgggattcctacttttacctcgcagtcatttttataaaccagttgtgtctgcagttggagatgttcacaccttccaagaagaaaaaggtgttagaaaagtatggtgacatgcgggtaacaatgggttgtgaaattttcagcatgtggcaaaacctaggagagcacaagcttcattttatccctgccctgattggccccttcctagaagtgaccttgataccccagccagatcttcggaatgtcatgattccaatttttcatgatatgatggactgggagcagaggcggagtggcaactttaaacaggtggaagccaagctaattgacaaactggatagcctgatgtcagaaggcaaaggtgacgaaacataccgcgagctcttcaacagtattctactaaagaaaattgagcgggaaacatggcgggaaagtggcgtttcattaattgctactgtaactcgtctaatggagaggttgttagattacagggactgcatgaaaatgggagaggtagatggcaaaaagattggctgcacagttagccttctgaacttctataagactgaactgaacaaggaggagatgtatatacgctacattcacaaactctatgatctgcatctcaaagcacagaactttacagaagctgcatataccctcctcttatatgacgagctactggaatggtctgatcggcccctcagggagttcctgacctaccccatgcaaacagaatggcagcgcaaagagcacctgcacctcaccatcatccagaactttgacagaggcaaatgttgggagaatggcattatcttgtgccggaagattgcagagcagtatgagagttattatgactacagaaacctgagcaagatgcggatgatggaagcctctttgtatgacaaaattatggaccagcaacgtcttgaaccagagttcttcagagttggattttatggaaaaaaatttccatttttcttaagaaataaggagtttgtgtgtcgagggcatgactacgagaggctggaagccttccaacagagaatgctgaacgagttcccccatgccatcgccatgcagcacgccaaccagcccgatgagaccatcttccaggcagaagctcagtatttgcagatatatgctgtgactcccattccagagagccaggaggtcctgcagagagagggtgttccggacaacatcaaaagcttctataaagtgaatcacatctggaaattccgctatgaccgaccatttcacaaaggcacaaaagataaagagaatgaattcaagagtctctgggtggagagaacgtcattatacttggtgcagagtttgcctggcatctctcgctggtttgaagtggaaaagcgtgaagtggtagaaatgagtcctctggaaaatgcaattgaagtgctagaaaataagaatcagcagctgaagactctgattagtcagtgtcagacaagacagatgcagaatattaatcccctgactatgtgcctgaatggagttatagatgctgcagttaatggtggcgtttccaggtatcaagaggcattctttgtcaaagaatatatcttaagtcaccctgaagatggggagaaaattgcacgattaagagagctgatgcttgagcaggcacagattctggaatttggtttggccgtgcatgagaagtttgtacctcaagatatgagaccccttcacaaaaagctggttgaccaattctttgtgatgaagtcgagcttagggatacaggagttctctgcttgtatgcaagccagtcctgtccattttcctaatggaagccctcgtgtgtgtagaaactcagcacctgcttctgtgagcccagatggtaccagggtaattcctagacgcagcccgttaagttacccagctgtcaaccgatattcttcctcctcactgtcctcacaagcttctgctgaagtaagcaatattacagggcaatcagaaagctctgatgaagtctttaacatgcagccaagtccatctacctcaagcttgagttctactcactcggcttcacctaatgtgacaagttctgctccatcgagtgccagagcttctcctttgttgtctgacaaacacaaacattcccgagaaaactcttgcctgtcaccaagagagagaccatgcagtgccatctatccaacacctgtggagccttcgcagaggatgctgtttaatcatattggagacggggccttgccacgcagtgacccaaatctctctgcacctgaaaaagctgtgaaccccacccctagcagctggagcctggacagtgggaaggaagccaagaacatgtcggatagtgggaaacttatctctccccctgtccctccaagacccacacagactgcttcaccagcaagacacacgacatcagtatccccctcgcctgccgggcgatctccattgaagggctctgtgcagtctttcaccccctctccagtggagtaccactcgccaggactcatctccaactcccctgtcttgtcgggcagctacagcagtgggatttcttctctcagccggtgcagcacgtcggaaacctcaggctttgaaaatcaggtgaatgaacagtcggcccccctgccggtgccagtgccggtgcccgtgccgagctacggcggggaggagccagtgcgcaaggagagcaagactccgcccccgtacagcgtctacgagcggactctgcggcgccccgtcccgctacctcacagcctctccatccccgtcacgtcggagccgcccgcgctgccccccaagcctctggcagcgcgatccagccacctggagaatggggcccggaggactgaccccggcccgcggcccaggcccctgccccgcaaggtctctcagttataagtcacttttctatgtacctgcgatgcattctttgcccgtttacaaaataagaagtatgatgagaagacatttagtgtaggcactttaataacttactcagctccttcgatgaatggaattaaaacttgcttattaaatatcatgttgcacaatattaaaagttgctgatctaaaacgccagatgttaaatgaagtatggctgaatttcattaaaacgtttctcatttggaagtggtaaatagtgataaagactccttttgtacctttttatgttcacttttttttatatagtttaatcttaaaaccaatacgatattgtcaaacgatacaatgtgtgacaatgttgtatcgtttttactgaatacttgatacttggagaaagcttattaagtcagtgcacatcctaacacagtggtccttattttagaagacttctgtaaataaggcaaggtttatcagtgcagatcatcagaattaaagttcaagcaggcgagcaagacagtatacttaaggggttgcaaagcttgggactggaaattgttttgttcttgaaacaaaatacttctttaaggttgcttttgctgtttgactgctgtctacattcgtaaaattctattttgtgaattggtagctaaatcccttactaccctgacaccgtggtatctactgtatttcttttcaaggtgcaatttgcttcagagttccaatcagctagattaagcaagaggctccagaagaaatgtttacttgaattttgcgcttcctttcttgatagtttcctatataaaatttgtcattgaacaagagcaaatgctgaagtattaatgaggcacaaatgactgtgccccattagcaagaattcaggaatcaatacagacagtattaaattaatagcttaagtgaagaaaaaaaaaacttagtgaaaatgtattagcacgattaaatggcaaaaggacttataaaaggcaagggcattaactttcagtcctgcacaaaataaaaaattcctcacgactctccacttttaccagtggagtttgtcttagctgacctgtcgtctttctcttgaaggaggattgctgtagacttctctagcttgaatattgcaacatagcatcttaggtctagatagggatgctaatgccagttgtagaagtgtgaaaaaagcaccttgtatgtagtaatgtattttatatctttgttttttcttttactgactgtttataacactcaattgacaatagatatgaactgtattttaaatcatactgttaaatattttccctcttttgttgggaagctcattttagtttaaccatgtttgttttgttggtagcttacctggaaggcagtgaccacttttttatattctcttaatgaaaccattcagcaggtatatgctgttgaggctggttatagaggttttctataataaatgttcaagtatttttgtatataactggttaattttaataagagataccattatgtgtaaaaaaaagtaaaaataaacgcaaacagttgttgatgcagtatgattgttataattatgccaaatactttacgtatggaaaaagaatatttgtacatatgtgcttttaacaattctgccatattgactttacaattttgaatgtcggaaaaattaatatatgttaaatatttatgtttagtgaaagtgttcataattgagaaaaggaacatatgcattttagctttgtatcttgcaagttttgcagtcagaaattttttgaactagcttttgcttttgataacacttcgtgtttgtaaccacattcatatatatatacatatatatgtgaagctccatatttctgttgctttaaagaagtaaaaccttccatttaaataagatgacatgcataagataacaaagcttccttgatttccttttcctgtgtaatttaatagatttgttgactagtgcttgggcacattataaatcagtgttatttgctcttggagccattttttaaaaaaaattttggcagtgagcagttgaatttatcttgaatttatcatgtgtgtgtatttctgaagcagctacatagcagaacattttaagagattctgttagcccacatgttcatgttggttgctgctgaatggtaaatattaaataaaattaccagattaatctt

SEQ ID NO: 181704 - DNA, 6212 bp, Artificial Sequence
  derived and/or modified sequence
cagaacaatgactgcgccgccgggtacccgggagcgcgtcggaggactgtgagcagccgccgccgggagagctgcgggcggcgcagtgtcaacgctgggctcgggagcctccagcgcagatcctgcccagcgcccgcagcccgcgcgaagccgctgggctccggcactgcagcgctgctcggggactgtgcattgttgtgagccggagaaggggcgcggggattacaaagcctgaagaccccggagcccctttagccatgtggatacctacggagcacgagaaatacggcgtggttattgccagtttccgaggaaccgttccatatggcctgtcattggaaattggagatacagttcagatcctggagaagtgtgatggctggtacagaggatttgccttaaaaaacccaaatatcaagggtatatttccttccagctacgttcacttgaaaaatgcctgtgtaaagaacaaaggacaatttgaaatggttattcccactgaagactctgttatcacagaaatgacatcaacattaagagactggggaaccatgtggaaacaactctatgtgcgtaatgaaggcgatctcttccaccggctgtggcacatcatgaatgaaatcctggacctgaggcggcaggtgctggtgggccacctcacccacgaccggatgaaggacgtgaagcgccacattactgcccggcttgactggggcaatgaacaactgggactggacctggtgcctaggaaagagtacgcaatggtggatccggaagacatcagcattactgagctctaccgattgatggaacatcgacatcggaagaaagacaccccggtgcaggccagcagtcaccacctctttgtccagatgaagagcctcatgtgttccaacctgggagaggagctggaggtcatcttctcactctttgacagtaaagagaaccggccaatcagtgagagatttttcttgaggctgaatagaaacgggcttcccaaagcccctgataaaccggaacgacattgctccctctttgtggatttgggcagcagtgagctaagaaaggacatttatatcaccgtgcacattatccgaatcggtcgaatgggagcaggagaaaaaaagaatgcctgtagtgtccagtaccgacgaccctttggctgtgcagttcttagcatcgctgacctgctaacaggagagacaaaggatgacctcattctgaaagtatacatgtgtaacacagagagtgagtggtaccaaatccatgagaacatcatcaaaaagctgaatgcacgttataacttgactggctccaatgcaggtttagcagtttccttacagctattgcacggagacattgaacaaatcagaagggaatattcatcagtattttctcatggagtatccataacaaggaagctgggattttcaaatattattatgcctggtgaaatgaggaatgatttatatatcactattgaaaggggagaatttgagaaaggagggaagagcgtggccagaaatgtggaagttacgatgttcattgtagacagtagtggccaaaccctgaaggattttatctccttcggctctggggagccaccagccagtgagtaccactcctttgtgctttaccataacaacagtcccaggtggtctgaactgctgaaacttcccattcctgtggataaattccggggtgcacacatccgcttcgagtttcggcattgttccacaaaggagaaaggagagaagaagttgtttgggttttcttttgtccctctgatgcaagaagatggtaggactcttccagatggcactcatgagctcatcgtgcataagtgtgaagaaaacacaaatcttcaggatactacccgctacctcaaacttcccttttccaagggcattttccttgggaataataatcaagccatgaaggccacaaaggagtccttttgtattacatcttttctctgttccacaaaactcacacaaaatggtgatatgcttgatcttttgaaatggagaacccacccagacaagatcactggctgtctctctaaattaaaagaaattgatggctcagagatagtaaagtttctgcaggatacactggataccttatttggaattttagatgaaaattcccaaaaatatgggtctaaagtgtttgattctttggttcacataataaatttgctgcaagatagcaaatttcatcattttaaacctgtaatggacacttacattgagagtcattttgctggggcacttgcatacagagatctcatcaaagtgctcaaatggtacgtggaccggatcacagaagcagagcggcaagagcatatccaggaggtgctgaaggcacaagaatacatttttaagtatatagttcaatctcgaaggctgttttcccttgccactggtgggcaaaacgaagaggagttccgctgctgcattcaggagcttctcatgtcagtccgtttctttctttcgcaagagagcaaagggtctggagcattatctcagtcacaggctgtgtttctgagctctttccctgccgtgtactcagaactgttgaagctctttgatgtccgggaagtagccaacttggtccaggacaccctgggcagtctgccgaccatcctgcatgtggatgattccctgcaggccatcaaactgcagtgcattggcaaaaccgtggaaagccagctttataccaacccagattcccgatacattcttctgcctgtcgtgttacatcacctccacattcacttgcaagaacagaaggacctgatcatgtgtgcacgtatccttagcaacgtattttgtcttatcaagaaaaatagctcagaaaaatctgtgctggaggaaatagatgtgatagtggccagcttgctggatattctgctgaggaccatattggagatcaccagccgacctcagccatccagctcagcaatgcggttccagttccaggatgtcactggggagtttgttgcttgtctcctgtccctattacgacaaatgacagatagacattatcaacagcttcttgatagttttaatacaaaggaagaactaagggatttcctgctgcagatatttactgtgttccgaatattgatacgcccggagatgtttccaaaggactggactgttatgcgcttggttgctaacaatgttattattacaacagttctatacctctcagatgcacttcgtaagaacttcttaaatgaaaactttgattataagatctgggattcctacttttacctcgcagtcatttttataaaccagttgtgtctgcagttggagatgttcacaccttccaagaagaaaaaggtgttagaaaagtatggtgacatgcgggtaacaatgggttgtgaaattttcagcatgtggcaaaacctaggagagcacaagcttcattttatccctgccctgattggccccttcctagaagtgaccttgataccccagccagatcttcggaatgtcatgattccaatttttcatgatatgatggactgggagcagaggcggagtggcaactttaaacaggtggaagccaagctaattgacaaactggatagcctgatgtcagaaggcaaaggtgacgaaacataccgcgagctcttcaacagtattctactaaagaaaattgagcgggaaacatggcgggaaagtggcgtttcattaattgctactgtaactcgtctaatggagaggttgttagattacagggactgcatgaaaatgggagaggtagatggcaaaaagattggctgcacagttagccttctgaacttctataagactgaactgaacaaggaggagatgtatatacgctacattcacaaactctatgatctgcatctcaaagcacagaactttacagaagctgcatataccctcctcttatatgacgagctactggaatggtctgatcggcccctcagggagttcctgacctaccccatgcaaacagaatggcagcgcaaagagcacctgcacctcaccatcatccagaactttgacagaggcaaatgttgggagaatggcattatcttgtgccggaagattgcagagcagtatgagagttattatgactacagaaacctgagcaagatgcggatgatggaagcctctttgtatgacaaaattatggaccagcaacgtcttgaaccagagttcttcagagttggattttatggaaaaaaatttccatttttcttaagaaataaggagtttgtgtgtcgagggcatgactacgagaggctggaagccttccaacagagaatgctgaacgagttcccccatgccatcgccatgcagcacgccaaccagcccgatgagaccatcttccaggcagaagctcagtatttgcagatatatgctgtgactcccattccagagagccaggaggtcctgcagagagagggtgttccggacaacatcaaaagcttctataaagtgaatcacatctggaaattccgctatgaccgaccatttcacaaaggcacaaaagataaagagaatgaattcaagagtctctgggtggagagaacgtcattatacttggtgcagagtttgcctggcatctctcgctggtttgaagtggaaaagcgtgaagtggtagaaatgagtcctctggaaaatgcaattgaagtgctagaaaataagaatcagcagctgaagactctgattagtcagtgtcagacaagacagatgcagaatattaatcccctgactatgtgcctgaatggagttatagatgctgcagttaatggtggcgtttccaggtatcaagaggcattctttgtcaaagaatatatcttaagtcaccctgaagatggggagaaaattgcacgattaagagagctgatgcttgagcaggcacagattctggaatttggtttggccgtgcatgagaagtttgtacctcaagatatgagaccccttcacaaaaagctggttgaccaattctttgtgatgaagtcgagcttagggatacaggagttctctgcttgtatgcaagccagtcctgtccattttcctaatggaagccctcgtgtgtgtagaaactcagcacctgcttctgtgagcccagatggtaccagggtaattcctagacgcagcccgttaagttacccagctgtcaaccgatattcttcctcctcactgtcctcacaagcttctgctgaagtaagcaatattacagggcaatcagaaagctctgatgaagtctttaacatgcagccaagtccatctacctcaagcttgagttctactcactcggcttcacctaatgtgacaagttctgctccatcgagtgccagagcttctcctttgttgtctgacaaacacaaacattcccgagaaaactcttgcctgtcaccaagagagagaccatgcagtgccatctatccaacacctgtggagccttcgcagaggatgctgtttaatcatattggagacggggccttgccacgcagtgacccaaatctctctgcacctgaaaaagctgtgaaccccacccctagcagctggagcctggacagtgggaaggaagccaagaacatgtcggatagtgggaaacttatctctccccctgtccctccaagacccacacagactgcttcaccagcaagacacacgacatcagtatccccctcgcctgccgggcgatctccattgaagggctctgtgcagtctttcaccccctctccagtggagtaccactcgccaggactcatctccaactcccctgtcttgtcgggcagctacagcagtgggatttcttctctcagccggtgcagcacgtcggaaacctcaggctttgaaaatcaggtgaatgaacagtcggcccccctgccggtgccagtgccggtgcccgtgccgagctacggcggggaggagccagtgcgcaaggagagcaagactccgcccccgtacagcgtctacgagcggactctgcggcgccccgtcccgctacctcacagcctctccatccccgtcacgtcggagccgcccgcgctgccccccaagcctctggcagcgcgatccagccacctggagaatggggcccggaggactgaccccggcccgcggcccaggcccctgccccgcaaggtctctcagttataagtcacttttctatgtacctgcgatgcattctttgcccgtttacaaaataagaag

SEQ ID NO: 181705 - protein, 963 aa, Artificial Sequence
  derived and/or modified sequence
MATAAETSASEPEAESKAGPKADGEEDEVKAARTRRKVLSRAVAAATYKTMGPAWDQQEEGVSESDGDEYAMASSAESSPGEYEWEYDEEEEKNQLEIERLEEQLSINVYDYNCHVDLIRLLRLEGELTKVRMARQKMSEIFPLTEELWLEWLHDEISMAQDGLDREHVYDLFEKAVKDYICPNIWLEYGQYSVGGIGQKGGLEKVRSVFERALSSVGLHMTKGLALWEAYREFESAIVEAARLEKVHSLFRRQLAIPLYDMEATFAEYEEWSEDPIPESVIQNYNKALQQLEKYKPYEEALLQAEAPRLAEYQAYIDFEMKIGDPARIQLIFERALVENCLVPDLWIRYSQYLDRQLKVKDLVLSVHNRAIRNCPWTVALWSRYLLAMERHGVDHQVISVTFEKALNAGFIQATDYVEIWQAYLDYLRRRVDFKQDSSKELEELRAAFTRALEYLKQEVEERFNESGDPSCVIMQNWARIEARLCNNMQKARELWDSIMTRGNAKYANMWLEYYNLERAHGDTQHCRKALHRAVQCTSDYPEHVCEVLLTMERTEGSLEDWDIAVQKTETRLARVNEQRMKAAEKEAALVQQEEEKAEQRKRARAEKKALKKKKKIRGPEKRGADEDDEKEWGDDEEEQPSKRRRVENSIPAAGETQNVEVAAGPAGKCAAVDVEPPSKQKEKAASLKRDMPKVLHDSSKDSITVFVSNLPYSMQEPDTKLRPLFEACGEVVQIRPIFSNRGDFRGYCYVEFKEEKSALQALEMDRKSVEGRPMFVSPCVDKSKNPDFKVFRYSTSLEKHKLFISGLPFSCTKEELEEICKAHGTVKDLRLVTNRAGKPKGLAYVEYENESQASQAVMKMDGMTIKENIIKVAISNPPQRKVPEKPETRKAPGGPMLLPQTYGARGKGRTQLSLLPRALQRPSAAAPQAENGPAAAPAVAAPAATEAPKMSNADFAKLFLRK

SEQ ID NO: 181706 - protein, 699 aa, Artificial Sequence
  derived and/or modified sequence
MRLRRLGQGGRCYRGLWPLRHTRPWSSPGEYEWEYDEEEEKNQLEIERLEEQLSINVYDYNCHVDLIRLLRLEGELTKVRMARQKMSEIFPLTEELWLEWLHDEISMAQDGLDREHVYDLFEKAVKDYICPNIWLEYGQYSVGGIGQKGGLEKVRSVFERALSSVGLHMTKGLALWEAYREFESAIVEAARLEKVHSLFRRQLAIPLYDMEATFAEYEEWSEDPIPESVIQNYNKALQQLEKYKPYEEALLQAEAPRLAEYQAYIDFEMKIGDPARIQLIFERALVENCLVPDLWIRYSQYLDRQLKVKDLVLSVHNRAIRNCPWTVALWSRYLLAMERHGVDHQVISVTFEKALNAGFIQATDYVEIWQAYLDYLRRRVDFKQDSSKELEELRAAFTRALEYLKQEVEERFNESGDPSCVIMQNWARIEARLCNNMQKARELWDSIMTRGNAKYANMWLEYYNLERAHGDTQHCRKALHRAVQCTSDYPEHVCEVLLTMERTEGSLEDWDIAVQKTETRLARVNEQRMKAAEKEAALVQQEEEKAEQRKRARAEKKALKKKKKIRGPEKRGADEDDEKEWGDDEEAFQTQKGREQHPCSWRNTKCRSSSRARWEMCCRRCGAPFEAEGEGSLPEEGHAQGAARQQQGQHHRLCQQPALQHAGAGHEAQATLRGLWGGGPDPTHLQQPWGFPRLLLRGV

SEQ ID NO: 181707 - protein, 927 aa, Artificial Sequence
  derived and/or modified sequence
MATAAETSASEPEAESKAGPKADGEEDEVKAARTRRKVLSRAVAAATYKTMGPAWDQQEEGVSESDGDEYAMASSAESSPGEYEWEYDEEEEKNQLEIERLEEQLSINVYDYNCHVDLIRLLRLEGELTKVRMARQKMSEIFPLTEELWLEWLHDEISMAQDGLDREHVYDLFEKAVKDYICPNIWLEYGQYSVGGIGQKGGLEKVRSVFERALSSVGLHMTKGLALWEAYREFESAIVEAARLEKVHSLFRRQLAIPLYDMEATFAEYEEWSEDPIPESVIQNYNKALQQLEKYKPYEEALLQAEAPRLAEYQAYIDFEMKIGDPARIQLIFERALVENCLVPDLWIRYSQYLDRQLKVKDLVLSVHNRAIRNCPWTVALWSRYLLAMERHGVDHQVISDSSKELEELRAAFTRALEYLKQEVEERFNESGDPSCVIMQNWARIEARLCNNMQKARELWDSIMTRGNAKYANMWLEYYNLERAHGDTQHCRKALHRAVQCTSDYPEHVCEVLLTMERTEGSLEDWDIAVQKTETRLARVNEQRMKAAEKEAALVQQEEEKAEQRKRARAEKKALKKKKKIRGPEKRGADEDDEKEWGDDEEEQPSKRRRVENSIPAAGETQNVEVAAGPAGKCAAVDVEPPSKQKEKAASLKRDMPKVLHDSSKDSITVFVSNLPYSMQEPDTKLRPLFEACGEVVQIRPIFSNRGDFRGYCYVEFKEEKSALQALEMDRKSVEGRPMFVSPCVDKSKNPDFKVFRYSTSLEKHKLFISGLPFSCTKEELEEICKAHGTVKDLRLVTNRAGKPKGLAYVEYENESQASQAVMKMDGMTIKENIIKVAISNPPQRKVPEKPETRKAPGGPMLLPQTYGARGKGRTQLSLLPRALQRPSAAAPQAENGPAAAPAVAAPAATEAPKMSNADFAKLFLRK

SEQ ID NO: 181708 - protein, 528 aa, Artificial Sequence
  derived and/or modified sequence
MERHGVDHQVISDSSKELEELRAAFTRALEYLKQEVEERFNESGDPSCVIMQNWARIEARLCNNMQKARELWDSIMTRGNAKYANMWLEYYNLERAHGDTQHCRKALHRAVQCTSDYPEHVCEVLLTMERTEGSLEDWDIAVQKTETRLARVNEQRMKAAEKEAALVQQEEEKAEQRKRARAEKKALKKKKKIRGPEKRGADEDDEKEWGDDEEEQPSKRRRVENSIPAAGETQNVEVAAGPAGKCAAVDVEPPSKQKEKAASLKRDMPKVLHDSSKDSMQEPDTKLRPLFEACGEVVQIRPIFSNRGDFRGYCYVEFKEEKSALQALEMDRKSVEGRPMFVSPCVDKSKNPDFKVFRYSTSLEKHKLFISGLPFSCTKEELEEICKAHGTVKDLRLVTNRAGKPKGLAYVEYENESQASQAVMKMDGMTIKENIIKVAISNPPQRKVPEKPETRKAPGGPMLLPQTYGARGKGRTQLSLLPRALQRPSAAAPQAENGPAAAPAVAAPAATEAPKMSNADFAKLFLRK

SEQ ID NO: 181709 - protein, 129 aa, Artificial Sequence
  derived and/or modified sequence
MATAAETSASEPEAESKAGPKADGEEDEVKAARTRRKVLSRAVAAATYKTMGPAWDQQEEGVSESDGDEYAMASSAESSPGEYEWEYDEEEEKNQLEIERLEEQVGPGVGSGHLPVFQVLGSPCPGPPP

SEQ ID NO: 181710 - DNA, 4377 bp, Artificial Sequence
  derived and/or modified sequence
agttgtgacggaacgcatgccattataatgagtttttatatctggtgggagcttttacagggtataaaataatgtgaatttagtgtatgtggagattttcctgttatctaagttcccagtttctctttcaatggcaagaaaacgggtttttgataaggcgcgcgccgcgggcagcttctgcctcagcgggtcttcggcggccgcgggaagacccgagagtcattagaagcgcaagatggcgactgcggccgaaacctcggcttcagaacccgaggctgagtccaaggctgggcccaaggctgacggagaggaggatgaggttaaggcggctaggacaaggaggaaggtgttatcgcgggctgtggccgctgcgacatacaagaccatggggccagcgtgggatcagcaggaggaaggcgtgagcgagagcgatggggatgagtacgccatggcttcctccgcggagagctcccccggggagtacgagtgggaatatgacgaagaggaggagaaaaaccagctggagattgagagactggaggagcagttgtctatcaacgtctatgactacaactgccatgtggacttgatcagactgctcaggctggaaggggagcttaccaaggtgaggatggcccgccagaagatgagtgaaatctttcccttgactgaagagctctggctggagtggctgcatgacgagatcagcatggcccaggatggcctggacagagagcacgtgtatgacctctttgagaaagccgtgaaggattacatttgtcctaacatttggctagagtatggccagtactcagttggtgggattggtcagaaaggtggccttgagaaagttcgctccgtgtttgaaagggctctctcgtctgttggtttacatatgaccaaaggactcgccctctgggaggcttaccgagagtttgaaagtgcgattgtggaagctgctcggcttgagaaagtccacagtcttttccggcgacagttggcgatcccactctatgatatggaggccacatttgcagagtatgaagaatggtcagaagacccaataccagagtcagtaattcagaactataacaaagcactacagcagctggagaaatataaaccctatgaagaagcactgttgcaggcagaggcaccaaggctggcagaatatcaagcatatatcgattttgagatgaaaattggcgatcctgctcgcattcagttgatctttgagcgcgccctggtcgagaactgccttgtcccagacttatggatccgttacagtcagtacctagatcgacaactgaaagtaaaggatttggttttatctgtacataaccgcgctattagaaactgcccctggacagttgccttatggagtcggtacctcttggccatggagagacatggagttgatcatcaagtaatttctgtaaccttcgagaaagctttgaatgccggcttcatccaggccactgattatgtggagatttggcaggcataccttgattacctgaggagaagggttgatttcaaacaagactccagtaaagagctggaggagttgagggccgcctttactcgtgccttggagtatctgaagcaggaggtggaagagcgtttcaatgagagtggtgatccaagctgcgtgattatgcagaactgggctaggattgaggctcgactgtgcaataacatgcagaaagctcgggaactctgggatagcatcatgaccagaggaaatgccaagtacgccaacatgtggctagagtattacaacctggaaagagctcatggtgacacccagcactgccggaaggctctgcaccgggccgtccagtgcaccagtgactacccagagcacgtctgcgaagtgttactcaccatggagaggacagaaggttctttagaagattgggatatagctgttcagaaaactgaaacccgattagctcgtgtcaatgagcagagaatgaaggctgcagagaaggaagcagcccttgtgcagcaagaagaagaaaaggctgaacaacggaaaagagctcgggctgagaagaaagcgttaaaaaagaagaaaaagatcagaggcccagagaagcgcggagcagatgaggatgatgagaaagagtggggcgatgatgaagaagagcagccttccaaacgcagaagggtcgagaacagcatccctgcagctggagaaacacaaaatgtagaagtagcagcagggcccgctgggaaatgtgctgccgtagatgtggagcccccttcgaagcagaaggagaaggcagcctccctgaagagggacatgcccaaggtgctgcacgacagcagcaaggacagcatcaccgtctttgtcagcaacctgccctacagcatgcaggagccggacacgaagctcaggccactcttcgaggcctgtggggaggtggtccagatccgacccatcttcagcaaccgtggggatttccgaggttactgctacgtggagtttaaagaagagaaatcagcccttcaggcactggagatggaccggaaaagtgtagaagggaggccaatgtttgtttccccctgtgtggataagagcaaaaaccccgattttaaggtgttcaggtacagcacttccctagagaaacacaagctgttcatctcaggcctgcctttctcctgtactaaagaggaactagaagaaatctgtaaggctcatggcaccgtgaaggacctcaggctggtcaccaaccgggctggcaaaccaaagggcctggcctacgtggagtatgaaaatgaatcccaggcgtcgcaggctgtgatgaagatggacggcatgactatcaaagagaacatcatcaaagtggcaatcagcaaccctcctcagaggaaagttccagagaagccggagaccaggaaggcaccaggtggccccatgcttttgccgcagacatacggagcgagggggaagggaaggacgcagctgtctctactgcctcgtgccctgcagcgcccaagtgctgcagctcctcaggctgagaacggccctgccgcggctcctgcagttgccgccccagcagccaccgaggcacccaagatgtccaatgccgattttgccaagctgtttctgagaaagtgaacgggacgctgggagacaggaaatgccttacttcactctggcccggcggacctcccaccacccagcagtgcactggggatggacaggcctggtgtgctgcgtgctcgcaaccacagatggctcctcggctttagacagaaaggggaaggggttctaagtcaagagcctttcagtgctccctcatattgagggcagtggcagaaaagtgaccactctgcaggctgggcccaggatgtggtgtcctgagatagttttgtatcttaaagactgaggcacagaagcgaaacgagaacacactgtttttgagacacagttgtccaaatgtttctggccagctccggcccctttttgtatgacacttctcttccaccctgcacagcacatgtgcccgtcattcttttaattttaaaagatgaaatggcagatgctagtaattcacagaatggcctcttgtgggggtgggtctgagggaagtcagctataaaacatttgctggagttttgttcaatggggctgtgcatttttatattatgtgtttgtaaatgacatgtcagccattgtttcatgtttcctaaaagcagaatatttgcaacatttgttttgtataggaattatttgtgccacctgctgtggactgttttctttgcctagtgactagtgacctgtgttgtctaaacatgagtttcagccctttggttttgtttaataccatgtcaaatgcaaacttcaattctccccatttagctttattaaactgacgttctcttcaaaacttcttgctgaatggtactcagatgtgcattcacatacagatgtgttttgaagtgggtgtaccttgctttacctaatagatgtgtaaatagaacttttgtaagtcaaatcccattgtcactttgatttaaattattccagctgtgatgtgtcttcattttatagcagtttgacactggagcttttgagcttttttacctcacatcttttatcaaataatatttactgctttgaaaacagcaacagcattggccagttcagtaggggaagcttgctttattaagacactctggagaaagacgtcagggaatccttgtatatgtcgtgggaatcaactcctcatttatctgttgcgtaagtttaagtttttgtgcatcagtcgggttttctatatttttttaacttaacattttttaatataaccgattaaaaagtagacagaacagtaaaataaactcctgtgtgcctaccaaaaaaaa

SEQ ID NO: 181711 - DNA, 2100 bp, Artificial Sequence
  derived and/or modified sequence
atgagactgagaagactgggccagggcggcagatgctacagaggcctgtggcccctgagacacaccagaccctggagcagccccggcgagtacgagtgggagtacgacgaggaggaggagaagaaccagctggagatcgagagactggaggagcagctgagcatcaacgtgtacgactacaactgccacgtggacctgatcagactgctgagactggagggcgagctgaccaaggtgagaatggccagacagaagatgagcgagatcttccccctgaccgaggagctgtggctggagtggctgcacgacgagatcagcatggcccaggacggcctggacagagagcacgtgtacgacctgttcgagaaggccgtgaaggactacatctgccccaacatctggctggagtacggccagtacagcgtgggcggcatcggccagaagggcggcctggagaaggtgagaagcgtgttcgagagagccctgagcagcgtgggcctgcacatgaccaagggcctggccctgtgggaggcctacagagagttcgagagcgccatcgtggaggccgccagactggagaaggtgcacagcctgttcagaagacagctggccatccccctgtacgacatggaggccaccttcgccgagtacgaggagtggagcgaggaccccatccccgagagcgtgatccagaactacaacaaggccctgcagcagctggagaagtacaagccctacgaggaggccctgctgcaggccgaggcccccagactggccgagtaccaggcctacatcgacttcgagatgaagatcggcgaccccgccagaatccagctgatcttcgagagagccctggtggagaactgcctggtgcccgacctgtggatcagatacagccagtacctggacagacagctgaaggtgaaggacctggtgctgagcgtgcacaacagagccatcagaaactgcccctggaccgtggccctgtggagcagatacctgctggccatggagagacacggcgtggaccaccaggtgatcagcgtgaccttcgagaaggccctgaacgccggcttcatccaggccaccgactacgtggagatctggcaggcctacctggactacctgagaagaagagtggacttcaagcaggacagcagcaaggagctggaggagctgagagccgccttcaccagagccctggagtacctgaagcaggaggtggaggagagattcaacgagagcggcgaccccagctgcgtgatcatgcagaactgggccagaatcgaggccagactgtgcaacaacatgcagaaggccagagagctgtgggacagcatcatgaccagaggcaacgccaagtacgccaacatgtggctggagtactacaacctggagagagcccacggcgacacccagcactgcagaaaggccctgcacagagccgtgcagtgcaccagcgactaccccgagcacgtgtgcgaggtgctgctgaccatggagagaaccgagggcagcctggaggactgggacatcgccgtgcagaagaccgagaccagactggccagagtgaacgagcagagaatgaaggccgccgagaaggaggccgccctggtgcagcaggaggaggagaaggccgagcagagaaagagagccagagccgagaagaaggccctgaagaagaagaagaagatcagaggccccgagaagagaggcgccgacgaggacgacgagaaggagtggggcgacgacgaggaggccttccagacccagaagggcagagagcagcacccctgcagctggagaaacaccaagtgcagaagcagcagcagagccagatgggagatgtgctgcagaagatgcggcgcccccttcgaggccgagggcgagggcagcctgcccgaggagggccacgcccagggcgccgccagacagcagcagggccagcaccacagactgtgccagcagcccgccctgcagcacgccggcgccggccacgaggcccaggccaccctgagaggcctgtggggcggcggccccgaccccacccacctgcagcagccctggggcttccccagactgctgctgagaggcgtgtag

SEQ ID NO: 181712 - DNA, 2784 bp, Artificial Sequence
  derived and/or modified sequence
atggccaccgccgccgagaccagcgccagcgagcccgaggccgagagcaaggccggccccaaggccgacggcgaggaggacgaggtgaaggccgccagaaccagaagaaaggtgctgagcagagccgtggccgccgccacctacaagaccatgggccccgcctgggaccagcaggaggagggcgtgagcgagagcgacggcgacgagtacgccatggccagcagcgccgagagcagccccggcgagtacgagtgggagtacgacgaggaggaggagaagaaccagctggagatcgagagactggaggagcagctgagcatcaacgtgtacgactacaactgccacgtggacctgatcagactgctgagactggagggcgagctgaccaaggtgagaatggccagacagaagatgagcgagatcttccccctgaccgaggagctgtggctggagtggctgcacgacgagatcagcatggcccaggacggcctggacagagagcacgtgtacgacctgttcgagaaggccgtgaaggactacatctgccccaacatctggctggagtacggccagtacagcgtgggcggcatcggccagaagggcggcctggagaaggtgagaagcgtgttcgagagagccctgagcagcgtgggcctgcacatgaccaagggcctggccctgtgggaggcctacagagagttcgagagcgccatcgtggaggccgccagactggagaaggtgcacagcctgttcagaagacagctggccatccccctgtacgacatggaggccaccttcgccgagtacgaggagtggagcgaggaccccatccccgagagcgtgatccagaactacaacaaggccctgcagcagctggagaagtacaagccctacgaggaggccctgctgcaggccgaggcccccagactggccgagtaccaggcctacatcgacttcgagatgaagatcggcgaccccgccagaatccagctgatcttcgagagagccctggtggagaactgcctggtgcccgacctgtggatcagatacagccagtacctggacagacagctgaaggtgaaggacctggtgctgagcgtgcacaacagagccatcagaaactgcccctggaccgtggccctgtggagcagatacctgctggccatggagagacacggcgtggaccaccaggtgatcagcgacagcagcaaggagctggaggagctgagagccgccttcaccagagccctggagtacctgaagcaggaggtggaggagagattcaacgagagcggcgaccccagctgcgtgatcatgcagaactgggccagaatcgaggccagactgtgcaacaacatgcagaaggccagagagctgtgggacagcatcatgaccagaggcaacgccaagtacgccaacatgtggctggagtactacaacctggagagagcccacggcgacacccagcactgcagaaaggccctgcacagagccgtgcagtgcaccagcgactaccccgagcacgtgtgcgaggtgctgctgaccatggagagaaccgagggcagcctggaggactgggacatcgccgtgcagaagaccgagaccagactggccagagtgaacgagcagagaatgaaggccgccgagaaggaggccgccctggtgcagcaggaggaggagaaggccgagcagagaaagagagccagagccgagaagaaggccctgaagaagaagaagaagatcagaggccccgagaagagaggcgccgacgaggacgacgagaaggagtggggcgacgacgaggaggagcagcccagcaagagaagaagagtggagaacagcatccccgccgccggcgagacccagaacgtggaggtggccgccggccccgccggcaagtgcgccgccgtggacgtggagccccccagcaagcagaaggagaaggccgccagcctgaagagagacatgcccaaggtgctgcacgacagcagcaaggacagcatcaccgtgttcgtgagcaacctgccctacagcatgcaggagcccgacaccaagctgagacccctgttcgaggcctgcggcgaggtggtgcagatcagacccatcttcagcaacagaggcgacttcagaggctactgctacgtggagttcaaggaggagaagagcgccctgcaggccctggagatggacagaaagagcgtggagggcagacccatgttcgtgagcccctgcgtggacaagagcaagaaccccgacttcaaggtgttcagatacagcaccagcctggagaagcacaagctgttcatcagcggcctgcccttcagctgcaccaaggaggagctggaggagatctgcaaggcccacggcaccgtgaaggacctgagactggtgaccaacagagccggcaagcccaagggcctggcctacgtggagtacgagaacgagagccaggccagccaggccgtgatgaagatggacggcatgaccatcaaggagaacatcatcaaggtggccatcagcaaccccccccagagaaaggtgcccgagaagcccgagaccagaaaggcccccggcggccccatgctgctgccccagacctacggcgccagaggcaagggcagaacccagctgagcctgctgcccagagccctgcagagacccagcgccgccgccccccaggccgagaacggccccgccgccgcccccgccgtggccgcccccgccgccaccgaggcccccaagatgagcaacgccgacttcgccaagctgttcctgagaaagtag

SEQ ID NO: 181713 - DNA, 390 bp, Artificial Sequence
  derived and/or modified sequence
atggccaccgccgccgagaccagcgccagcgagcccgaggccgagagcaaggccggccccaaggccgacggcgaggaggacgaggtgaaggccgccagaaccagaagaaaggtgctgagcagagccgtggccgccgccacctacaagaccatgggccccgcctgggaccagcaggaggagggcgtgagcgagagcgacggcgacgagtacgccatggccagcagcgccgagagcagccccggcgagtacgagtgggagtacgacgaggaggaggagaagaaccagctggagatcgagagactggaggagcaggtgggccccggcgtgggcagcggccacctgcccgtgttccaggtgctgggcagcccctgccccggcccccccccctag

SEQ ID NO: 181714 - DNA, 2892 bp, Artificial Sequence
  derived and/or modified sequence
atggccaccgccgccgagaccagcgccagcgagcccgaggccgagagcaaggccggccccaaggccgacggcgaggaggacgaggtgaaggccgccagaaccagaagaaaggtgctgagcagagccgtggccgccgccacctacaagaccatgggccccgcctgggaccagcaggaggagggcgtgagcgagagcgacggcgacgagtacgccatggccagcagcgccgagagcagccccggcgagtacgagtgggagtacgacgaggaggaggagaagaaccagctggagatcgagagactggaggagcagctgagcatcaacgtgtacgactacaactgccacgtggacctgatcagactgctgagactggagggcgagctgaccaaggtgagaatggccagacagaagatgagcgagatcttccccctgaccgaggagctgtggctggagtggctgcacgacgagatcagcatggcccaggacggcctggacagagagcacgtgtacgacctgttcgagaaggccgtgaaggactacatctgccccaacatctggctggagtacggccagtacagcgtgggcggcatcggccagaagggcggcctggagaaggtgagaagcgtgttcgagagagccctgagcagcgtgggcctgcacatgaccaagggcctggccctgtgggaggcctacagagagttcgagagcgccatcgtggaggccgccagactggagaaggtgcacagcctgttcagaagacagctggccatccccctgtacgacatggaggccaccttcgccgagtacgaggagtggagcgaggaccccatccccgagagcgtgatccagaactacaacaaggccctgcagcagctggagaagtacaagccctacgaggaggccctgctgcaggccgaggcccccagactggccgagtaccaggcctacatcgacttcgagatgaagatcggcgaccccgccagaatccagctgatcttcgagagagccctggtggagaactgcctggtgcccgacctgtggatcagatacagccagtacctggacagacagctgaaggtgaaggacctggtgctgagcgtgcacaacagagccatcagaaactgcccctggaccgtggccctgtggagcagatacctgctggccatggagagacacggcgtggaccaccaggtgatcagcgtgaccttcgagaaggccctgaacgccggcttcatccaggccaccgactacgtggagatctggcaggcctacctggactacctgagaagaagagtggacttcaagcaggacagcagcaaggagctggaggagctgagagccgccttcaccagagccctggagtacctgaagcaggaggtggaggagagattcaacgagagcggcgaccccagctgcgtgatcatgcagaactgggccagaatcgaggccagactgtgcaacaacatgcagaaggccagagagctgtgggacagcatcatgaccagaggcaacgccaagtacgccaacatgtggctggagtactacaacctggagagagcccacggcgacacccagcactgcagaaaggccctgcacagagccgtgcagtgcaccagcgactaccccgagcacgtgtgcgaggtgctgctgaccatggagagaaccgagggcagcctggaggactgggacatcgccgtgcagaagaccgagaccagactggccagagtgaacgagcagagaatgaaggccgccgagaaggaggccgccctggtgcagcaggaggaggagaaggccgagcagagaaagagagccagagccgagaagaaggccctgaagaagaagaagaagatcagaggccccgagaagagaggcgccgacgaggacgacgagaaggagtggggcgacgacgaggaggagcagcccagcaagagaagaagagtggagaacagcatccccgccgccggcgagacccagaacgtggaggtggccgccggccccgccggcaagtgcgccgccgtggacgtggagccccccagcaagcagaaggagaaggccgccagcctgaagagagacatgcccaaggtgctgcacgacagcagcaaggacagcatcaccgtgttcgtgagcaacctgccctacagcatgcaggagcccgacaccaagctgagacccctgttcgaggcctgcggcgaggtggtgcagatcagacccatcttcagcaacagaggcgacttcagaggctactgctacgtggagttcaaggaggagaagagcgccctgcaggccctggagatggacagaaagagcgtggagggcagacccatgttcgtgagcccctgcgtggacaagagcaagaaccccgacttcaaggtgttcagatacagcaccagcctggagaagcacaagctgttcatcagcggcctgcccttcagctgcaccaaggaggagctggaggagatctgcaaggcccacggcaccgtgaaggacctgagactggtgaccaacagagccggcaagcccaagggcctggcctacgtggagtacgagaacgagagccaggccagccaggccgtgatgaagatggacggcatgaccatcaaggagaacatcatcaaggtggccatcagcaaccccccccagagaaaggtgcccgagaagcccgagaccagaaaggcccccggcggccccatgctgctgccccagacctacggcgccagaggcaagggcagaacccagctgagcctgctgcccagagccctgcagagacccagcgccgccgccccccaggccgagaacggccccgccgccgcccccgccgtggccgcccccgccgccaccgaggcccccaagatgagcaacgccgacttcgccaagctgttcctgagaaagtag

SEQ ID NO: 181715 - DNA, 2100 bp, Artificial Sequence
  derived and/or modified sequence
atgaggctgagaaggttgggccagggagggcgatgctatcggggactctggcccctgcggcacacccgtccctggagctcacctggggaatacgaatgggaatacgacgaggaggaggagaaaaatcaattggagatagagaggttggaggaacaactgtccattaacgtgtacgattataattgccacgttgacctcatccggctgctacggctggagggcgagctgaccaaagtgaggatggcccgacagaaaatgtcggagattttccccttaacggaagaattgtggctcgagtggctccacgacgagatttctatggctcaggacggcttagatcgagagcacgtctacgacctgttcgagaaagccgtcaaggactatatatgccctaacatctggttggaatacggtcagtactccgtgggcggcataggacaaaaaggggggctggagaaggtgcgtagcgtgttcgagcgcgccctttcctccgtgggtcttcatatgacaaaaggtttggctctgtgggaggcttatcgggagtttgagtccgctatcgtagaagccgccaggctggaaaaggtccactcgctgttccgccgacaactggccatccctctctatgatatggaagctacatttgctgagtatgaagagtggtcagaggatcccattcccgagtcagttatccagaactataacaaagccctacagcagctggagaaatacaaaccatatgaggaagccctcctccaggccgaggcccccaggctggccgagtaccaggcctatatagacttcgagatgaagatcggggaccctgcaaggatccagttgattttcgagagggcactggttgaaaactgtttggtccccgatctctggatccgatacagccaatatcttgacaggcaattaaaagtgaaagatctggtgttgtccgttcacaacagagctattagaaactgtccgtggactgtcgcactgtggtcccgctacttgttagctatggagcgacacggagttgatcatcaggtgatctctgtgaccttcgaaaaagctcttaatgcaggttttatccaggctaccgattatgtggaaatttggcaggcctacttagactacctaaggaggagggtggattttaagcaagatagcagcaaggaactggaggaattacgggccgcatttacaagggccttggagtacttaaagcaagaagtcgaagagagattcaacgaatcgggcgaccccagctgcgtgatcatgcagaactgggccagaatagaggccagattgtgcaacaatatgcagaaggcccgcgaactgtgggatagtatcatgactcggggcaatgccaagtatgcgaacatgtggttagagtactacaatttagagagagcacacggtgatactcagcactgccgcaaagcactgcacagagccgtgcagtgcacaagcgactaccccgagcacgtctgcgaggttcttcttactatggaacgtacagaggggtcgcttgaagactgggatatagctgtacaaaaaactgagactaggctggccagagttaacgagcagcgcatgaaagctgcggagaaagaggccgccctggtgcaacaggaagaagagaaggctgagcaaagaaagcgcgccagagctgaaaagaaggcccttaaaaaaaaaaaaaaaatcagggggcctgaaaaacggggggcagatgaagacgatgagaaggagtggggagatgatgaggaagcctttcagacccaaaaaggcagagagcagcatccctgctcttggcgcaacacaaagtgtaggagctctagcagagctcggtgggagatgtgttgtcgacgctgtggagctccattcgaggccgagggggaaggtagtttacctgaggaagggcatgcacagggagcagctagacagcagcagggccagcaccataggctatgtcaacaaccagctttacaacacgcaggggctggtcacgaagcccaggccacccttaggggcctctggggcggcggccctgaccctacccaccttcaacagccctggggatttccaagactgctcttacgtggagtctag

SEQ ID NO: 181716 - DNA, 2784 bp, Artificial Sequence
  derived and/or modified sequence
atggccactgcagcggaaacctccgcaagcgagccggaggccgagtctaaggccgggccgaaagcagacggcgaggaagatgaagtcaaagcggcgaggacccggcgcaaagttcttagtcgggccgtcgcagcagccacttataagaccatgggaccagcctgggatcagcaggaggagggcgtcagcgaatctgatggggatgagtacgctatggcatcctctgcagagtcatctcccggagagtatgagtgggagtatgatgaagaggaggaaaaaaatcagctggagattgagcgcctggaggagcagctgtcaataaatgtttatgattacaactgccacgtggacctgatccggttgttaagactggaaggggaactcaccaaggtgagaatggcccggcagaaaatgagcgagatttttcccctgaccgaggagctatggctcgaatggctccacgacgaaatctctatggctcaggacggactggacagggaacacgtttacgatctgttcgagaaagccgtgaaggactacatatgcccaaacatatggttggagtacggccagtactcagtgggtggcatagggcagaaaggaggcctagaaaaggtacggagcgtatttgagcgtgcactgtccagcgtgggattacacatgactaaaggtctggctctctgggaagcctacagggagttcgagtctgcaatcgttgaggccgcacgtctggaaaaggtacattctctgttcagacgtcagctcgccatccctctctacgacatggaagccacattcgcagagtatgaagagtggtctgaggacccaattccagagtctgtgatccagaactacaacaaggcgttgcaacagcttgaaaagtacaagccttacgaagaggctttactccaggcagaggcccccaggctcgccgagtaccaagcatacatcgattttgagatgaagatcggggacccggctcggattcagctgatatttgagcgggcactagtggaaaactgtctggtgcctgacctttggattcgctactcacaatatctggatcgacaactgaaggtaaaggatctggtgttatcagtccataatagagccataagaaactgcccttggaccgttgcactctggtccagatacctgctggccatggagagacatggggtggaccaccaagtgatcagtgattcttctaaggaactggaggaattgcgggcagcatttacaagagcgctggagtatttgaagcaggaagtggaagagcgcttcaatgagagtggggaccccagctgcgtgattatgcaaaactgggctaggattgaagccaggctgtgtaataatatgcagaaggcgcgggagttgtgggacagtattatgactaggggcaatgccaagtatgccaatatgtggctggagtactataatctcgagcgcgcacacggggatacacagcactgtcggaaagctctgcatcgggctgtgcagtgcacatcagactatccagaacacgtctgtgaagtgctgctgaccatggagagaaccgagggatctctggaagactgggatatcgctgtgcagaaaactgagactaggctcgccagagtgaatgaacagcgcatgaaagccgcagagaaggaggcagctctggtgcagcaagaggaggaaaaagctgaacagaggaagcgcgcaagagctgagaaaaaggctctgaagaagaagaagaagattcgtggcccagagaagcgaggagccgacgaggacgacgagaaggagtggggcgacgacgaggaggagcagccttccaaacgtcgtagagtcgaaaacagtattcccgccgcaggcgagacacaaaatgttgaggtcgccgccggaccggcagggaaatgtgccgccgtcgacgtagagccgcccagtaagcagaaggagaaggctgcctccctgaagcgggatatgcccaaggtgctgcatgatagctccaaagattctattactgtgtttgtcagcaatctgccatactccatgcaggagcccgacacaaagctgcggccgctgtttgaggcatgcggcgaggtagtccaaataagacccatttttagcaaccgcggtgattttaggggatactgttacgtggaatttaaggaggagaagtcggccttgcaggcccttgaaatggataggaaaagcgtagagggaagacccatgtttgtcagcccctgtgtagacaagtctaagaatcccgacttcaaagtcttccgctattcgacttcactagaaaaacacaaactctttatttcaggcctgcccttttcctgtacgaaagaggagctggaggagatctgtaaagcacacggcacagtaaaggacctccgcctggttactaacagggctggcaaaccgaagggtttagcttacgtggagtacgagaatgaatcacaggctagccaggctgttatgaagatggacggtatgactatcaaagagaatataattaaagtcgccatttctaaccccccacagcgtaaggtgcctgaaaagcctgagaccagaaaggctccgggcggccccatgttgctcccacagacatatggggccagaggcaagggacgaactcagctgtctctactgcccagagccctgcagcgacccagtgctgctgctcctcaggccgaaaacgggcccgccgcggcacctgcggtggctgcacccgcagccactgaggccccaaagatgtcaaacgccgacttcgcaaagctcttccttagaaagtag

SEQ ID NO: 181717 - DNA, 390 bp, Artificial Sequence
  derived and/or modified sequence
atggcaactgctgcagaaacatcagccagtgagcctgaggcagaaagcaaggcaggtcctaaagctgatggtgaagaagatgaagttaaggcggcaagaacaagacgcaaggtgctgagccgtgcagtggcggccgcgacctataaaaccatgggccctgcttgggaccagcaagaggaaggagtcagcgagagtgatggggacgagtatgccatggcctcttcagccgaaagctcaccgggagaatacgagtgggagtacgatgaggaggaagagaagaatcaactcgaaatagaaagactcgaggagcaggtgggcccaggcgttggtagcggacatctccccgtgttccaagtgcttggatcgccatgcccggggccacccccatag

SEQ ID NO: 181718 - DNA, 2892 bp, Artificial Sequence
  derived and/or modified sequence
atggcaaccgctgccgagactagtgcttctgagcccgaagctgagtctaaagccggacccaaagccgacggcgaggaggacgaggtgaaggcggcaagaacaaggcggaaagtgctttctcgggcggtcgccgcagccacttataagaccatggggccagcctgggaccagcaggaggaaggcgtgtctgaatccgatggtgatgagtacgctatggcctcctcagccgaatccagtcccggggaatatgaatgggaatatgacgaggaagaggagaaaaaccagctggaaatcgagcgcctcgaagaacagttatccatcaatgtatacgattataactgccatgttgacctcatccggctcttgcgtctggaaggggagttaactaaggtgcggatggctcggcaaaagatgtctgaaatcttccctctgaccgaggaattgtggctggagtggctgcacgacgagatcagtatggcgcaggacgggctcgatcgagagcacgtgtatgatctgttcgagaaggctgtgaaagactatatttgccccaacatctggcttgagtacggacagtactccgttggtggcattggccagaaggggggcctcgagaaggtccgctccgtcttcgagcgtgcactgtcttcagtgggattgcatatgaccaaggggctggcgctttgggaagcctaccgagaatttgaaagtgctatcgtagaggctgcacgccttgagaaggtccatagtctgtttagacgccaactggccatacccctgtatgacatggaagctacttttgccgaatatgaggagtggagtgaggaccccattcctgagtcagttatccagaattacaacaaagctctgcagcagctggagaaatataaaccttacgaggaagccctgctgcaggccgaagctcctagactggcagagtatcaggcttacatcgattttgagatgaaaatcggggaccctgccagaatccagctgatttttgagcgtgctctggtggagaactgcctggtgcccgacttatggatcaggtactcccagtatctcgatcgccagctgaaagttaaggacctagtactcagcgtgcacaatcgcgcaattagaaattgtccatggacagtggcgttgtggtcccggtatctcctggcgatggaaagacacggagttgatcaccaggtcatatctgtcacattcgagaaagcactgaatgccgggttcatccaggccacggattacgttgaaatttggcaggcttacctcgactacctgaggcgtcgggttgactttaagcaggatagttctaaggagctggaggagctgcgcgccgctttcaccagggccctggaatacctcaaacaggaggttgaggaacgattcaacgagtcaggggacccctcttgcgtcatcatgcagaattgggctaggatcgaggcacggctgtgcaacaatatgcagaaggcacgagaactctgggactccatcatgacccggggcaatgcaaaatacgcaaacatgtggctagaatattacaatctagagcgggcccatggcgatacccagcactgccggaaggctctgcatcgtgccgtacagtgtacttctgactatccagaacacgtgtgtgaggttctgctgacgatggagcgaaccgagggatcactcgaggattgggacatcgccgtgcagaaaactgagacgcgcttagccagggttaacgaacaacggatgaaagcggcagaaaaggaggccgcactggttcagcaagaggaagaaaaggccgagcagcgcaagcgggcaagggcagagaagaaggccctcaaaaaaaaaaagaagataagaggtcctgaaaagcgtggtgccgacgaagacgacgaaaaggaatggggtgacgatgaagaggagcaacctagcaagaggagaagagtggaaaattccataccggccgctggggagacacagaatgtggaagtagccgctggaccagccggcaaatgtgccgctgtggacgttgagccaccctccaagcagaaggagaaggctgctagcctgaaacgtgatatgccaaaagtcctccacgattcaagcaaggattccataacagtttttgtgagcaacctcccatatagcatgcaagaacccgatacaaaactgagaccactgttcgaggcgtgtggtgaggttgtgcagatccgcccaatcttctccaatcgcggtgatttccggggttattgctatgtggagtttaaagaggagaagtcagcactgcaggccctggagatggataggaagtccgtcgagggtcgccccatgtttgtttccccttgcgttgacaagtcaaaaaacccagactttaaggtttttcggtattcaaccagcctggagaaacataagctgttcatctctgggctgcctttttcatgtactaaggaagagcttgaagagatttgtaaagctcatggcactgtgaaagacctgagactcgttacaaacagggccgggaagccaaagggcctggcatacgttgaatatgagaatgaaagccaggctagccaagccgttatgaaaatggacggaatgactattaaggagaatatcataaaagtggctatctccaatcctccacagagaaaggttcctgaaaagcccgagacacgcaaggcaccaggaggtcccatgctgctgcctcagacatatggtgcccgtggtaaaggccggactcagcttagtcttctgcctcgggcccttcagcggcctagcgcagcggctcctcaggcagagaacggacccgccgcagctccagccgtagccgcccccgcagccaccgaggctcccaaaatgagtaatgccgatttcgctaaactgtttctgaggaagtag

SEQ ID NO: 181719 - DNA, 2100 bp, Artificial Sequence
  derived and/or modified sequence
atgaggctgcggcggctgggccagggcggccgctgctaccggggcctgtggcccctgcggcacacccggccctggagcagccctggagaatatgagtgggagtatgatgaggaggaggagaagaaccagctggagattgaaaggctggaggagcagctgagcatcaacgtgtatgactacaactgccacgtggacctgatccggctgctgcggctggagggggagctgaccaaggtgaggatggcccggcagaagatgtctgagatcttccccctgacagaggagctgtggctggagtggctgcatgatgagatctccatggcccaggacggcctggaccgggagcacgtgtatgacctgtttgagaaggctgtgaaggactacatctgccccaacatctggctggagtatggccagtacagcgtgggcggcatcggccagaagggcggcctggagaaggtgcgctctgtgtttgagcgggccctgagctctgtgggcctgcacatgaccaagggcctggccctgtgggaggcctaccgggagtttgagagcgccatcgtggaggccgcccggctggagaaggtgcacagcctcttccggcggcagctggccatccccctgtatgacatggaggccacctttgctgaatatgaggagtggagcgaggaccccatccctgagagcgtcatccagaactacaacaaggccctgcagcagctggagaagtacaagccctatgaggaggccctgctgcaggccgaggccccccggctggccgagtaccaggcctacatcgactttgagatgaagattggagaccctgcccgcatccagctgatctttgagcgggccctggtggagaactgcctggtgcctgacctgtggatccgctacagccagtacctggaccggcagctgaaggtgaaggacctggtgctgtctgtgcacaacagagccatccggaactgcccctggacagtggccctgtggagccgctacctgctggccatggagagacatggagtggaccaccaggtgatctctgtgacctttgagaaggccctgaatgccggcttcatccaggccacagattatgtggagatctggcaggcctacctggactacctgcggcggcgggtggacttcaagcaggacagcagcaaggagctggaggagctgcgggccgccttcacccgggccctggagtacctgaagcaggaggtggaggagcgcttcaatgaaagtggggaccccagctgtgtgatcatgcagaactgggccagaattgaggcccggctgtgcaacaacatgcagaaggcccgggagctgtgggacagcatcatgaccagaggaaatgccaagtatgccaacatgtggctggagtactacaacctggagcgggcccatggagacacccagcactgcaggaaggccctgcacagagctgtgcagtgcaccagtgactacccagagcacgtgtgtgaggtgctgctgaccatggagaggacagagggcagcctggaggactgggacattgctgtgcagaagacagagacccggctggcccgggtgaatgagcagaggatgaaggctgctgagaaggaggccgccctggtgcagcaggaggaggagaaggccgagcagaggaagagggcccgggcagagaagaaggccctgaagaagaagaagaagatccggggccctgagaagagaggagcagatgaagatgatgagaaggagtggggagatgatgaggaggccttccagacccagaagggccgggagcagcacccctgctcctggaggaacaccaagtgccgcagcagcagccgggcccgctgggagatgtgctgcagaagatgtggggccccctttgaagctgagggggagggcagcctgcctgaggagggccacgcccagggcgccgcccggcagcagcagggccagcaccaccggctgtgccagcagcctgccctgcagcacgccggggccggccacgaggcccaggccaccctgcggggcctgtggggcggcggccctgaccccacccacctgcagcagccctggggcttcccccggctgctgctgcggggcgtgtag

SEQ ID NO: 181720 - DNA, 2784 bp, Artificial Sequence
  derived and/or modified sequence
atggccacagctgctgagaccagcgccagcgagcctgaggccgagagcaaggccggccccaaggcagatggagaggaggatgaggtgaaggccgcccggaccaggaggaaggtgctgagcagagctgtggccgccgccacctacaagaccatgggccctgcctgggaccagcaggaggagggcgtgtctgagagtgatggagatgaatatgccatggccagcagcgctgagagcagccctggagaatatgagtgggagtatgatgaggaggaggagaagaaccagctggagattgaaaggctggaggagcagctgagcatcaacgtgtatgactacaactgccacgtggacctgatccggctgctgcggctggagggggagctgaccaaggtgaggatggcccggcagaagatgtctgagatcttccccctgacagaggagctgtggctggagtggctgcatgatgagatctccatggcccaggacggcctggaccgggagcacgtgtatgacctgtttgagaaggctgtgaaggactacatctgccccaacatctggctggagtatggccagtacagcgtgggcggcatcggccagaagggcggcctggagaaggtgcgctctgtgtttgagcgggccctgagctctgtgggcctgcacatgaccaagggcctggccctgtgggaggcctaccgggagtttgagagcgccatcgtggaggccgcccggctggagaaggtgcacagcctcttccggcggcagctggccatccccctgtatgacatggaggccacctttgctgaatatgaggagtggagcgaggaccccatccctgagagcgtcatccagaactacaacaaggccctgcagcagctggagaagtacaagccctatgaggaggccctgctgcaggccgaggccccccggctggccgagtaccaggcctacatcgactttgagatgaagattggagaccctgcccgcatccagctgatctttgagcgggccctggtggagaactgcctggtgcctgacctgtggatccgctacagccagtacctggaccggcagctgaaggtgaaggacctggtgctgtctgtgcacaacagagccatccggaactgcccctggacagtggccctgtggagccgctacctgctggccatggagagacatggagtggaccaccaggtgatcagtgacagcagcaaggagctggaggagctgcgggccgccttcacccgggccctggagtacctgaagcaggaggtggaggagcgcttcaatgaaagtggggaccccagctgtgtgatcatgcagaactgggccagaattgaggcccggctgtgcaacaacatgcagaaggcccgggagctgtgggacagcatcatgaccagaggaaatgccaagtatgccaacatgtggctggagtactacaacctggagcgggcccatggagacacccagcactgcaggaaggccctgcacagagctgtgcagtgcaccagtgactacccagagcacgtgtgtgaggtgctgctgaccatggagaggacagagggcagcctggaggactgggacattgctgtgcagaagacagagacccggctggcccgggtgaatgagcagaggatgaaggctgctgagaaggaggccgccctggtgcagcaggaggaggagaaggccgagcagaggaagagggcccgggcagagaagaaggccctgaagaagaagaagaagatccggggccctgagaagagaggagcagatgaagatgatgagaaggagtggggagatgatgaggaggagcagcccagcaagagaagaagagtggagaacagcatcccagctgctggggagacccagaatgtggaggtggccgccggccctgctggaaaatgtgccgctgtggatgtggagccccccagcaagcagaaggagaaggccgccagcctgaagagggacatgcccaaggtgctgcatgacagcagcaaggacagcatcaccgtgtttgtgagcaacctgccctacagcatgcaggagccagacaccaagctgcggcccctgtttgaggcctgtggggaggtggtgcagatccggcccatcttcagcaacagaggagacttccggggctactgctacgtggagttcaaggaggagaagagcgccctgcaggccctggagatggacaggaagtctgtggagggccggcccatgtttgtgagcccctgtgtggacaagagcaagaacccagacttcaaggtgttccgctacagcaccagcctggagaagcacaagctgttcatcagcggcctgcccttcagctgcaccaaggaggagctggaggagatctgcaaggcccacggcaccgtgaaggacctgcggctggtgaccaacagagctgggaagcccaagggcctggcctacgtggagtatgaaaatgaaagccaggccagccaggccgtgatgaagatggatggcatgaccatcaaggagaacatcatcaaggtggccatcagcaaccccccccagaggaaggtgcctgagaagccagagaccaggaaggcccctgggggccccatgctgctgccccagacctatggagcccggggcaagggccgcacccagctgagcctgctgccccgggccctgcagaggcccagcgctgctgccccccaggctgaaaatggacctgctgctgccccagctgtggccgccccagctgccacagaggcccccaagatgagcaatgctgactttgccaagctgttcctgaggaagtag

SEQ ID NO: 181721 - DNA, 390 bp, Artificial Sequence
  derived and/or modified sequence
atggccacagctgctgagaccagcgccagcgagcctgaggccgagagcaaggccggccccaaggcagatggagaggaggatgaggtgaaggccgcccggaccaggaggaaggtgctgagcagagctgtggccgccgccacctacaagaccatgggccctgcctgggaccagcaggaggagggcgtgtctgagagtgatggagatgaatatgccatggccagcagcgctgagagcagccctggagaatatgagtgggagtatgatgaggaggaggagaagaaccagctggagattgaaaggctggaggagcaggtgggccctggggtgggcagcggccacctgcctgtgttccaggtgctgggcagcccctgccccggccccccaccctag

SEQ ID NO: 181722 - DNA, 2892 bp, Artificial Sequence
  derived and/or modified sequence
atggccacagctgctgagaccagcgccagcgagcctgaggccgagagcaaggccggccccaaggcagatggagaggaggatgaggtgaaggccgcccggaccaggaggaaggtgctgagcagagctgtggccgccgccacctacaagaccatgggccctgcctgggaccagcaggaggagggcgtgtctgagagtgatggagatgaatatgccatggccagcagcgctgagagcagccctggagaatatgagtgggagtatgatgaggaggaggagaagaaccagctggagattgaaaggctggaggagcagctgagcatcaacgtgtatgactacaactgccacgtggacctgatccggctgctgcggctggagggggagctgaccaaggtgaggatggcccggcagaagatgtctgagatcttccccctgacagaggagctgtggctggagtggctgcatgatgagatctccatggcccaggacggcctggaccgggagcacgtgtatgacctgtttgagaaggctgtgaaggactacatctgccccaacatctggctggagtatggccagtacagcgtgggcggcatcggccagaagggcggcctggagaaggtgcgctctgtgtttgagcgggccctgagctctgtgggcctgcacatgaccaagggcctggccctgtgggaggcctaccgggagtttgagagcgccatcgtggaggccgcccggctggagaaggtgcacagcctcttccggcggcagctggccatccccctgtatgacatggaggccacctttgctgaatatgaggagtggagcgaggaccccatccctgagagcgtcatccagaactacaacaaggccctgcagcagctggagaagtacaagccctatgaggaggccctgctgcaggccgaggccccccggctggccgagtaccaggcctacatcgactttgagatgaagattggagaccctgcccgcatccagctgatctttgagcgggccctggtggagaactgcctggtgcctgacctgtggatccgctacagccagtacctggaccggcagctgaaggtgaaggacctggtgctgtctgtgcacaacagagccatccggaactgcccctggacagtggccctgtggagccgctacctgctggccatggagagacatggagtggaccaccaggtgatctctgtgacctttgagaaggccctgaatgccggcttcatccaggccacagattatgtggagatctggcaggcctacctggactacctgcggcggcgggtggacttcaagcaggacagcagcaaggagctggaggagctgcgggccgccttcacccgggccctggagtacctgaagcaggaggtggaggagcgcttcaatgaaagtggggaccccagctgtgtgatcatgcagaactgggccagaattgaggcccggctgtgcaacaacatgcagaaggcccgggagctgtgggacagcatcatgaccagaggaaatgccaagtatgccaacatgtggctggagtactacaacctggagcgggcccatggagacacccagcactgcaggaaggccctgcacagagctgtgcagtgcaccagtgactacccagagcacgtgtgtgaggtgctgctgaccatggagaggacagagggcagcctggaggactgggacattgctgtgcagaagacagagacccggctggcccgggtgaatgagcagaggatgaaggctgctgagaaggaggccgccctggtgcagcaggaggaggagaaggccgagcagaggaagagggcccgggcagagaagaaggccctgaagaagaagaagaagatccggggccctgagaagagaggagcagatgaagatgatgagaaggagtggggagatgatgaggaggagcagcccagcaagagaagaagagtggagaacagcatcccagctgctggggagacccagaatgtggaggtggccgccggccctgctggaaaatgtgccgctgtggatgtggagccccccagcaagcagaaggagaaggccgccagcctgaagagggacatgcccaaggtgctgcatgacagcagcaaggacagcatcaccgtgtttgtgagcaacctgccctacagcatgcaggagccagacaccaagctgcggcccctgtttgaggcctgtggggaggtggtgcagatccggcccatcttcagcaacagaggagacttccggggctactgctacgtggagttcaaggaggagaagagcgccctgcaggccctggagatggacaggaagtctgtggagggccggcccatgtttgtgagcccctgtgtggacaagagcaagaacccagacttcaaggtgttccgctacagcaccagcctggagaagcacaagctgttcatcagcggcctgcccttcagctgcaccaaggaggagctggaggagatctgcaaggcccacggcaccgtgaaggacctgcggctggtgaccaacagagctgggaagcccaagggcctggcctacgtggagtatgaaaatgaaagccaggccagccaggccgtgatgaagatggatggcatgaccatcaaggagaacatcatcaaggtggccatcagcaaccccccccagaggaaggtgcctgagaagccagagaccaggaaggcccctgggggccccatgctgctgccccagacctatggagcccggggcaagggccgcacccagctgagcctgctgccccgggccctgcagaggcccagcgctgctgccccccaggctgaaaatggacctgctgctgccccagctgtggccgccccagctgccacagaggcccccaagatgagcaatgctgactttgccaagctgttcctgaggaagtag

SEQ ID NO: 181723 - DNA, 2100 bp, Artificial Sequence
  derived and/or modified sequence
atgcggctgcggcggctgggccagggcggccggtgctaccggggcctgtggccgctcagacacactagaccctggtctagtcccggagaatacgaatgggagtacgacgaggaagaggaaaaaaatcagcttgaaattgagcggctggaggagcagctgagcattaacgtttacgattacaactgtcatgtggatctgattaggctcctccgccttgagggagagctgaccaaagttcggatggcgcggcaaaaaatgagcgagattttccccctgactgaggagctctggctcgaatggttacatgacgagatctccatggctcaagacgggcttgatcgagaacatgtgtacgatctgttcgagaaagccgtaaaggactatatttgtcctaatatctggctggagtatggccagtatagcgtgggtggcatcggccaaaaaggaggactggaaaaggtccgtagtgttttcgagagagctctctcatccgttggcctgcacatgactaaaggcctcgccctttgggaagcttacagggagttcgagtctgccattgtcgaggccgcaaggctcgagaaggtgcattccttgtttcgccgacagctggcgatccctctgtacgatatggaggcgactttcgcagaatacgaggaatggtccgaggacccaatacctgagtcagtgatccagaattacaacaaggccttgcagcagctcgagaagtacaaaccctatgaggaggccctcttgcaggctgaggccccacggctggctgaatatcaggcttacattgacttcgaaatgaaaattggcgatcccgcgcggatccagctcattttcgagcgggcgctggtggagaactgcctcgtgcccgacctgtggattagatactcccagtacctggatcgccaactgaaggtgaaagacttagtgctatcggtgcataatagggctattcggaattgcccctggacagttgctctctggtcccggtacttactggcgatggagaggcatggagtggatcatcaggttatttccgttaccttcgagaaagctttgaatgccggctttatccaggctactgactacgtggagatctggcaggcctacctggactatctccggcgccgcgtggactttaagcaggacagttctaaagagcttgaagaactccgggctgcgttcacacgagccctggagtatctgaagcaagaggtggaggagcgctttaacgagagtggcgatccatcatgtgtgatcatgcaaaactgggcaagaatagaggctcgcctttgcaataacatgcagaaggctcgggagctttgggattccattatgacgaggggcaatgctaaatacgcaaatatgtggctggagtattataacctggagagagcccacggcgacacacagcattgccgtaaggctctgcaccgagctgtccagtgcacttccgactaccctgaacacgtgtgcgaggtgctgttaaccatggaacgcacagagggaagtctggaggattgggatattgcagttcaaaagacagaaacgcggctggcgagggtcaacgaacagaggatgaaagctgctgagaaggaggctgcccttgttcagcaggaggaagaaaaggctgagcagcgcaagagagcacgagccgagaagaaagcactgaagaaaaagaaaaagatccggggtccagagaaaaggggcgcggacgaagacgacgagaaggagtggggagatgatgaagaggcgtttcaaactcaaaaaggccgtgaacaacatccatgtagctggaggaacacgaagtgccggtcatccagtagggctcgctgggaaatgtgctgccggcgctgcggcgctccattcgaggcagaaggagaaggctcacttcctgaggagggtcatgcacagggagccgccagacagcaacagggacagcaccacaggttgtgtcagcaacccgcactccaacatgctggagctggccacgaggcacaggcaacattgagaggcctgtgggggggaggccccgacccaacacatttgcagcaaccctgggggtttcccagattgcttttgcgcggagtgtag

SEQ ID NO: 181724 - DNA, 2784 bp, Artificial Sequence
  derived and/or modified sequence
atggccaccgccgccgagaccagcgccagcgagcccgaggccgagagcaaggcaggcccgaaagccgatggagaggaggacgaggtgaaggctgcccggacacgccgcaaagttctgtctcgtgccgtcgcagctgctacctacaagacaatgggccccgcttgggatcagcaggaggagggggtctctgagtcggacggcgatgaatacgccatggcttcttcagctgaaagctcccctggggagtacgaatgggaatacgatgaggaagaggagaaaaatcagctcgaaatcgagcgcttggaagaacaattgtcgatcaacgtatacgattacaactgccatgtggacctcatccgcttactgagacttgagggggaattgacgaaagttagaatggcccgacagaagatgagcgaaatcttccctctgactgaggagctgtggctggagtggctgcacgacgagatcagtatggcgcaggacgggttagaccgggagcatgtatatgaccttttcgagaaagccgtgaaggattacatctgtcctaatatatggctggagtacggtcagtacagcgttgggggcatcgggcagaaaggagggctcgagaaggtcaggtcggtcttcgagcgcgctcttagctctgtaggcctccatatgacaaagggcctcgccctttgggaagcatacagagagttcgagagcgcaatcgtggaggctgccaggctcgagaaggtgcacagcctgttcagacggcaactcgctatacctctctacgacatggaggccacttttgctgaatatgaggagtggagtgaggatcctatccctgagtccgtgattcagaattataacaaagccctgcaacagttggaaaaatacaaaccatacgaagaggcgttgttgcaggctgaagcacctcggttggccgaataccaggcctacatcgatttcgaaatgaagataggcgatccagcgcggatccagcttatcttcgagcgcgctctcgtcgaaaattgtcttgtgcctgacttatggatccgctatagtcagtatttggaccgccagttaaaagtgaaagatctagtgctttctgtgcataatagagcgattcgaaattgcccatggacggtggccctgtggtctcggtacctgctggcgatggaaagacacggagtggaccaccaggtcatctcagacagctccaaggagctggaggagttgagggcagcctttacgcgcgctttggaatatctgaaacaagaggttgaggagaggttcaatgagagtggagatccctcatgtgtgatcatgcagaactgggccaggattgaggcacggttgtgcaataacatgcagaaggccagggagttgtgggattcgatcatgacccgtggtaacgctaagtacgcaaatatgtggttagaatattacaacttggaaagagcccatggtgatactcagcactgtagaaaggccctccatcgagcagtgcagtgtacctcagactatcccgaacacgtttgcgaggtgctgctgaccatggagcgaactgagggtagcctggaggattgggacattgccgtccaaaaaacagagacccggctggccagggtgaacgagcagcggatgaaggccgctgagaaagaggccgcgctcgttcaacaggaggaagagaaagcagagcaaaggaaaagggcgcgcgccgagaaaaaagctctgaaaaagaaaaagaaaatccgagggcccgagaagcggggcgcagacgaggacgatgagaaagagtggggcgatgatgaagaggagcagccgagtaagcggaggagggtagagaacagcattccagccgccggtgaaacacagaacgtggaggtggccgccgggccagctggaaagtgtgctgccgtggacgtggaaccaccatccaaacagaaagagaaagcagccagtctcaaaagggatatgccaaaggtgctccatgattcaagcaaagactcaattactgtttttgtttcaaatttaccatactccatgcaggagcctgatactaagctgcggccactgtttgaggcttgtggggaggtggtgcagataaggccaatcttttcgaaccgcggcgacttccgaggatattgctacgtcgagtttaaggaagagaaaagcgccctgcaggctctcgaaatggaccgtaaaagcgtggaagggcggcccatgttcgtgagcccttgcgtggataagtctaagaaccccgatttcaaggtatttcggtactctacttctttagagaaacataaactctttatttctggactgccattttcttgcacaaaggaggagttagaagaaatatgcaaagctcatggaacagtgaaggacttgcggctggtcactaatcgggctggaaagccaaaaggactcgcatatgtagagtatgaaaacgaatcgcaggcttctcaagccgttatgaaaatggacggcatgacaatcaaggagaatattattaaagtcgcaatatctaatcccccccaacgcaaggtgcccgagaaaccagagactcgaaaagcccccggcggcccaatgttgcttccccagacatatggtgctagaggtaaaggacggacccagttaagcctcttgccacgtgccctgcagcgtcccagtgccgctgcccctcaggctgaaaatggtcctgcagctgctcctgcagtggccgcgcctgcagcaactgaggcccctaaaatgagcaacgccgactttgccaaactctttctcaggaagtag

SEQ ID NO: 181725 - DNA, 390 bp, Artificial Sequence
  derived and/or modified sequence
atggccaccgccgccgagaccagcgccagcgagcccgaggccgagtctaaggctggtccaaaagccgatggtgaggaggacgaagtgaaggccgccaggaccagaagaaaggtccttagccgggcggtcgccgccgcaacttacaagacaatggggcctgcgtgggaccagcaagaggaaggagtgtcagaaagcgacggcgatgagtatgcgatggcgtcaagtgccgaatctagccctggcgagtatgagtgggaatacgacgaagaagaggagaagaatcagctggaaattgaacggcttgaagagcaggtcggaccaggagtggggtcgggccatctgcccgtattccaggtgctgggatcgccatgcccaggtccaccgccctag

SEQ ID NO: 181726 - DNA, 2892 bp, Artificial Sequence
  derived and/or modified sequence
atggccaccgccgccgagaccagcgccagcgagcccgaggccgagagcaaggccggtcccaaggccgatggcgaggaggatgaagtgaaggccgctagaacccgtcggaaagtgctaagcagggctgttgcagcagcaacctataagaccatggggccagcgtgggatcagcaggaagagggtgtgtctgaatccgatggcgacgaatacgcaatggcttcctccgccgaatctagtcctggcgagtacgaatgggagtatgatgaggaggaagaaaaaaatcagctggagatcgaacgcctggaagagcagttgtccattaatgtctacgattataattgccacgtagatctcatccgcctgttgcggttagaaggggagctgacaaaggtgcgcatggccaggcaaaagatgtcagagatctttcctctaaccgaggagctttggctggaatggctgcacgatgaaatctctatggcccaggacgggttggaccgggaacatgtgtatgacttatttgagaaagcagtgaaagattacatttgccctaatatatggctcgaatatggccagtactctgtggggggaattggacaaaaaggcggactcgagaaggtccgatccgtctttgaaagggccctctcctctgtaggactccacatgactaagggacttgcgctgtgggaggcttacagggagtttgaaagcgctattgtggaagccgctcggctggagaaggtgcactccctctttcggagacagctggctattcccttatatgacatggaggcaacgtttgccgagtatgaagagtggtccgaggatccaattccagaatccgttatccagaattataacaaggctcttcagcagctcgagaagtacaaaccctacgaagaagctttgctccaggcggaggccccacgtctggccgagtatcaggcctacattgatttcgagatgaagattggtgatccggccaggatccagctgatcttcgaaagagctctcgtggaaaactgcctggtgccagacctgtggatccgctactctcagtatctggataggcagcttaaggtgaaggatctcgtcttgtctgtgcataacagagctatacggaattgcccttggaccgttgctctctggtcccggtatctcctcgccatggagcggcatggggtagaccaccaggtaatatctgtgacatttgagaaggccctcaacgcaggtttcatacaggccacagattatgtggagatctggcaggcctatttagactacttaagaaggagagtagatttcaagcaagacagtagcaaagaacttgaagagctccgggcagctttcacacgggcgctcgaatatctgaaacaggaggtcgaggaaagatttaacgagtcgggagacccatcctgcgtaattatgcagaattgggcgcgcattgaagctcgtctgtgtaacaacatgcagaaggcccgggagttgtgggacagtattatgactcgcggtaacgcgaagtacgccaacatgtggctggaatattacaatctggagagggcgcatggcgatacacaacactgtcggaaggccttacatcgcgcagtgcagtgcaccagtgactaccccgagcacgtgtgtgaggtgctcctgaccatggaaagaaccgaaggctctttggaggattgggatatcgccgttcagaagactgaaacgagacttgcccgagttaatgaacagagaatgaaagcagcagaaaaagaggccgcgctagtccagcaagaggaggagaaggctgagcagcgcaagagagctcgggccgaaaagaaggctctgaagaagaaaaagaaaatccggggcccggaaaagcgcggagcggacgaggacgacgagaaagaatggggggacgacgaggaggagcagccctctaaaaggagaagggtagagaactctattcccgcggcgggagagacacagaatgtagaagtggccgctggcccagccgggaaatgcgctgctgtggacgttgagcctcctagcaaacagaaggaaaaggccgccagtctgaaaagagacatgcccaaggtcttacacgatagctccaaggacagtatcacagtgttcgtctcgaacctcccgtatagcatgcaggaacccgacactaagctgcggcctctgtttgaggcttgtggagaagtcgtgcagattcgacctatctttagtaataggggggactttaggggctattgctatgttgaattcaaggaggaaaagagtgccctgcaggcccttgaaatggatcggaagagcgtggagggtcggcctatgtttgtgagcccctgtgtggataagtcgaaaaaccccgattttaaagtcttccgatatagtacgtccttagaaaaacacaagttgtttatctccggattgccgttctcatgtaccaaagaagagctggaagaaatctgcaaagcacacgggacggtgaaggatcttaggctggtgacaaacagggcagggaaacctaaaggattggcctacgtagaatatgaaaacgaaagtcaggccagtcaggcggtgatgaaaatggacggaatgaccataaaggagaatattattaaagtggccatctccaaccccccacaaaggaaagttcccgagaagccagaaaccaggaaagcgcccggggggcccatgttactgccccagacttacggtgcccgggggaaggggcggacccagctgagccttctgcccagggctctgcagcgtcctagtgccgcagcaccccaggccgagaatgggcctgctgccgctcccgccgtagccgcccccgccgccacagaggcaccaaaaatgagcaacgctgattttgccaagctgttcttgcggaagtag

SEQ ID NO: 181727 - DNA, 2100 bp, Artificial Sequence
  derived and/or modified sequence
atgagactgaggcgcttagggcaggggggtaggtgttatcgcggactgtggccactgaggcatactcgcccatggagtagcccgggtgaatacgagtgggagtatgacgaagaggaggagaaaaaccaactggagatcgagcgcctggaggaacaattgtccatcaatgtctacgactacaattgtcacgttgatctaattcgcctgttacgtctggaaggagagctgaccaaggtgcggatggcaagacagaaaatgagcgagatttttcccctgacggaggaattatggctggaatggttgcacgatgagatctcgatggctcaggacggacttgatagagaacacgtgtacgatctgtttgaaaaagcagtaaaagactacatatgcccaaacatctggttagagtatgggcagtactccgtggggggaataggccagaagggcggtctggagaaagttcggtcagtattcgaacgagcactgtccagtgtggggctgcatatgaccaaaggactcgcgctgtgggaggcctatcgcgagtttgagtccgccatagttgaggctgccagattggagaaagtgcactcattgttcaggcgccaactggcaatccctctgtatgatatggaggccacctttgctgagtacgaggagtggtctgaggacccgatcccagaatctgtgatccagaactacaataaggcattacagcaactggaaaagtacaaaccctacgaggaggctctactgcaggcagaggcgccacggctggcggaataccaggcatatatcgactttgagatgaaaatcggcgacccagcacggatccagctgatctttgaaagggccctggtggagaactgtctcgtgcctgatctgtggattcgctacagtcagtatttagatcggcagctgaaggttaaagacctggtcctatccgtgcacaatagagcgatcaggaattgcccctggacggtcgctctatggtcacgctatctgctagccatggaacggcatggggtggaccaccaggtgatttccgtgacttttgaaaaagccctcaatgcagggtttatacaggcaactgattacgtggagatttggcaggcctacttggactacctcaggcggagagtggactttaagcaggactcctcaaaagagctggaggagctgcgcgctgcattcactcgcgctttagagtatctcaagcaggaagtggaggaacggtttaacgagtctggggatccatcgtgtgtgattatgcagaattgggctagaatagaggccagattatgcaataacatgcagaaggccagagaattgtgggacagcattatgacccgcggaaacgctaaatatgccaacatgtggcttgagtactacaacctggaacgcgcacacggagacacccagcattgcaggaaggccctccatcgcgcagtccagtgcacgtccgactacccagaacatgtgtgtgaagtgttattgactatggagcggactgaaggctctttggaagactgggatattgctgtgcagaaaacagagacccgtctggcacgagtgaacgagcaacgtatgaaggcagccgaaaaggaagcagctctggtacagcaggaggaagaaaaggcagagcagcgcaaaagagccagggcagaaaaaaaggctctgaagaagaaaaagaagattagaggaccagagaagcgcggagcagacgaagacgatgaaaaagagtggggcgacgatgaagaagcctttcaaacacagaagggtcgcgaacaacacccatgtagctggcgtaataccaagtgcaggagctcctctagagcgcgatgggagatgtgctgcaggcgctgtggcgctccgtttgaagcagagggagagggctcgcttcctgaggagggccacgctcagggagccgctaggcagcagcaaggtcaacaccacaggctgtgccagcagccggcactgcagcatgctggcgctggccacgaggcccaggccacactgcggggtctttggggcggaggccctgacccaacccacctgcaacagccatggggattccctcgtttattgctgcgaggggtctag

SEQ ID NO: 181728 - DNA, 2784 bp, Artificial Sequence
  derived and/or modified sequence
atggcaaccgccgctgagacctcagcttccgagcccgaggccgaaagcaaggccggtcccaaagctgacggagaagaggatgaggtgaaagcggctcgcacccgacgcaaggtcttgtccagggccgtggccgctgcaacttacaaaactatgggaccagcctgggaccagcaggaggagggagtgagtgagtccgacggtgacgagtacgctatggcgtcaagtgctgagtcctcaccaggagagtatgagtgggaatacgatgaggaggaagagaaaaaccagttagagatagaacgcttggaggaacagttgagtatcaatgtgtatgactataactgtcacgtggacctcatcaggttactgcgccttgaaggcgagctgactaaagtgcgtatggccagacagaaaatgagcgagattttcccgctcaccgaggaactttggctggaatggctacatgatgaaatttctatggctcaagatggcctggacagagaacacgtatacgacctatttgagaaggccgttaaggactacatttgccccaacatttggctggaatacgggcaatacagcgtcggagggatcggccagaaagggggactagagaaggtgcgcagcgttttcgagcgcgctctctcctcagtggggctccacatgaccaagggcttggccctctgggaggcataccgtgagtttgaatcggccatcgtagaggctgcccgactcgaaaaggtgcactctctgtttcggagacagctggctattcctctgtacgacatggaggctacctttgctgaatacgaggagtggagcgaggaccctatcccagagagcgtgatccaaaattacaataaggccttacagcagctcgagaagtacaaaccatatgaagaggcattactgcaggcagaagcgcctcggttagcagagtaccaggcttatatcgatttcgagatgaagattggagaccccgcaagaattcaactaattttcgaaagagccttggtagagaattgcctcgtccctgatctctggatacggtattcacagtacctagatagacagctgaaagtcaaagatctggtgctgtcggttcataacagggcaatccggaactgtccttggacggttgcactgtggtctcggtacctcttagcaatggagcgccatggggtcgatcaccaagtgatcagcgactctagcaaggagcttgaggaactgcgggctgccttcacaagggcactcgagtatttaaagcaagaggtcgaagagcgattcaatgaaagtggggacccatcatgtgtcattatgcaaaattgggcccgaatcgaggcccgactgtgcaacaatatgcagaaggccagagaactgtgggatagtatcatgacacgtggcaacgctaagtacgcaaatatgtggctggagtattacaacctggaacgagcccatggtgatacacaacactgcagaaaagcattgcaccgtgctgtacaatgtacttctgactatccagaacacgtatgcgaagtcctgctgaccatggaaagaactgagggctcactggaggattgggatattgccgtgcaaaaaactgagaccagattagcgcgtgttaatgagcagcgcatgaaggccgctgagaaggaagccgctttagttcagcaagaggaggagaaagccgagcagcggaaacgagcaagggcagagaaaaaggccctgaagaagaagaagaagatccgcggacctgaaaagcggggagccgacgaggacgacgagaaagagtggggcgacgacgaggaagagcagcctagtaaaaggaggagagtcgagaactctattcccgctgccggagaaactcaaaacgtggaagtcgccgctggcccagctgggaaatgtgctgcggtggacgtcgagcccccttctaagcagaaggaaaaagctgctagcctcaagcgggacatgcccaaggttcttcatgattcgagtaaagacagcattacggtgttcgtctctaacctaccatattctatgcaggagcccgacacgaagctacggcctctgttcgaggcatgcggagaagttgtccagatcagaccaatcttttctaatcgcggagatttccggggatactgctatgtggaattcaaagaagagaaatccgctttacaggcgctggaaatggatcgcaaatcagtggaaggacggccaatgtttgtgtctccatgcgtagacaaatccaaaaatcccgactttaaagtattccggtattccacaagcctggagaagcataagctgttcatctcaggactgccattttcgtgtaccaaggaggagctggaggagatctgtaaggcccatggtacggtgaaggatctgcggttggtgactaaccgggctggcaagccgaagggtttagcatacgttgagtacgaaaacgagagccaggcttcacaggctgtcatgaagatggatgggatgactataaaggagaatatcattaaggtggcgatctctaacccgcctcagaggaaagtccccgaaaaacctgagactcggaaagctccaggtggaccaatgttgctgccacagacatacggggctcgcggaaaaggccgaactcagttgagccttctgcccagggcactgcaacgaccctccgcggctgcaccccaggctgagaacgggccagcggcagctcctgccgtggctgccccagcggcaactgaggccccaaagatgagtaacgctgacttcgctaagctttttctccgaaagtag

SEQ ID NO: 181729 - DNA, 390 bp, Artificial Sequence
  derived and/or modified sequence
atggcaactgccgcagaaactagcgcctccgagccggaggcggagtctaaggccggaccaaaagcagatggggaggaagatgaggtaaaggcagcacgcaccaggcggaaagtgctctcacgagccgtagccgcagcgacctacaagaccatggggccagcttgggaccaacaggaggagggtgtctccgagtcagacggggatgagtatgccatggcttcctctgcagagagctccccaggtgaatacgagtgggagtatgacgaggaagaagaaaagaatcaactcgaaatcgaaagattggaagagcaggtcggccctggtgttggaagcgggcatctgcccgtctttcaggtgctggggagcccttgccctgggccacctccatag

SEQ ID NO: 181730 - DNA, 2892 bp, Artificial Sequence
  derived and/or modified sequence
atggcaaccgcagccgaaaccagtgcaagtgaaccagaagcagagagtaaagccggtccaaaggctgatggagaggaggatgaggtcaaggccgctcgtacccggagaaaggtgctgtctcgggctgtggcggcagccacttataagaccatggggccagcctgggaccagcaggaagaaggggtatctgaaagtgacggtgacgagtacgctatggcctctagcgcagagtcttctcccggtgaatacgaatgggagtacgacgaagaagaagaaaagaaccagttggagatcgaacgtctcgaagagcaactgagcataaatgtgtacgactacaactgccatgtcgacctgatccggttactacgtctggaaggggagttgactaaagttcgcatggcacggcaaaaaatgtccgaaatatttcctctcactgaagagttgtggctcgaatggctgcatgacgaaatctctatggcccaggacggactggatcgggagcacgtgtatgatctgtttgagaaagcggtgaaggactacatatgtccgaacatctggcttgaatatggccagtattcggtggggggtataggccagaaaggcggtctcgagaaggtacgcagtgtattcgagcgagcgttgagctccgtaggcttgcacatgactaaaggattagcactatgggaagcatatcgagagttcgagagtgcgattgtcgaggcggctaggcttgagaaggttcattctctttttcgtcgccagctcgcaatcccgctgtacgacatggaggccacgtttgccgagtacgaggaatggtccgaagatcccatccccgagagtgtgatccagaactacaataaagctctgcaacagttagagaaatataaaccgtacgaggaggccctgctgcaagcagaagcccctaggctcgcggagtatcaggcctacattgatttcgagatgaagatcggcgatcctgcacggattcagctgatattcgagcgagcgcttgttgagaattgccttgtacccgacctttggatccgttactcgcagtacttagacaggcagctgaaagtgaaggatttggtcctgtctgtacataacagagcaattcgaaactgcccgtggacagtcgcgctgtggtcaaggtaccttctggccatggaaagacacggggtagatcaccaggttattagcgttacttttgagaaagccctgaacgcaggcttcatacaggcaactgattacgtggaaatttggcaagcttacctggattacctcagaagacgagtcgactttaagcaagattcgtcaaaggagctggaagagctgcgtgccgcattcacgcgtgccctcgagtacctgaaacaagaggtagaagaacgtttcaacgaaagtggcgatccatcctgcgtgatcatgcagaattgggcgaggattgaggccaggctgtgcaacaacatgcagaaggcaagagaactgtgggattctattatgacaaggggcaacgctaaatacgccaatatgtggctggagtactacaaccttgagcgcgctcacggcgatactcagcattgtagaaaggcattacatagagccgtccagtgcacctcagattacccagagcatgtatgcgaggtcctccttacaatggagcgcacggagggttccctggaggactgggacattgcggtgcagaaaaccgaaacgagacttgccagggtcaacgaacagagaatgaaagcagccgagaaagaagctgcactggtccagcaggaggaggaaaaggctgaacagcgtaaacgtgccagagcagagaaaaaagcactcaagaaaaagaagaaaatccggggacctgagaaaagaggtgcagacgaggacgatgaaaaggagtggggcgatgacgaagaggaacagccgagcaaaagacggagagtcgagaactccattccagccgctggcgagactcaaaacgtcgaggttgcagcaggcccagctggaaagtgtgccgcagtggatgtcgaacccccatctaagcaaaaagaaaaggccgcttccctgaaaagggacatgcctaaggttctgcatgactccagtaaggactccattactgtctttgtgagtaaccttccctatagcatgcaagaacccgatactaaactacgccctttattcgaggcatgcggtgaggttgtccagatcagacccattttcagcaacaggggggacttccgtggatactgttacgtagaatttaaagaagagaagtcagcactgcaggccctggaaatggaccgaaaatcggtggaggggaggccgatgttcgtgtctccctgtgtggataagtcaaaaaatcctgattttaaggtcttccgctactccacatcactggagaaacacaagctcttcatcagcgggctgccattttcatgcaccaaagaggagctggaagaaatttgtaaggctcatggaactgtaaaggatctcaggctcgttaccaatagggctgggaagcccaaaggccttgcatacgtcgagtacgaaaatgagagtcaagcttcccaggctgtgatgaaaatggacggaatgactattaaggagaatatcatcaaggtggcaatctccaaccccccacagcgcaaagtgcctgagaagcccgaaacacggaaagccccaggaggccctatgctcttaccccagacatatggcgcacgtggaaaaggtcggacccagctgtcactcctcccgcgagccctgcagcgacccagcgcagcagccccacaggctgagaacggccctgctgccgctcctgccgtggcagcgccagctgccaccgaggctcctaagatgagtaatgctgactttgctaagctgtttctgcgcaagtag

SEQ ID NO: 181731 - DNA, 4004 bp, Artificial Sequence
  derived and/or modified sequence
agttgtgacggaacgcatgccattataatgagtttttatatctggtgggagcttttacagggtataaaataatgtgaatttagtgtatgtggagattttcctgttatctaagttcccagtttctctttcaatggcaagaaaacgggtttttgataaggcgcgcgccgcgggcagcttctgcctcagcgggtcttcggcggccgcgggaagacccgagagtcattagaagcgcaagatggcgactgcggccgaaacctcggcttcagaacccgaggctgagtccaaggctgggcccaaggctgacggagaggaggatgaggttaaggcggctaggacaaggaggaaggtgttatcgcgggctgtggccgctgcgacatacaagaccatggggccagcgtgggatcagcaggaggaaggcgtgagcgagagcgatggggatgagtacgccatggcttcctccgcggagagctcccccggggagtacgagtgggaatatgacgaagaggaggagaaaaaccagctggagattgagagactggaggagcagttgtctatcaacgtctatgactacaactgccatgtggacttgatcagactgctcaggctggaaggggagcttaccaaggtgaggatggcccgccagaagatgagtgaaatctttcccttgactgaagagctctggctggagtggctgcatgacgagatcagcatggcccaggatggcctggacagagagcacgtgtatgacctctttgagaaagccgtgaaggattacatttgtcctaacatttggctagagtatggccagtactcagttggtgggattggtcagaaaggtggccttgagaaagttcgctccgtgtttgaaagggctctctcgtctgttggtttacatatgaccaaaggactcgccctctgggaggcttaccgagagtttgaaagtgcgattgtggaagctgctcggcttgagaaagtccacagtcttttccggcgacagttggcgatcccactctatgatatggaggccacatttgcagagtatgaagaatggtcagaagacccaataccagagtcagtaattcagaactataacaaagcactacagcagctggagaaatataaaccctatgaagaagcactgttgcaggcagaggcaccaaggctggcagaatatcaagcatatatcgattttgagatgaaaattggcgatcctgctcgcattcagttgatctttgagcgcgccctggtcgagaactgccttgtcccagacttatggatccgttacagtcagtacctagatcgacaactgaaagtaaaggatttggttttatctgtacataaccgcgctattagaaactgcccctggacagttgccttatggagtcggtacctcttggccatggagagacatggagttgatcatcaagtaatttctgtaaccttcgagaaagctttgaatgccggcttcatccaggccactgattatgtggagatttggcaggcataccttgattacctgaggagaagggttgatttcaaacaagactccagtaaagagctggaggagttgagggccgcctttactcgtgccttggagtatctgaagcaggaggtggaagagcgtttcaatgagagtggtgatccaagctgcgtgattatgcagaactgggctaggattgaggctcgactgtgcaataacatgcagaaagctcgggaactctgggatagcatcatgaccagaggaaatgccaagtacgccaacatgtggctagagtattacaacctggaaagagctcatggtgacacccagcactgccggaaggctctgcaccgggccgtccagtgcaccagtgactacccagagcacgtctgcgaagtgttactcaccatggagaggacagaaggttctttagaagattgggatatagctgttcagaaaactgaaacccgattagctcgtgtcaatgagcagagaatgaaggctgcagagaaggaagcagcccttgtgcagcaagaagaagaaaaggctgaacaacggaaaagagctcgggctgagaagaaagcgttaaaaaagaagaaaaagatcagaggcccagagaagcgcggagcagatgaggatgatgagaaagagtggggcgatgatgaagaagagcagccttccaaacgcagaagggtcgagaacagcatccctgcagctggagaaacacaaaatgtagaagtagcagcagggcccgctgggaaatgtgctgccgtagatgtggagcccccttcgaagcagaaggagaaggcagcctccctgaagagggacatgcccaaggtgctgcacgacagcagcaaggacagcatcaccgtctttgtcagcaacctgccctacagcatgcaggagccggacacgaagctcaggccactcttcgaggcctgtggggaggtggtccagatccgacccatcttcagcaaccgtggggatttccgaggttactgctacgtggagtttaaagaagagaaatcagcccttcaggcactggagatggaccggaaaagtgtagaagggaggccaatgtttgtttccccctgtgtggataagagcaaaaaccccgattttaaggtgttcaggtacagcacttccctagagaaacacaagctgttcatctcaggcctgcctttctcctgtactaaagaggaactagaagaaatctgtaaggctcatggcaccgtgaaggacctcaggctggtcaccaaccgggctggcaaaccaaagggcctggcctacgtggagtatgaaaatgaatcccaggcgtcgcaggctgtgatgaagatggacggcatgactatcaaagagaacatcatcaaagtggcaatcagcaaccctcctcagaggaaagttccagagaagccggagaccaggaaggcaccaggtggccccatgcttttgccgcagacatacggagcgagggggaagggaaggacgcagctgtctctactgcctcgtgccctgcagcgcccaagtgctgcagctcctcaggctgagaacggccctgccgcggctcctgcagttgccgccccagcagccaccgaggcacccaagatgtccaatgccgattttgccaagctgtttctgagaaagtgaacgggacgctgggagacaggaaatgccttacttcactctggcccggcggacctcccaccacccagcagtgcactggggatggacaggcctggtgtgctgcgtgctcgcaaccacagatggctcctcggctttagacagaaaggggaaggggttctaagtcaagagcctttcagtgctccctcatattgagggcagtggcagaaaagtgaccactctgcaggctgggcccaggatgtggtgtcctgagatagttttgtatcttaaagactgaggcacagaagcgaaacgagaacacactgtttttgagacacagttgtccaaatgtttctggccagctccggcccctttttgtatgacacttctcttccaccctgcacagcacatgtgcccgtcattcttttaattttaaaagatgaaatggcagatgctagtaattcacagaatggcctcttgtgggggtgggtctgagggaagtcagctataaaacatttgctggagttttgttcaatggggctgtgcatttttatattatgtgtttgtaaatgacatgtcagccattgtttcatgtttcctaaaagcagaatatttgcaacatttgttttgtataggaattatttgtgccacctgctgtggactgttttctttgcctagtgactagtgacctgtgttgtctaaacatgagtttcagccctttggttttgtttaataccatgtcaaatgcaaacttcaattctccccatttagctttattaaactgacgttctcttcaaaacttcttgctgaatggtactcagatgtgcattcacatacagatgtgttttgaagtgggtgtaccttgctttacctaatagatgtgtaaatagaacttttgtaagtc

SEQ ID NO: 181732 - DNA, 2252 bp, Artificial Sequence
  derived and/or modified sequence
attagaagcgcaagatggcgactgcggccgaaacctcggcttcagaacccgaggctgagtccaaggctgggcccaaggctgacggagaggaggatgaggttaaggcggctaggacaaggaggaaggtgttatcgcgggctgtggccgctgcgacatacaagaccatggagctcccccggggagtacgagtgggaatatgacgaagaggaggagaaaaaccagctggagattgagagactggaggagcagttgtctatcaacgtctatgactacaactgccatgtggacttgatcagactgctcaggctggaaggggagcttaccaaggtgaggatggcccgccagaagatgagtgaaatctttcccttgactgaagagctctggctggagtggctgcatgacgagatcagcatggcccaggatggcctggacagagagcacgtgtatgacctctttgagaaagccgtgaaggattacatttgtcctaacatttggctagagtatggccagtactcagttggtgggattggtcagaaaggtggccttgagaaagttcgctccgtgtttgaaagggctctctcgtctgttggtttacatatgaccaaaggactcgccctctgggaggcttaccgagagtttgaaagtgcgattgtggaagctgctcggcttgagaaagtccacagtcttttccggcgacagttggcgatcccactctatgatatggaggccacatttgcagagtatgaagaatggtcagaagacccaataccagagtcagtaattcagaactataacaaagcactacagcagctggagaaatataaaccctatgaagaagcactgttgcaggcagaggcaccaaggctggcagaatatcaagcatatatcgattttgagatgaaaattggcgatcctgctcgcattcagttgatctttgagcgcgccctggtcgagaactgccttgtcccagacttatggatccgttacagtcagtacctagatcgacaactgaaagtaaaggatttggttttatctgtacataaccgcgctattagaaactgcccctggacagttgccttatggagtcggtacctcttggccatggagagacatggagttgatcatcaagtaatttctgtaaccttcgagaaagctttgaatgccggcttcatccaggccactgattatgtggagatttggcaggcataccttgattacctgaggagaagggttgatttcaaacaagactccagtaaagagctggaggagttgagggccgcctttactcgtgccttggagtatctgaagcaggaggtggaagagcgtttcaatgagagtggtgatccaagctgcgtgattatgcagaactgggctaggattgaggctcgactgtgcaataacatgcagaaagctcgggaactctgggatagcatcatgaccagaggaaatgccaagtacgccaacatgtggctagagtattacaacctggaaagagctcatggtgacacccagcactgccggaaggctctgcaccgggccgtccagtgcaccagtgactacccagagcacgtctgcgaagtgttactcaccatggagaggacagaaggttctttagaagattgggatatagctgttcagaaaactgaaacccgattagctcgtgtcaatgagcagagaatgaaggctgcagagaaggaagcagcccttgtgcagcaagaagaagaaaaggctgaacaacggaaaagagctcgggctgagaagaaagcgttaaaaaagaagaaaaagatcagaggcccagagaagcgcggagcagatgaggatgatgagaaagagtggggcgatgatgaagaagccttccaaacgcagaagggtcgagaacagcatccctgcagctggagaaacacaaaatgtagaagtagcagcagggcccgctgggaaatgtgctgccgtagatgtggagcccccttcgaagcagaaggagaaggcagcctccctgaagagggacatgcccaaggtgctgcacgacagcagcaaggacagcatcaccgtctttgtcagcaacctgccctacagcatgcaggagccggacacgaagctcaggccactcttcgaggcctgtggggaggtggtccagatccgacccatcttcagcaaccgtggggatttccgaggttactgctacgtggagtttaaagaagagaaatcagcccttcaggcactggagatggaccggaaaagtgtagaagggaggc

SEQ ID NO: 181733 - DNA, 2834 bp, Artificial Sequence
  derived and/or modified sequence
gcaagatggcgactgcggccgaaacctcggcttcagaacccgaggctgagtccaaggctgggcccaaggctgacggagaggaggatgaggttaaggcggctaggacaaggaggaaggtgttatcgcgggctgtggccgctgcgacatacaagaccatggggccagcgtgggatcagcaggaggaaggcgtgagcgagagcgatggggatgagtacgccatggcttcctccgcggagagctcccccggggagtacgagtgggaatatgacgaagaggaggagaaaaaccagctggagattgagagactggaggagcagttgtctatcaacgtctatgactacaactgccatgtggacttgatcagactgctcaggctggaaggggagcttaccaaggtgaggatggcccgccagaagatgagtgaaatctttcccttgactgaagagctctggctggagtggctgcatgacgagatcagcatggcccaggatggcctggacagagagcacgtgtatgacctctttgagaaagccgtgaaggattacatttgtcctaacatttggctagagtatggccagtactcagttggtgggattggtcagaaaggtggccttgagaaagttcgctccgtgtttgaaagggctctctcgtctgttggtttacatatgaccaaaggactcgccctctgggaggcttaccgagagtttgaaagtgcgattgtggaagctgctcggcttgagaaagtccacagtcttttccggcgacagttggcgatcccactctatgatatggaggccacatttgcagagtatgaagaatggtcagaagacccaataccagagtcagtaattcagaactataacaaagcactacagcagctggagaaatataaaccctatgaagaagcactgttgcaggcagaggcaccaaggctggcagaatatcaagcatatatcgattttgagatgaaaattggcgatcctgctcgcattcagttgatctttgagcgcgccctggtcgagaactgccttgtcccagacttatggatccgttacagtcagtacctagatcgacaactgaaagtaaaggatttggttttatctgtacataaccgcgctattagaaactgcccctggacagttgccttatggagtcggtacctcttggccatggagagacatggagttgatcatcaagtaatttctgactccagtaaagagctggaggagttgagggccgcctttactcgtgccttggagtatctgaagcaggaggtggaagagcgtttcaatgagagtggtgatccaagctgcgtgattatgcagaactgggctaggattgaggctcgactgtgcaataacatgcagaaagctcgggaactctgggatagcatcatgaccagaggaaatgccaagtacgccaacatgtggctagagtattacaacctggaaagagctcatggtgacacccagcactgccggaaggctctgcaccgggccgtccagtgcaccagtgactacccagagcacgtctgcgaagtgttactcaccatggagaggacagaaggttctttagaagattgggatatagctgttcagaaaactgaaacccgattagctcgtgtcaatgagcagagaatgaaggctgcagagaaggaagcagcccttgtgcagcaagaagaagaaaaggctgaacaacggaaaagagctcgggctgagaagaaagcgttaaaaaagaagaaaaagatcagaggcccagagaagcgcggagcagatgaggatgatgagaaagagtggggcgatgatgaagaagagcagccttccaaacgcagaagggtcgagaacagcatccctgcagctggagaaacacaaaatgtagaagtagcagcagggcccgctgggaaatgtgctgccgtagatgtggagcccccttcgaagcagaaggagaaggcagcctccctgaagagggacatgcccaaggtgctgcacgacagcagcaaggacagcatcaccgtctttgtcagcaacctgccctacagcatgcaggagccggacacgaagctcaggccactcttcgaggcctgtggggaggtggtccagatccgacccatcttcagcaaccgtggggatttccgaggttactgctacgtggagtttaaagaagagaaatcagcccttcaggcactggagatggaccggaaaagtgtagaagggaggccaatgtttgtttccccctgtgtggataagagcaaaaaccccgattttaaggtgttcaggtacagcacttccctagagaaacacaagctgttcatctcaggcctgcctttctcctgtactaaagaggaactagaagaaatctgtaaggctcatggcaccgtgaaggacctcaggctggtcaccaaccgggctggcaaaccaaagggcctggcctacgtggagtatgaaaatgaatcccaggcgtcgcaggctgtgatgaagatggacggcatgactatcaaagagaacatcatcaaagtggcaatcagcaaccctcctcagaggaaagttccagagaagccggagaccaggaaggcaccaggtggccccatgcttttgccgcagacatacggagcgagggggaagggaaggacgcagctgtctctactgcctcgtgccctgcagcgcccaagtgctgcagctcctcaggctgagaacggccctgccgcggctcctgcagttgccgccccagcagccaccgaggcacccaagatgtccaatgccgattttgccaagctgtttctgagaaagtgaacgggacgctgggagacaggaaatgccttacttcactctggcccg

SEQ ID NO: 181734 - DNA, 1758 bp, Artificial Sequence
  derived and/or modified sequence
cgagaactgccttgtcccagacttatggatccgttacagtcagtacctagatcgacaactgaaagtaaaggatttggttttatctgtacataaccgcgctattagaaactgcccctggacagttgccttatggagtcggtacctcttggccatggagagacatggagttgatcatcaagtaatttctgactccagtaaagagctggaggagttgagggccgcctttactcgtgccttggagtatctgaagcaggaggtggaagagcgtttcaatgagagtggtgatccaagctgcgtgattatgcagaactgggctaggattgaggctcgactgtgcaataacatgcagaaagctcgggaactctgggatagcatcatgaccagaggaaatgccaagtacgccaacatgtggctagagtattacaacctggaaagagctcatggtgacacccagcactgccggaaggctctgcaccgggccgtccagtgcaccagtgactacccagagcacgtctgcgaagtgttactcaccatggagaggacagaaggttctttagaagattgggatatagctgttcagaaaactgaaacccgattagctcgtgtcaatgagcagagaatgaaggctgcagagaaggaagcagcccttgtgcagcaagaagaagaaaaggctgaacaacggaaaagagctcgggctgagaagaaagcgttaaaaaagaagaaaaagatcagaggcccagagaagcgcggagcagatgaggatgatgagaaagagtggggcgatgatgaagaagagcagccttccaaacgcagaagggtcgagaacagcatccctgcagctggagaaacacaaaatgtagaagtagcagcagggcccgctgggaaatgtgctgccgtagatgtggagcccccttcgaagcagaaggagaaggcagcctccctgaagagggacatgcccaaggtgctgcacgacagcagcaaggacagcatgcaggagccggacacgaagctcaggccactcttcgaggcctgtggggaggtggtccagatccgacccatcttcagcaaccgtggggatttccgaggttactgctacgtggagtttaaagaagagaaatcagcccttcaggcactggagatggaccggaaaagtgtagaagggaggccaatgtttgtttccccctgtgtggataagagcaaaaaccccgattttaaggtgttcaggtacagcacttccctagagaaacacaagctgttcatctcaggcctgcctttctcctgtactaaagaggaactagaagaaatctgtaaggctcatggcaccgtgaaggacctcaggctggtcaccaaccgggctggcaaaccaaagggcctggcctacgtggagtatgaaaatgaatcccaggcgtcgcaggctgtgatgaagatggacggcatgactatcaaagagaacatcatcaaagtggcaatcagcaaccctcctcagaggaaagttccagagaagccggagaccaggaaggcaccaggtggccccatgcttttgccgcagacatacggagcgagggggaagggaaggacgcagctgtctctactgcctcgtgccctgcagcgcccaagtgctgcagctcctcaggctgagaacggccctgccgcggctcctgcagttgccgccccagcagccaccgaggcacccaagatgtccaatgccgattttgccaagctgtttctgagaaagtgaacgggacgctgggagacagg

SEQ ID NO: 181735 - DNA, 1184 bp, Artificial Sequence
  derived and/or modified sequence
cttctgtccgaagttgtgacggaacgcatgccattataatgagtttttatatctggtgggagcttttacagggtataaaataatgtgaatttagtgtatgtggagattttcctgttatctaagttcccagtttctctttcaatggcaagaaaacgggtttttgataaggcgcgcgccgcgggcagcttctgcctcagcgggtcttcggcggccgcgggaagacccgagagtcattagaagcgcaagatggcgactgcggccgaaacctcggcttcagaacccgaggctgagtccaaggctgggcccaaggctgacggagaggaggatgaggttaaggcggctaggacaaggaggaaggtgttatcgcgggctgtggccgctgcgacatacaagaccatggggccagcgtgggatcagcaggaggaaggcgtgagcgagagcgatggggatgagtacgccatggcttcctccgcggagagctcccccggggagtacgagtgggaatatgacgaagaggaggagaaaaaccagctggagattgagagactggaggagcaggtgggcccgggggtgggcagcgggcatcttccagtctttcaggtcctcgggtccccatgtcctggcccgcctccctagtcctcggcggcgataaagccgccaaggctgcaaacccgcttttcgtgacagtagctcctgtcggatttgagtgcttactgcctgcccattgccttgcaaacgttatctcattgaatcctcgccacgaccctgtgaaggaagccctgttatctatccccattttactggaggaaactgaggctcgtggaggaaagtttcttgctcaagataacacttcctgcaagtcaggccttgtactttgatcccattccagaactcccactcttaaccacacgtccaacagtagaaataaactcattcgcaagagagtgttattttgttatgtaggaatgacggcgatgatgaaacttgtggtaagaaaaatattgaccgcgatggtgataatagaaatggaaaggtttctggttctggaggttaaggcctcagttctagctgttcaactcttgtatgtgcttgtaagaatttcttaatttctctcaccctctcgacttccttatctgcagattgggagcaacaatttctgcataatataattgttgtaacagtaa

SEQ ID NO: 181736 - protein, 923 aa, Artificial Sequence
  derived and/or modified sequence
LHKLSSLVDVKSEVPVGLEPISPLDLRTDLRMMMPVVDPVVREKQLQQELLLIQQQQQIQKQLLIAEFQKQHENLTRQHQAQLQEHIKELLAIKQQQELLEKEQKLEQQRQEQEVERHRREQQLPPLRGKDRGRERAVASTEVKQKLQEFLLSKSATKDTPTNGKNHSVSRHPKLWYTAAHHTSLDQSSPPLSGTSPSYKYTLPGAQDAKDDFPLRKTASEPNLKVRSRLKQKVAERRSSPLLRRKDGNVVTSFKKRMFEVTESSVSSSSPGSGPSSPNNGPTGSVTENETSVLPPTPHAEQMVSQQRILIHEDSMNLLSLYTSPSLPNITLGLPAVPSQLNASNSLKEKQKCETQTLRQGVPLPGQYGGSIPASSSHPHVTLEGKPPNSSHQALLQHLLLKEQMRQQKLLVAGGVPLHPQSPLATKERISPGIRGTHKLPRHRPLNRTQSAPLPQSTLAQLVIQQQHQQFLEKQKQYQQQIHMNKPFLEPTHTRALSVRQAPLAAVGMDGLEKHRLVSRTHSSPAASVLPHPAMDRPLQPGSATGIAYDPLMLKHQCVCGNSTTHPEHAGRIQSIWSRLQETGLLNKCERIQGRKASLEEIQLVHSEHHSLLYGTNPLDGQKLDPRILLGDDSQKFFSSLPCGGLGVDSDTIWNELHSSGAARMAVGCVIELASKVASGELKNGFAVVRPPGHHAEESTAMGFCFFNSVAITAKYLRDQLNISKILIVDLDVHHGNGTQQAFYADPSILYISLHRYDEGNFFPGSGAPNEVGTGLGEGYNINIAWTGGLDPPMGDVEYLEAFRTIVKPVAKEFDPDMVLVSAGFDALEGHTPPLGGYKVTAKCFGHLTKQLMTLADGRVVLALEGGHDLTAICDASEACVNALLGNELEPLAEDILHQSPNMNAVISLQKIIEIQSMSLKFS

SEQ ID NO: 181737 - protein, 590 aa, Artificial Sequence
  derived and/or modified sequence
MHSMISSVDVKSEVPVGLEPISPLDLRTDLRMMMPVVDPVVREKQLQQELLLIQQQQQIQKQLLIAEFQKQHENLTRQHQAQLQEHIKELLAIKQQQELLEKEQKLEQQRQEQEVERHRREQQLPPLRGKDRGRERAVASTEVKQKLQEFLLSKSATKDTPTNGKNHSVSRHPKLWYTAAHHTSLDQSSPPLSGTSPSYKYTLPGAQDAKDDFPLRKTASEPNLKVRSRLKQKVAERRSSPLLRRKDGNVVTSFKKRMFEVTESSVSSSSPGSGPSSPNNGPTGSVTENETSVLPPTPHAEQMVSQQRILIHEDSMNLLSLYTSPSLPNITLGLPAVPSQLNASNSLKEKQKCETQTLRQGVPLPGQYGGSIPASSSHPHVTLEGKPPNSSHQALLQHLLLKEQMRQQKLLVAGGVPLHPQSPLATKERISPGIRGTHKLPRHRPLNRTQSAPLPQSTLAQLVIQQQHQQFLEKQKQYQQQIHMNKLLSKSIEQLKQPGSHLEEAEEELQGDQAMQEDRAPSSGNSTRSDSSACVDDTLGQVGAVKVKEEPVDSDEDAQIQEMESGEQAAFMQQVIGKDLAPGFVIKVII

SEQ ID NO: 181738 - protein, 23 aa, Artificial Sequence
  derived and/or modified sequence
MHSMISSVDVKSEVPVGLEPISP

SEQ ID NO: 181739 - DNA, 1773 bp, Artificial Sequence
  derived and/or modified sequence
atgcattccatgatctcgtccgtggatgtaaaatctgaagttcctgtcggcttggaaccaatctctcccctcgacctgaggacagacctgcggatgatgatgcccgtggtagatccagtggtgagggagaagcaattgcagcaagaattattactcatccagcagcaacaacaaatccaaaagcagttactgatcgctgaattccagaagcagcatgagaaccttacaagacagcaccaggcccaacttcaggagcatattaaagagctgcttgccattaagcagcagcaggaactgttggagaaggagcaaaagctcgagcagcaacgccaggagcaggaagtggagaggcataggagggagcagcagcttccacctctgcgaggcaaagaccgcgggcgcgagagagccgtggccagtaccgaggtaaaacagaaactgcaagagttcctcctaagcaaatctgctacaaaggacacgccaacaaatggcaagaatcattcagtgtcccggcaccccaaattatggtacactgctgcgcaccatacaagtcttgatcagagcagcccaccactgtctggcactagtccttcttataagtatacgcttcccggcgcacaggatgctaaggatgattttcccctgagaaaaaccgcgtcagagcctaatctgaaggtgaggtcacgattgaaacaaaaagtcgcggagcggcgctctagcccactgttacgccggaaggacgggaatgtggtgacttcttttaagaaaaggatgttcgaggtgaccgaatcgtccgtgtcatctagctcacctggctcaggaccttcgagccctaataacggtcccaccggctccgtgactgaaaacgaaacctcggtcctacctcccaccccccatgcagagcaaatggtcagccagcagagaatattgatccacgaggactccatgaatctcctgagtttgtacacatccccttccttaccaaacatcacactggggctgcccgcggtgccttcccaactcaacgcatccaattccctgaaggagaaacaaaagtgcgagacgcagacactgcgccagggggtgccactacccgggcagtatggagggagcataccagcctccagctcccaccctcatgtaactctggaagggaaacctcccaacagcagtcaccaagcactgctacagcacctgctgctaaaagagcagatgcgtcaacagaaactgctggtggccggaggcgtaccattgcatcctcagtccccacttgctacaaaggaacgcatttctcccggcattagaggcacacacaagctgcctcggcaccggcccctgaacagaacgcaatctgcacccttgccccaatcgacactagcccagctcgtgatccagcagcaacaccaacaattcttagagaaacagaaacaataccagcaacaaatccatatgaataagctactatcaaagtcaatcgaacagctgaaacagccaggcagtcacttggaagaagcagaagaggagctgcaaggcgatcaggcaatgcaagaggatcgtgctcctagtagcggcaatagcacccgatccgatagcagcgcatgcgtagatgatacactgggacaggtcggagctgtgaaagttaaggaagagccagtagactctgatgaggacgcacagatccaagagatggagtccggagaacaggctgcatttatgcagcaggtgattggcaaagacctggcacctggtttcgtgatcaaagttattatctag

SEQ ID NO: 181740 - DNA, 4239 bp, Artificial Sequence
  derived and/or modified sequence
ggggaagagaggcacagacacagataggagaagggcaccggctggagccacttgcaggactgagggtttttgcaacaaaaccctagcagcctgaagaactctaagccagatggggtggctggacgagagcagctcttggctcagcaaagaatgcacagtatgatcagctcagtggatgtgaagtcagaagttcctgtgggcctggagcccatctcacctttagacctaaggacagacctcaggatgatgatgcccgtggtggaccctgttgtccgtgagaagcaattgcagcaggaattacttcttatccagcagcagcaacaaatccagaagcagcttctgatagcagagtttcagaaacagcatgagaacttgacacggcagcaccaggctcagcttcaggagcatatcaaggaacttctagccataaaacagcaacaagaactcctagaaaaggagcagaaactggagcagcagaggcaagaacaggaagtagagaggcatcgcagagaacagcagcttcctcctctcagaggcaaagatagaggacgagaaagggcagtggcaagtacagaagtaaagcagaagcttcaagagttcctactgagtaaatcagcaacgaaagacactccaactaatggaaaaaatcattccgtgagccgccatcccaagctctggtacacggctgcccaccacacatcattggatcaaagctctccaccccttagtggaacatctccatcctacaagtacacattaccaggagcacaagatgcaaaggatgatttcccccttcgaaaaactgcctctgagcccaacttgaaggtgcggtccaggttaaaacagaaagtggcagagaggagaagcagccccttactcaggcggaaggatggaaatgttgtcacttcattcaagaagcgaatgtttgaggtgacagaatcctcagtcagtagcagttctccaggctctggtcccagttcaccaaacaatgggccaactggaagtgttactgaaaatgagacttcggttttgccccctacccctcatgccgagcaaatggtttcacagcaacgcattctaattcatgaagattccatgaacctgctaagtctttatacctctccttctttgcccaacattaccttggggcttcccgcagtgccatcccagctcaatgcttcgaattcactcaaagaaaagcagaagtgtgagacgcagacgcttaggcaaggtgttcctctgcctgggcagtatggaggcagcatcccggcatcttccagccaccctcatgttactttagagggaaagccacccaacagcagccaccaggctctcctgcagcatttattattgaaagaacaaatgcgacagcaaaagcttcttgtagctggtggagttcccttacatcctcagtctcccttggcaacaaaagagagaatttcacctggcattagaggtacccacaaattgccccgtcacagacccctgaaccgaacccagtctgcacctttgcctcagagcacgttggctcagctggtcattcaacagcaacaccagcaattcttggagaagcagaagcaataccagcagcagatccacatgaacaaactgctttcgaaatctattgaacaactgaagcaaccaggcagtcaccttgaggaagcagaggaagagcttcagggggaccaggcgatgcaggaagacagagcgccctctagtggcaacagcactaggagcgacagcagtgcttgtgtggatgacacactgggacaagttggggctgtgaaggtcaaggaggaaccagtggacagtgatgaagatgctcagatccaggaaatggaatctggggagcaggctgcttttatgcaacaggtaataggcaaagatttagctccaggatttgtaattaaagtcattatctgaacatgaaatgcattgcaggtttggtaaatggatatgatttcctatcagtttatatttctctatgatttgagttcagtgtttaaggattctacctaatgcagatatatgtatatatctatatagaggtctttctatatactgatctctatatagatatcaatgtttcattgaaaatccactggtaaggaaatacctgttatactaaaattatgatacataatatctgagcagttaataggctttaaatttatcccaaagcctgctacaccaattacttctaaagaaaacaaattcactgttattttgagtttatgtgttgagatcagtgactgctggatagtctcccagtctgatcaatgaagcattcgattagtttttgattttttgcaacatctagaatttaattttcacatcactgtacataatgtatcatactatagtcttgaacactgttaaaggtagtctgccccttccttcctctctctttttttagttaagtagaaatgttctggtcaccatgccagtagtcctaggttattgtgtaggttgcaattgaacatattaggaatacaggtggttttaaatatatagatgcaaattgcagcactactttaaatattagattatgtctcacatagcactgctcattttacttttattttgtgtaatttgatgacactgtctatcaaaaaagagcaaatgaagcagatgcaaatgttagtgagaagtaatgtgcagcattatggtccaatcagatacaatattgtgtctacaattgcaaaaaacacagtaacaggatgaatattatctgatatcaagtcaaaatcagtttgaaaagaaggtgtatcatattttatattgtcactagaatctcttaagtataattccataatgacatgggcatataccgtaacattctggcaaataacaattagaaaagataggtttaacaaaaaaatttacttgtatataatgcaccttcaggaggactatgtcctttgatgctataaaatacaaacaactttgaaggcaacagaagacactgtttattcaagtcagttctttgtcaggttcctgctgttctcctacagaaaagtgattctgtgagggtgaacaggaaatgccttgtggaaacaggaagtccaagtgattcatgtactgaggaatgtaggaaaaaaaatctgaggatagtgctttactctttctgtttttaaagggcactctatgaattgatttattgtctaagaaaataacaccacaagtagggaaattgttacggaagcttttcactggaacatttccttcatattcccttttgatatgtttaccttgttttataggtttacttttgttaagctagttaaaggttcgttgtattaagacccctttaatatggataatccaaattgacctagaatctttgtgaggttttttctattaaaatatttatatttctaaatccgaggtatttcaaggtgtagtatcctatttcaaaggagatatagcagttttgccaaatgtagacattgttcaactgtatgttattggcacgtgttgtttacattttgctgtgacatttaaaaatatttctttaaaaatgttactgctaaagatacattatccttttttaaaaagtctccattcaaattaaattaacataactagaagttagaaagtttaaaagttttccacataatgaaagtccttctgataatttgacaaatagctataataggaacactccctatcaccaacatattttggttagtatattccttcatattaaaatgactttttgtcagttgttttgcattaaaaatatggcatgcctaagataaaattgtatattttttccatctcataaatattcattttcttcaaagtcttttttcaatctcataaaaaagggatagtgcatcttttaaaatacattttatttggggaggaacatgtggctgagcagacttttgtataatattacttcaaagatatgtaatcacaaacaaaaaaaactattttttataatgtcatttgagagagtttcatcagtacagttggtggacgttaattgtttgaatttgatagtctttgaatttaatcaagaaactacctggaaccagtgaaaaggaaagctggacttaaataatcttagaattaattgataaatgtctcttttaaaatctactgtatttattataatttacacccttgaaggtgatctcttgttttgtgttgtaaatatattgtttgtatgtttcccttcttgccttctgttataagtctcttcctttctcaaataaagttttttttaaaaga

SEQ ID NO: 181741 - DNA, 2307 bp, Artificial Sequence
  derived and/or modified sequence
ctccacttaacttctgccttgtggaaggggtggggaagcctttatcaatgggtaggtgggagaaccaggggaagactgtcagctacgattttctctagcctcaagaagactgagaccgagccaaactcctggccaacgtgctttgtggattcacagtgtagcttgagaaaaatgtggatgtgaagtcagaagttcctgtgggcctggagcccatctcacctttagacctaaggacagacctcaggatgatgatgcccgtggtggaccctgttgtccgtgagaagcaattgcagcaggaattacttcttatccagcagcagcaacaaatccagaagcagcttctgatagcagagtttcagaaacagcatgagaacttgacacggcagcaccaggctcagcttcaggagcatatcaagttgcaacaggaacttctagccataaaacagcaacaagaactcctagaaaaggagcagaaactggagcagcagaggcaagaacaggaagtagagaggcatcgcagagaacagcagcttcctcctctcagaggcaaagatagaggacgagaaagggcagtggcaagtacagaagtaaagcagaagcttcaagagttcctactgagtaaatcagcaacgaaagacactccaactaatggaaaaaatcattccgtgagccgccatcccaagctctggtacacggctgcccaccacacatcattggatcaaagctctccaccccttagtggaacatctccatcctacaagtacacattaccaggagcacaagatgcaaaggatgatttcccccttcgaaaaactgcctctgagcccaacttgaaggtgcggtccaggttaaaacagaaagtggcagagaggagaagcagccccttactcaggcggaaggatggaaatgttgtcacttcattcaagaagcgaatgtttgaggtgacagaatcctcagtcagtagcagttctccaggctctggtcccagttcaccaaacaatgggccaactggaagtgttactgaaaatgagacttcggttttgccccctacccctcatgccgagcaaatggtttcacagcaacgcattctaattcatgaagattccatgaacctgctaagtctttatacctctccttctttgcccaacattaccttggggcttcccgcagtgccatcccagctcaatgcttcgaattcactcaaagaaaagcagaagtgtgagacgcagacgcttaggcaaggtgttcctctgcctgggcagtatggaggcagcatcccggcatcttccagccaccctcatgttactttagagggaaagccacccaacagcagccaccaggctctcctgcagcatttattattgaaagaacaaatgcgacagcaaaagcttcttgtagctggtggagttcccttacatcctcagtctcccttggcaacaaaagagagaatttcacctggcattagaggtacccacaaattgccccgtcacagacccctgaaccgaacccagtctgcacctttgcctcagagcacgttggctcagctggtcattcaacagcaacaccagcaattcttggagaagcagaagcaataccagcagcagatccacatgaacaaactgctttcgaaatctattgaacaactgaagcaaccaggcagtcaccttgaggaagcagaggaagagcttcagggggaccaggcgatgcaggaagacagagcgccctctagtggcaacagcactaggagcgacagcagtgcttgtgtggatgacacactgggacaagttggggctgtgaaggtcaaggaggaaccagtggacagtgatgaagatgctcagatccaggaaatggaatctggggagcaggctgcttttatgcaacaggtaataggcaaagatttagctccaggatttgtaattaaagtcattatctgaacatgaaatgcattgcaggtttggtaaatggatatgatttcctatcagtttatatttctctatgatttgagttcagtgtttaaggattctacctaatgcagatatatgtatatatctatatagaggtctttctatatactgatctctatatagatatcaatgtttcattgaaaatccactggtaaggaaatacctgttatactaaaattatgatacataatatctgagcagttaataggctttaaatttatcccaaagcctgctacaccaattacttctaaagaaaacaaattcactgttattttgagtttatgtgttgagatcagtgactgctggatagtctcccagtctgatcaatgaagcattcgattag

SEQ ID NO: 181742 - DNA, 1773 bp, Artificial Sequence
  derived and/or modified sequence
atgcacagcatgatcagctctgtggatgtgaagtctgaggtgcctgtgggcctggagcccatcagccccctggacctgaggacagacctgaggatgatgatgcctgtggtggaccctgtggtgcgggagaagcagctgcagcaggagctgctgctgatccagcagcagcagcagatccagaagcagctgctgattgctgagttccagaagcagcacgagaacctgacccggcagcaccaggcccagctgcaggagcacatcaaggagctgctggccatcaagcagcagcaggagctgctggagaaggagcagaagctggagcagcagaggcaggagcaggaggtggagcggcacagaagagagcagcagctgccccccctgcggggcaaggaccggggccgggagagagctgtggccagcacagaggtgaagcagaagctgcaggagttcctgctgagcaagagcgccaccaaggacacccccaccaacgggaagaaccacagcgtgagccgccaccccaagctgtggtacacagctgcccaccacaccagcctggaccagagcagcccccccctgagcggcaccagccccagctacaagtacaccctgcccggggcccaggatgccaaggatgacttccccctgaggaagacagccagcgagcccaacctgaaggtgcgcagccggctgaagcagaaggtggccgagaggaggagcagccccctgctgcggaggaaggatggaaatgtggtgaccagcttcaagaagaggatgtttgaggtgacagagagctctgtgagcagcagcagccctggcagcggccccagcagccccaacaacggccccactggatctgtgacagaaaatgagacctctgtgctgccccccacccctcatgctgagcagatggtgtcccagcagaggatcctgattcatgaagattccatgaacctgctgagcctgtacaccagccccagcctgcccaacatcaccctgggcctgcctgctgtgcccagccagctgaatgccagcaacagcctgaaggagaagcagaagtgtgagacccagaccctgcggcagggcgtgcccctgcccggccagtatggaggcagcatcccagccagcagcagccacccccacgtgaccctggagggcaagccacccaacagcagccaccaggccctgctgcagcacctgctgctgaaggagcagatgaggcagcagaagctgctggtggccggcggcgtgcccctgcacccccagagccccctggccaccaaggagcgcatcagccctggcatccggggcacccacaagctgcccaggcaccggcccctgaacagaacccagagcgcccccctgccccagagcaccctggcccagctggtgatccagcagcagcaccagcagttcctggagaagcagaagcagtaccagcagcagatccacatgaacaagctgctgagcaagagcattgagcagctgaagcagcccggcagccacctggaggaggccgaggaggagctgcagggcgaccaggccatgcaggaggaccgggcccccagcagcggcaacagcaccaggagtgacagcagcgcctgtgtggatgacaccctgggccaggtgggcgctgtgaaggtgaaggaggagcctgtggacagtgatgaagatgcccagatccaggagatggagagcggggagcaggccgccttcatgcagcaggtgattggcaaggacctggcccctggcttcgtcatcaaggtgatcatctag

SEQ ID NO: 181743 - DNA, 1773 bp, Artificial Sequence
  derived and/or modified sequence
atgcacagcatgatcagcagcgtggacgtgaagagcgaggtgcccgtggggctcgaacctatttccccacttgacctccgtaccgacctgcggatgatgatgcctgttgtggaccccgtggtgcgggaaaaacagctgcaacaggagctcctcctcattcagcagcagcagcagattcagaagcagctactaatagcagaattccagaaacagcatgagaacctaacacgccagcatcaggcacagctacaagagcacattaaagagttgctcgccataaaacaacagcaagaactgttggagaaggaacagaagctcgaacagcagcggcaagagcaagaggtcgagagacaccgccgtgagcaacagctgccacctctgcgcggtaaggatcgagggagagagagggcggtggcatccaccgaggttaagcagaagctgcaagaattcctcttgtctaaatcagccaccaaggatacccccactaatggaaaaaaccacagtgtgtcccgccatcccaagctctggtataccgcagcacaccatacttctctcgatcaaagcagcccacccctttccggaacttctccttcttataagtatactctacctggcgcacaagatgccaaggacgatttccctttgaggaagaccgcctcagaaccaaacctgaaggtgcggagccggttgaagcaaaaggtggccgaacggaggagttcccctctgctgcggaggaaggacggcaacgtcgtcacttcattcaagaaacgcatgtttgaggtgactgagagctctgtttcttccagtagccctggatcagggcctagcagccccaacaacgggcccacaggtagcgttacggaaaacgaaacgagcgtcttgcctccaacccctcacgccgagcaaatggtgtcccagcagagaattctcatccacgaagatagcatgaaccttttgagcctgtacacgtcacctagtctgcccaacatcacccttggacttccggccgtcccctcgcagctcaatgcttcaaactcactgaaggagaagcagaagtgtgagacccaaactttgcgacagggcgtcccacttccggggcagtacggtggaagtattcctgcttcgtcgtcacatccccacgtcaccctggaaggcaaaccaccaaacagttcccatcaagcactgctccagcacctgcttctcaaggagcagatgagacaacagaaactcctagtcgcgggtggagttcctctgcacccacagagccccctcgctacaaaagaaagaatatccccggggattaggggaacacataagctgcccaggcatagacctttaaatcgaacccagtccgccccccttcctcagagcactctcgcgcagttagtgatccagcagcaacatcagcaattcctggagaagcaaaagcagtatcagcagcaaattcacatgaacaaactgctgtccaaatccatagagcagctgaagcaaccagggtctcatctggaagaggctgaggaggagctccagggtgaccaggctatgcaggaagatcgagcgccttcctcgggtaattccacaaggtctgactcctcagcctgcgtggacgacactttaggccaggtcggagccgtgaaagtcaaggaggaacctgtagatagtgatgaagacgcccagattcaggaaatggagtctggggagcaggctgcttttatgcagcaggtgatcggtaaagatctcgccccaggatttgtcatcaaggtcatcatatag

SEQ ID NO: 181744 - DNA, 1773 bp, Artificial Sequence
  derived and/or modified sequence
atgcatagcatgattagtagtgtcgacgtaaagagcgaggtgcccgtaggcttagaaccaatctcgcctcttgatctgcgcacagacctgaggatgatgatgccagttgttgaccctgttgtgcgggagaagcaactacagcaggaacttctgttaattcaacagcagcagcaaatccagaaacaattgctcattgctgagtttcaaaagcagcacgagaatctgacaagacagcaccaggcccagttgcaggaacatataaaggaactcctggccattaaacagcagcaggaactgcttgaaaaggaacagaagctggagcagcaaagacaagagcaggaagttgagcggcatcggagagagcagcagttaccgcctctgcgtgggaaagacagaggccgagaaagagcagtggcttccaccgaagttaagcaaaaactgcaggagtttttgttgtcaaagagtgcaacgaaggacacccctacaaacggcaaaaatcactctgtcagtcggcaccccaagctgtggtataccgctgcacatcatacctcactcgatcagtcatccccgccactttcgggcacaagccctagctataagtatacactaccaggcgctcaggatgctaaagacgatttccccctaagaaaaacagccagtgaaccaaacctgaaggtgcgatcacgccttaaacaaaaagtggcagagaggcggagttccccactccttcggaggaaagacggaaatgttgtcacctcatttaagaagaggatgtttgaggtcaccgagtcctcagtgtcgagctcaagtcccggatccggacccagcagccctaacaacggcccaaccggtagcgttacggagaacgagactagcgtccttccaccaactccacacgcagagcaaatggtcagccagcaacgtatattgatccatgaagattccatgaatctactaagcttgtacacaagtccctctcttcccaacatcactctggggctgcccgcagtcccttctcaattaaacgcatcaaactccctgaaagagaagcagaagtgcgaaacacagaccttaagacagggcgtccctctacccggacagtatggcggttcaattccagcgagctcctcccatcctcatgtcacccttgaagggaaaccccctaatagcagtcatcaggctttgctgcaacatctgcttctaaaggagcagatgagacagcagaagctgttggttgcagggggtgtgcccctccatccacagagcccactggctaccaaggaaagaattagccccggaatcaggggcacacacaaactccccagacacagacctctgaatcggacccagagtgccccattgcctcagtcaaccttagcccagttggtgatccagcaacagcatcagcagttcctggagaagcaaaagcagtaccagcagcagattcatatgaacaaattgctttctaaaagcatagaacagctgaaacagcctggatcacatctcgaggaagctgaggaagaactgcagggcgaccaagccatgcaggaagatagagccccaagttcaggcaactcaacaagatctgacagcagcgcttgcgtagacgatacgttgggacaggtcggagccgtgaaggtgaaggaggaacccgtcgattcagatgaagacgctcagattcaggagatggaatccggcgagcaggccgcatttatgcaacaagtcatcgggaaggatctcgcccctgggtttgtgattaaggtcattatttag

SEQ ID NO: 181745 - DNA, 1773 bp, Artificial Sequence
  derived and/or modified sequence
atgcacagcatgatcagcagcgtggacgtgaagagcgaggtgcccgtgggcctggagcccatcagccccctggacctgagaaccgacctgagaatgatgatgcccgtggtggaccccgtggtgagagagaagcagctgcagcaggagctgctgctgatccagcagcagcagcagatccagaagcagctgctgatcgccgagttccagaagcagcacgagaacctgaccagacagcaccaggcccagctgcaggagcacatcaaggagctgctggccatcaagcagcagcaggagctgctggagaaggagcagaagctggagcagcagagacaggagcaggaggtggagagacacagaagagagcagcagctgccccccctgagaggcaaggacagaggcagagagagagccgtggccagcaccgaggtgaagcagaagctgcaggagttcctgctgagcaagagcgccaccaaggacacccccaccaacggcaagaaccacagcgtgagcagacaccccaagctgtggtacaccgccgcccaccacaccagcctggaccagagcagcccccccctgagcggcaccagccccagctacaagtacaccctgcccggcgcccaggacgccaaggacgacttccccctgagaaagaccgccagcgagcccaacctgaaggtgagaagcagactgaagcagaaggtggccgagagaagaagcagccccctgctgagaagaaaggacggcaacgtggtgaccagcttcaagaagagaatgttcgaggtgaccgagagcagcgtgagcagcagcagccccggcagcggccccagcagccccaacaacggccccaccggcagcgtgaccgagaacgagaccagcgtgctgccccccaccccccacgccgagcagatggtgagccagcagagaatcctgatccacgaggacagcatgaacctgctgagcctgtacaccagccccagcctgcccaacatcaccctgggcctgcccgccgtgcccagccagctgaacgccagcaacagcctgaaggagaagcagaagtgcgagacccagaccctgagacagggcgtgcccctgcccggccagtacggcggcagcatccccgccagcagcagccacccccacgtgaccctggagggcaagccccccaacagcagccaccaggccctgctgcagcacctgctgctgaaggagcagatgagacagcagaagctgctggtggccggcggcgtgcccctgcacccccagagccccctggccaccaaggagagaatcagccccggcatcagaggcacccacaagctgcccagacacagacccctgaacagaacccagagcgcccccctgccccagagcaccctggcccagctggtgatccagcagcagcaccagcagttcctggagaagcagaagcagtaccagcagcagatccacatgaacaagctgctgagcaagagcatcgagcagctgaagcagcccggcagccacctggaggaggccgaggaggagctgcagggcgaccaggccatgcaggaggacagagcccccagcagcggcaacagcaccagaagcgacagcagcgcctgcgtggacgacaccctgggccaggtgggcgccgtgaaggtgaaggaggagcccgtggacagcgacgaggacgcccagatccaggagatggagagcggcgagcaggccgccttcatgcagcaggtgatcggcaaggacctggcccccggcttcgtgatcaaggtgatcatctag

SEQ ID NO: 181746 - protein, 2209 aa, Artificial Sequence
  derived and/or modified sequence
MWNDIELLTNDDTGSGYLSVGSRKEHGTALYQVDLLVKISSEKASLNPKIQACSLSDGFIIVADQSVILLDSICRSLQLHLVFDTEVDVVGLCQEGKFLLVGERSGNLHLIHVTSKQTLLTNAFVQKANDENRRTYQNLVIEKDGSNEGTYYMLLLTYSGFFCITNLQLLKIQQAIENVDFSTAKKLQGQIKSSFISTENYHTLGCLSLVAGDLASEVPVIIGGTGNCAFSKWEPDSSKKGMTVKNLIDAEIIKGAKKFQLIDNLLFVLDTDNVLSLWDIYTLTPVWNWPSLHVEEFLLTTEADSPSSVTWQGITNLKLIALTASANKKMKNLMVYSLPTMEILYSLEVSSVSSLVQTGISTDTIYLLEGVCKNDPKLSEDSVSVLVLRCLTEALPENRLSRLLHKHRFAEAESFAIQFGLDVELVYKVKSNHILEKLALSSVDASEQTEWQQLVDDAKENLHKIQDDEFVVNYCLKAQWITYETTQEMLNYAKTRLLKKEDKTALIYSDGLKEVLRAHAKLTTFYGAFGPEKFSGSSWIEFLNNEDDLKDIFLQLKEGNLVCAQYLWLRHRANFESRFDVKMLESLLNSMSASVSLQKLCPWFKNDVIPFVRRTVPEGQIILAKWLEQAARNLELTDKANWPENGLQLAEIFFTAEKTDELGLASSWHWISLKDYQNTEEVCQLRTLVNNLRELITLHRKYNCKLALSDFEKENTTTIVFRMFDKVLAPELIPSILEKFIRVYMREHDLQEEELLLLYIEDLLNRCSSKSTSLFETAWEAKAMAVIACLSDTDLIFDAVLKIMYAAVVPWSAAVEQLVKQHLEMDHPKVKLLQESYKLMEMKKLLRGYGIREVNLLNKEIMRVVRYILKQDVPSSLEDALKVAQAFMLSDDEIYSLRIIDLIDREQGEDCLLLLKSLPPAEAEKTAERVIIWARLALQEEPDHSKEGKAWRMSVAKTSVDILKILCDIQKDNLQKKDECEEMLKLFKEVASLQENFEVFLSFEDYSNSSLVADLREQHIKAHEVAQAKHKPGSTPEPIAAEVRSPSMESKLHRQALALQMSKQELEAELTLRALKDGNIKTALKKCSDLFKYHCNADTGKLLFLTCQKLCQMLADNVPVTVPVGLNLPSMIHDLASQAATICSPDFLLDALELCKHTLMAVELSRQCQMDDCGILMKASFGTHKDPYEEWSYSDFFSEDGIVLESQMVLPVIYELISSLVPLAESKRYPLESTSLPYCSLNEGDGLVLPVINSISALLQNLQESSQWELALRFVVGSFGTCLQHSVSNFMNATLSEKLFGETTLVKSRHVVMELKEKAVIFIRENATTLLHKVFNCRLVDLDLALGYCTLLPQKDVFENLWKLIDKAWQNYDKILAISLVGSELASLYQEIEMGLKFRELSTDAQWGIRLGKLGISFQPVFRQHFLTKKDLIKALVENIDMDTSLILEYCSTFQLDCDAVLQLFIETLLHNTNAGQGQGDASMDSAKRRHPKLLAKALEMVPLLTSTKDLVISLSGILHKLDPYDYEMIEVVLKVIERADEKITNININQALSILKHLKSYRRISPPVDLEYQYMLEHVITLPSAAQTRLPFHLIFFGTAQNFWKILSTELSEESFPTLLLISKLMKFSLDTLYVSTAKHVFEKKLKPKLLKLTQAKSSTLINKEITKITQTIESCLLSIVNPEWAVAIAISLAQDIPEGSFKISALKFCLYLAERWLQNIPSQDEKREKAEALLKKLHIQYRRSGTEAVLIAHKLNTEEYLRVIGKPAHLIVSLYEHPSINQRIQNSSGTDYPDIHAAAKEIAEVNEINLEKVWDMLLEKWLCPSTKPGEKPSELFELQEDEALRRVQYLLLSRPIDYSSRMLFVFATSTTTTLGMHQLTFAHRTRALQCLFYLADKETIESLFKKPIEEVKSYLRCITFLASFETLNIPITYELFCSSPKEGMIKGLWKNHSHESMAVRLVTELCLEYKIYDLQLWNGLLQKLLGFNMIPYLRKVLKAISSIHSLWQVPYFSKAWQRVIQIPLLSASCPLSPDQLSDCSESLIAVLECPVSGDLDLIGVARQYIQLELPAFALACLMLMPHSEKRHQQIKNFLGSCDPQVILKQLEEHMNTGQLAGFSHQIRSLILNNIINKKEFGILAKTKYFQMLKMHAMNTNNITELVNYLANDLSLDEASVLITEYSKHCGKPVPPDTAPCEILKMFLSGLS

SEQ ID NO: 181747 - protein, 443 aa, Artificial Sequence
  derived and/or modified sequence
MLEHVITLPSAAQTRLPFHLIFFGTAQNFWKILSTELSEESFPTLLLISKLMKFSLDTLYVSTAKHVFEKKLKPKLLKLTQAKSSTLINKEITKITQTIESCLLSIVNPEWAVAIAISLAQDIPEGSFKISALKFCLYLAERWLQNIPSQDEKREKAEALLKKLHIQYRRSGTEAVLIAHKLNTEEYLRVIGKPAHLIVSLYEHPSINQRIQNSSGTDYPDIHAAAKEIAEVNEINLEKVWDMLLEKWLCPSTKPGEKPSELFELQEDEALRRVQYLLLSRPIDYSSRMLFVFATSTTTTLGMHQLTFAHRTRALQCLFYLADKETIESLFKKPIEEVKSYLRCITFLASFETLNIPITYELFCSSPKEGMIKGLWKNHSHESMAVRLVTELCLEYKIYDLQLWNGLLQKLLGFNMIPYLRKVLKAISSIHSLWQRWRSCYVA

SEQ ID NO: 181748 - DNA, 6630 bp, Artificial Sequence
  derived and/or modified sequence
atgtggaacgacatcgagctgctgaccaacgacgacaccggcagcggctacctgagcgtgggcagcagaaaggagcacggcaccgccctgtaccaggtggacctgctggtgaagatcagcagcgagaaggccagcctgaaccccaagatccaggcctgcagcctgagcgacggcttcatcatcgtggccgaccagagcgtgatcctgctggacagcatctgcagaagcctgcagctgcacctggtgttcgacaccgaggtggacgtggtgggcctgtgccaggagggcaagttcctgctggtgggcgagagaagcggcaacctgcacctgatccacgtgaccagcaagcagaccctgctgaccaacgccttcgtgcagaaggccaacgacgagaacagaagaacctaccagaacctggtgatcgagaaggacggcagcaacgagggcacctactacatgctgctgctgacctacagcggcttcttctgcatcaccaacctgcagctgctgaagatccagcaggccatcgagaacgtggacttcagcaccgccaagaagctgcagggccagatcaagagcagcttcatcagcaccgagaactaccacaccctgggctgcctgagcctggtggccggcgacctggccagcgaggtgcccgtgatcatcggcggcaccggcaactgcgccttcagcaagtgggagcccgacagcagcaagaagggcatgaccgtgaagaacctgatcgacgccgagatcatcaagggcgccaagaagttccagctgatcgacaacctgctgttcgtgctggacaccgacaacgtgctgagcctgtgggacatctacaccctgacccccgtgtggaactggcccagcctgcacgtggaggagttcctgctgaccaccgaggccgacagccccagcagcgtgacctggcagggcatcaccaacctgaagctgatcgccctgaccgccagcgccaacaagaagatgaagaacctgatggtgtacagcctgcccaccatggagatcctgtacagcctggaggtgagcagcgtgagcagcctggtgcagaccggcatcagcaccgacaccatctacctgctggagggcgtgtgcaagaacgaccccaagctgagcgaggacagcgtgagcgtgctggtgctgagatgcctgaccgaggccctgcccgagaacagactgagcagactgctgcacaagcacagattcgccgaggccgagagcttcgccatccagttcggcctggacgtggagctggtgtacaaggtgaagagcaaccacatcctggagaagctggccctgagcagcgtggacgccagcgagcagaccgagtggcagcagctggtggacgacgccaaggagaacctgcacaagatccaggacgacgagttcgtggtgaactactgcctgaaggcccagtggatcacctacgagaccacccaggagatgctgaactacgccaagaccagactgctgaagaaggaggacaagaccgccctgatctacagcgacggcctgaaggaggtgctgagagcccacgccaagctgaccaccttctacggcgccttcggccccgagaagttcagcggcagcagctggatcgagttcctgaacaacgaggacgacctgaaggacatcttcctgcagctgaaggagggcaacctggtgtgcgcccagtacctgtggctgagacacagagccaacttcgagagcagattcgacgtgaagatgctggagagcctgctgaacagcatgagcgccagcgtgagcctgcagaagctgtgcccctggttcaagaacgacgtgatccccttcgtgagaagaaccgtgcccgagggccagatcatcctggccaagtggctggagcaggccgccagaaacctggagctgaccgacaaggccaactggcccgagaacggcctgcagctggccgagatcttcttcaccgccgagaagaccgacgagctgggcctggccagcagctggcactggatcagcctgaaggactaccagaacaccgaggaggtgtgccagctgagaaccctggtgaacaacctgagagagctgatcaccctgcacagaaagtacaactgcaagctggccctgagcgacttcgagaaggagaacaccaccaccatcgtgttcagaatgttcgacaaggtgctggcccccgagctgatccccagcatcctggagaagttcatcagagtgtacatgagagagcacgacctgcaggaggaggagctgctgctgctgtacatcgaggacctgctgaacagatgcagcagcaagagcaccagcctgttcgagaccgcctgggaggccaaggccatggccgtgatcgcctgcctgagcgacaccgacctgatcttcgacgccgtgctgaagatcatgtacgccgccgtggtgccctggagcgccgccgtggagcagctggtgaagcagcacctggagatggaccaccccaaggtgaagctgctgcaggagagctacaagctgatggagatgaagaagctgctgagaggctacggcatcagagaggtgaacctgctgaacaaggagatcatgagagtggtgagatacatcctgaagcaggacgtgcccagcagcctggaggacgccctgaaggtggcccaggccttcatgctgagcgacgacgagatctacagcctgagaatcatcgacctgatcgacagagagcagggcgaggactgcctgctgctgctgaagagcctgccccccgccgaggccgagaagaccgccgagagagtgatcatctgggccagactggccctgcaggaggagcccgaccacagcaaggagggcaaggcctggagaatgagcgtggccaagaccagcgtggacatcctgaagatcctgtgcgacatccagaaggacaacctgcagaagaaggacgagtgcgaggagatgctgaagctgttcaaggaggtggccagcctgcaggagaacttcgaggtgttcctgagcttcgaggactacagcaacagcagcctggtggccgacctgagagagcagcacatcaaggcccacgaggtggcccaggccaagcacaagcccggcagcacccccgagcccatcgccgccgaggtgagaagccccagcatggagagcaagctgcacagacaggccctggccctgcagatgagcaagcaggagctggaggccgagctgaccctgagagccctgaaggacggcaacatcaagaccgccctgaagaagtgcagcgacctgttcaagtaccactgcaacgccgacaccggcaagctgctgttcctgacctgccagaagctgtgccagatgctggccgacaacgtgcccgtgaccgtgcccgtgggcctgaacctgcccagcatgatccacgacctggccagccaggccgccaccatctgcagccccgacttcctgctggacgccctggagctgtgcaagcacaccctgatggccgtggagctgagcagacagtgccagatggacgactgcggcatcctgatgaaggccagcttcggcacccacaaggacccctacgaggagtggagctacagcgacttcttcagcgaggacggcatcgtgctggagagccagatggtgctgcccgtgatctacgagctgatcagcagcctggtgcccctggccgagagcaagagataccccctggagagcaccagcctgccctactgcagcctgaacgagggcgacggcctggtgctgcccgtgatcaacagcatcagcgccctgctgcagaacctgcaggagagcagccagtgggagctggccctgagattcgtggtgggcagcttcggcacctgcctgcagcacagcgtgagcaacttcatgaacgccaccctgagcgagaagctgttcggcgagaccaccctggtgaagagcagacacgtggtgatggagctgaaggagaaggccgtgatcttcatcagagagaacgccaccaccctgctgcacaaggtgttcaactgcagactggtggacctggacctggccctgggctactgcaccctgctgccccagaaggacgtgttcgagaacctgtggaagctgatcgacaaggcctggcagaactacgacaagatcctggccatcagcctggtgggcagcgagctggccagcctgtaccaggagatcgagatgggcctgaagttcagagagctgagcaccgacgcccagtggggcatcagactgggcaagctgggcatcagcttccagcccgtgttcagacagcacttcctgaccaagaaggacctgatcaaggccctggtggagaacatcgacatggacaccagcctgatcctggagtactgcagcaccttccagctggactgcgacgccgtgctgcagctgttcatcgagaccctgctgcacaacaccaacgccggccagggccagggcgacgccagcatggacagcgccaagagaagacaccccaagctgctggccaaggccctggagatggtgcccctgctgaccagcaccaaggacctggtgatcagcctgagcggcatcctgcacaagctggacccctacgactacgagatgatcgaggtggtgctgaaggtgatcgagagagccgacgagaagatcaccaacatcaacatcaaccaggccctgagcatcctgaagcacctgaagagctacagaagaatcagcccccccgtggacctggagtaccagtacatgctggagcacgtgatcaccctgcccagcgccgcccagaccagactgcccttccacctgatcttcttcggcaccgcccagaacttctggaagatcctgagcaccgagctgagcgaggagagcttccccaccctgctgctgatcagcaagctgatgaagttcagcctggacaccctgtacgtgagcaccgccaagcacgtgttcgagaagaagctgaagcccaagctgctgaagctgacccaggccaagagcagcaccctgatcaacaaggagatcaccaagatcacccagaccatcgagagctgcctgctgagcatcgtgaaccccgagtgggccgtggccatcgccatcagcctggcccaggacatccccgagggcagcttcaagatcagcgccctgaagttctgcctgtacctggccgagagatggctgcagaacatccccagccaggacgagaagagagagaaggccgaggccctgctgaagaagctgcacatccagtacagaagaagcggcaccgaggccgtgctgatcgcccacaagctgaacaccgaggagtacctgagagtgatcggcaagcccgcccacctgatcgtgagcctgtacgagcaccccagcatcaaccagagaatccagaacagcagcggcaccgactaccccgacatccacgccgccgccaaggagatcgccgaggtgaacgagatcaacctggagaaggtgtgggacatgctgctggagaagtggctgtgccccagcaccaagcccggcgagaagcccagcgagctgttcgagctgcaggaggacgaggccctgagaagagtgcagtacctgctgctgagcagacccatcgactacagcagcagaatgctgttcgtgttcgccaccagcaccaccaccaccctgggcatgcaccagctgaccttcgcccacagaaccagagccctgcagtgcctgttctacctggccgacaaggagaccatcgagagcctgttcaagaagcccatcgaggaggtgaagagctacctgagatgcatcaccttcctggccagcttcgagaccctgaacatccccatcacctacgagctgttctgcagcagccccaaggagggcatgatcaagggcctgtggaagaaccacagccacgagagcatggccgtgagactggtgaccgagctgtgcctggagtacaagatctacgacctgcagctgtggaacggcctgctgcagaagctgctgggcttcaacatgatcccctacctgagaaaggtgctgaaggccatcagcagcatccacagcctgtggcaggtgccctacttcagcaaggcctggcagagagtgatccagatccccctgctgagcgccagctgccccctgagccccgaccagctgagcgactgcagcgagagcctgatcgccgtgctggagtgccccgtgagcggcgacctggacctgatcggcgtggccagacagtacatccagctggagctgcccgccttcgccctggcctgcctgatgctgatgccccacagcgagaagagacaccagcagatcaagaacttcctgggcagctgcgacccccaggtgatcctgaagcagctggaggagcacatgaacaccggccagctggccggcttcagccaccagatcagaagcctgatcctgaacaacatcatcaacaagaaggagttcggcatcctggccaagaccaagtacttccagatgctgaagatgcacgccatgaacaccaacaacatcaccgagctggtgaactacctggccaacgacctgagcctggacgaggccagcgtgctgatcaccgagtacagcaagcactgcggcaagcccgtgccccccgacaccgccccctgcgagatcctgaagatgttcctgagcggcctgagctag

SEQ ID NO: 181749 - DNA, 6630 bp, Artificial Sequence
  derived and/or modified sequence
atgtggaatgatatcgaactgctgaccaacgacgacaccggctctgggtacctgtcagtgggtagcagaaaagagcacggcactgcgctttatcaggtcgacttgcttgtaaaaatctcgagcgagaaggctagcctgaatccgaagatacaggcatgttccctgtccgatgggtttataatcgttgctgatcagagcgtaattctgctggactctatatgccgatctcttcagctgcatctggtgttcgatacagaagttgatgttgtgggtctgtgccaagagggcaaatttttactcgtgggggagaggtcaggaaaccttcacctgatacacgtcacatctaagcagacccttctgaccaatgcttttgttcaaaaagccaatgatgaaaacagacgaacctaccagaatctggtcattgagaaagacgggtccaatgagggcacctattacatgctgcttctgacttactcaggcttcttttgcattactaacctccagctgctcaagatccagcaggcgatcgagaatgtcgacttttctaccgcaaaaaagttgcagggacagattaagtcatccttcattagtaccgagaattaccatacactgggctgtctgtctttggtggctggcgatttggcatcggaagtgcctgtcatcatcgggggcactggcaactgcgcattcagcaaatgggagcctgattcctccaaaaagggtatgactgtcaaaaacctcatagacgctgaaatcataaagggggccaagaagttccaactgatcgacaaccttctgttcgtgctggacacagacaatgtgttaagtttgtgggatatatatacgctcactcccgtatggaactggccatccttgcacgttgaagaattcctgttaaccaccgaagccgactctccaagcagtgttacctggcagggtatcactaatttaaaattgatcgccttgaccgccagtgcaaataagaagatgaagaaccttatggtgtattcccttcccaccatggagattctatactctctggaggtgtcttccgtatctagcctggtgcagacggggatttccacagacaccatttaccttctagagggcgtgtgcaaaaacgatcccaaactgtcagaagatagcgttagcgtgctggtgcttcgttgtttgaccgaagcgctgcctgagaatcgactttcacggcttctgcataagcatcggtttgcagaggccgagagttttgccatccaattcgggctggatgtcgagctggtgtataaggtcaagtcaaatcatattctggagaagctcgccctgtcttcggtggacgcttccgagcagaccgagtggcagcagcttgtagacgatgccaaagaaaacttgcacaaaatccaggacgacgaattcgtggttaactattgccttaaagcccagtggatcacatatgagacgactcaggaaatgctaaactacgctaaaactcgcttactgaagaaggaagataaaaccgccctgatctactctgatgggctgaaggaagtgctccgtgcacacgcaaagctgacaactttttacggtgcatttggcccagagaaattttcaggtagctcttggatagaatttcttaacaacgaagacgaccttaaagacatcttcttgcagctcaaggaggggaacttggtttgcgctcaatacctctggctcaggcatcgcgccaacttcgagagtagatttgacgtcaaaatgctcgaaagcctcttgaactcaatgagcgcctctgtatccctgcagaaactatgtccctggtttaaaaacgacgtgattccctttgtgcgacgcacagtgccagagggccagattatcctggccaagtggctcgagcaggccgctcgcaatcttgaactgacagacaaagcaaactggcccgagaacggactacagctggccgaaatcttttttactgctgagaagacagatgagctcgggctggcctcatcctggcattggatcagcttaaaagattatcaaaatacagaggaggtctgccaactgaggaccttagtgaacaatctccgtgaactgataaccctgcaccgtaagtacaactgcaaactcgcccttagtgattttgaaaaagaaaatactactaccatagtcttcagaatgttcgacaaggtcctagcaccagaactgatccctagtattttggaaaagttcattcgcgtgtatatgcgggaacacgacctccaggaggaggagctgctcctgctgtatattgaggatttgctgaacaggtgttcttctaagagcacatctctcttcgagaccgcctgggaagctaaagctatggctgttattgcatgtttgtccgacacggatctcattttcgacgccgttctgaaaatcatgtacgccgcagttgtgccctggtcagcagctgtagaacagctggttaaacagcaccttgagatggatcacccgaaagtcaagctgctgcaggaaagttacaaattaatggagatgaagaagctccttcgtggctacggaataagggaagttaatcttctgaacaaagaaataatgagggtggtgcggtacatcctcaaacaggacgttccttccagcctggaggacgcgctgaaggttgctcaagcctttatgctgtccgatgatgagatctactccctgaggataatcgacttgattgacagggaacagggagaggactgcctgttgctgttaaagtcacttccaccagcagaggcagagaagacggccgagcgcgttataatttgggcccgcttggccctgcaggaagagcccgaccatagtaaggaagggaaggcatggcgcatgagcgtcgcaaaaacctctgtggatatcctgaagatactatgcgacattcagaaggataatcttcagaaaaaagacgagtgcgaggaaatgctgaaactgtttaaagaggtcgccagcctgcaggaaaactttgaggtgttcctgtctttcgaagactacagcaactctagtcttgtggcagatctgcgagaacagcatattaaagctcatgaggtggctcaggccaagcataagccaggcagcacgcccgaaccaattgcagccgaggtgagaagtccctcgatggagagtaaattacacagacaggctttggccctgcagatgtccaagcaggaactggaggctgaattgacattgcgtgcgcttaaagatggaaatatcaagaccgccttgaagaaatgctcggacctgttcaagtaccactgcaatgctgacaccggcaagctcctcttcttgacatgtcaaaagctgtgtcaaatgctggcagataatgttcctgttacagtgcccgtgggactgaacttgccgtctatgatccatgatctcgctagtcaggcggccacgatttgctctcccgacttcctgcttgacgctctcgagctatgtaagcatacactgatggctgtggagctctctcggcagtgccagatggatgactgcggcattctaatgaaagccagttttggaacccataaagatccctacgaagagtggagctattccgacttcttcagcgaagacgggatagttctcgaatcccagatggttctgcctgtcatctatgagctgattagctctctagtccccctcgcagagagcaaacgctaccccctcgagagcacaagcttgccatactgctccctgaacgaaggcgatggtttagtgttgcccgtaattaactccatctccgccttactgcagaacctgcaagagagctctcagtgggaacttgctctgcgatttgtggttggttcatttggtacctgcctgcagcatagtgtgagtaactttatgaacgccacactgagtgaaaagctgttcggtgagacaactctggtaaagtcacgccacgtcgtaatggagctaaaggaaaaagcagtgatcttcattagagaaaatgctactaccttattgcacaaggtcttcaattgccgcttggtggacctcgacctggcactcggatattgtaccctgttgcctcagaaggatgttttcgaaaatctttggaagctgatcgataaagcttggcagaactatgacaagatcctggctatatccctggtgggctcagagctcgcgtctctgtatcaagaaatcgaaatgggtctgaaatttagggagttaagtaccgatgcccagtggggcatacgactaggaaaactgggcatttctttccagccggtcttccgtcagcattttttaacaaaaaaggacctgattaaggctctggtggaaaatatagacatggacacctctctcatcctggagtactgttcgactttccagctggattgcgacgccgtgctgcaactgttcatcgagacgctgctgcacaacacaaatgctggacagggacagggcgacgcatctatggattcagcaaaacggcggcatcccaagctgctggcaaaggcattggagatggtccccctgcttacctccacaaaggacctcgtgattagtctctccggcatcctgcataagctggacccttacgactacgagatgattgaagtggtgctaaaggtgattgaacgggccgacgaaaagatcacgaatattaatattaatcaggctttgtcaattctgaaacatcttaaatcctatcgccgcatctcaccgcctgttgacctcgagtatcagtacatgctggaacacgtgataaccctcccatctgcagcccagacacgactcccgtttcatctgatcttctttggcactgcccagaacttctggaagattctgtccactgagctgagcgaagaatccttccccaccctgttgcttatctccaagcttatgaagttctcactggacactttgtacgtgtccacagcaaagcatgtgttcgagaagaagttgaagcctaagctgctaaaactcacccaggccaaatctagcactttgatcaataaagagattacaaaaatcacccagacaatcgagtcatgtctcttgtcgatagtgaatccagagtgggctgtggctatcgccattagtctggcacaggacatcccagaaggtagcttcaagatctcagcactgaaattttgcctgtatttggcggagaggtggctccagaatatcccttcccaggatgagaaacgcgagaaagcagaggcgctacttaaaaaactccacatccagtaccgccggagtggtactgaagcagttctaatcgcacacaagttgaacactgaagaataccttcgagtcattggcaaacctgcacacctcattgtctcactgtacgaacatccaagtatcaaccagaggattcagaactctagtgggactgactacccagatatccatgcagccgccaaggaaattgctgaggtcaacgagatcaacttggagaaagtctgggacatgctgctggagaaatggctgtgtcctagcaccaagccaggggagaagccttcagagctctttgagttgcaggaggatgaggctctgcggagggtgcagtatctattactgtccagaccgatcgattactctagccggatgctgtttgtgtttgctacgtccactaccacaacactgggcatgcaccagctgacattcgcacaccgaacccgggctttgcaatgtctgttctacctcgccgataaagaaaccatcgagagcctctttaagaaacccatcgaagaagtgaagagttacctgcgatgtattacatttctcgcttcttttgaaacattgaatatccccatcacctatgaattgttctgtagcagtcctaaggagggtatgattaagggactatggaaaaatcatagtcacgagtctatggctgttaggctggtgactgaactgtgcttagagtataagatttacgacctccagctttggaatgggctgctgcagaagttgctcggctttaatatgatcccctacctgaggaaggtgcttaaggctataagttctattcacagtctttggcaagtgccatattttagcaaggcgtggcagagggtcatacagattcccttgctgtccgcttcctgtccactcagtcccgatcagctgagcgactgcagcgagtccctgatcgccgtgcttgaatgccctgtcagcggcgatttagatctgataggggtggcacgacagtacattcagttggagctgccagcgtttgcgctggcatgtctcatgttaatgcctcatagcgaaaagaggcaccagcagatcaaaaactttcttgggagctgcgacccacaggtcatcctgaaacaactcgaagagcacatgaatacaggacagttagccggttttagccaccagatccggtccctgattctgaacaatataatcaacaaaaaagaatttggaatactggccaaaacgaagtattttcagatgctcaaaatgcacgccatgaataccaacaatattacagaattggtcaattatctggccaacgatcttagcctagacgaggcaagtgtgctcatcacagaatactccaagcactgtggtaagccagtgccccccgacactgcaccttgtgagattttaaagatgtttctatctggtctgtcctag

SEQ ID NO: 181750 - DNA, 6630 bp, Artificial Sequence
  derived and/or modified sequence
atgtggaatgacatcgagctgctgaccaatgatgacaccggcagcggctacctgtctgtgggcagcaggaaggagcacggcacagccctgtaccaggtggacctgctggtgaagatcagcagcgagaaggccagcctgaaccccaagatccaggcctgcagcctgagtgatggcttcatcatcgtggccgaccagagcgtcatcctgctggacagcatctgccgcagcctgcagctgcacctggtgtttgacacagaggtggatgtggtgggcctgtgccaggagggcaagttcctgctggtgggggagaggagcggcaacctgcacctgatccacgtgaccagcaagcagaccctgctgaccaatgcctttgtgcagaaggccaatgatgaaaatagaaggacctaccagaacctggtgattgagaaggatggcagcaatgaaggcacctactacatgctgctgctgacctacagcggcttcttctgcatcaccaacctgcagctgctgaagatccagcaggccattgaaaatgtggacttcagcacagccaagaagctgcagggccagatcaagagcagcttcatcagcacagagaactaccacaccctgggctgcctgagcctggtggccggggacctggccagcgaggtgcctgtgatcatcggcggcactggaaactgtgccttcagcaagtgggagccagacagcagcaagaagggcatgacagtgaagaacctgattgatgctgagatcatcaagggggccaagaagttccagctgattgacaacctgctgtttgtgctggacacagacaacgtgctgagcctgtgggacatctacaccctgacccctgtgtggaactggcccagcctgcacgtggaggagttcctgctgaccacagaagctgacagccccagctctgtgacctggcagggcatcaccaacctgaagctgattgccctgacagccagcgccaacaagaagatgaagaacctgatggtgtacagcctgcccaccatggagatcctgtacagcctggaggtgtcctctgtgagcagcctggtgcagacaggcatcagcacagacaccatctacctgctggagggcgtgtgcaagaatgaccccaagctgtctgaggacagcgtgtctgtgctggtgctgcgctgcctgacagaggccctgcctgaaaatcggctgagccggctgctgcacaagcacagatttgctgaggccgagagctttgccatccagtttggcctggatgtggagctggtgtacaaggtgaagagcaaccacatcctggagaagctggccctgagctctgtggatgccagcgagcagacagagtggcagcagctggtggatgatgccaaggagaacctgcacaagatccaggatgatgaatttgtggtgaactactgcctgaaggcccagtggatcacctatgagaccacccaggagatgctgaactatgccaagacccggctgctgaagaaggaggacaagacagccctgatctacagtgatggcctgaaggaggtgctgcgggcccacgccaagctgaccaccttctacggggcctttggacctgagaagttcagcggcagctcctggattgagttcctgaacaatgaagatgacctgaaggacatcttcctgcagctgaaggagggcaacctggtgtgtgcccagtacctgtggctgcggcaccgggccaactttgagagcagatttgatgtgaagatgctggagagcctgctgaacagcatgtctgcctctgtgtccctgcagaagctgtgcccctggttcaagaatgatgtgatcccctttgtgagaagaacagtgcctgagggccagatcatcctggccaagtggctggagcaggccgccaggaacctggagctgacagacaaggccaactggccagaaaatggcctgcagctggccgagatcttcttcaccgctgagaagacagatgagctgggcctggccagctcctggcactggatcagcctgaaggactaccagaacacagaggaggtgtgccagctgcggaccctggtgaacaacctgcgggagctgatcaccctgcacaggaagtacaactgcaagctggccctgagtgactttgagaaggagaacaccaccaccatcgtgttcaggatgtttgacaaggtgctggcccctgagctgatccccagcatcctggagaagttcatccgggtgtacatgagggagcatgacctgcaggaggaggagctgctgctgctgtacatcgaggacctgctgaaccgctgcagcagcaagagcaccagcctgtttgaaacagcctgggaggccaaggccatggctgtgattgcctgcctgagtgacacagacctgatctttgatgctgtgctgaagatcatgtatgctgctgtggtgccctggagcgctgctgtggagcagctggtgaagcagcacctggagatggaccaccccaaggtgaagctgctgcaggagagctacaagctgatggagatgaagaagctgctgcggggctacggcatccgggaggtgaacctgctgaacaaggagatcatgagggtggtgcgctacatcctgaagcaggatgtgcccagcagcctggaggatgccctgaaggtggcccaggccttcatgctgagtgatgatgagatctacagcctgcgcatcatcgacctgattgaccgggagcagggcgaggactgcctgctgctgctgaagagcctgcccccagctgaggccgagaagacagctgagagggtcatcatctgggcccggctggccctgcaggaggagccagaccacagcaaggagggcaaggcctggaggatgtctgtggccaagacctctgtggacatcctgaagatcctgtgtgacatccagaaggacaacctgcagaagaaggatgaatgtgaggagatgctgaagctgttcaaggaggtggccagcctgcaggagaactttgaggtgttcctgagctttgaggactacagcaacagcagcctggtggccgacctgcgggagcagcacatcaaggcccacgaggtggcccaggccaagcacaagccaggcagcaccccagagcccatcgctgctgaggtgcgcagccccagcatggagagcaagctgcaccggcaggccctggccctgcagatgagcaagcaggagctggaggccgagctgaccctgcgggccctgaaggatggcaacatcaagacagccctgaagaagtgcagcgacctcttcaagtaccactgcaatgctgacaccgggaagctgctcttcctgacctgccagaagctgtgccagatgctggccgacaacgtgcctgtgacagtgcctgtgggcctgaacctgcccagcatgattcatgacctggccagccaggccgccaccatctgcagcccagacttcctgctggatgccctggagctgtgcaagcacaccctgatggctgtggagctgagccggcagtgccagatggatgactgtggcatcctgatgaaggccagctttggcacccacaaggacccctatgaggagtggagctacagcgacttcttctctgaagatggcatcgtgctggagagccagatggtgctgcctgtgatctatgagctgatcagcagcctggtgcccctggccgagagcaagcgctaccccctggagagcaccagcctgccctactgcagcctgaatgaaggagatggcctggtgctgcccgtcatcaacagcatcagcgccctgctgcagaacctgcaggagagcagccagtgggagctggccctgcgctttgtggtgggcagctttggcacctgcctgcagcacagcgtgagcaacttcatgaatgccaccctgtctgagaagctgtttggagagaccaccctggtgaagagccgccacgtggtgatggagctgaaggagaaggctgtgatcttcatcagagaaaatgccaccaccctgctgcacaaggtgttcaactgccgcctggtggacctggacctggccctgggctactgcaccctgctgccccagaaggatgtgtttgagaacctgtggaagctgattgacaaggcctggcagaactatgacaagatcctggccatcagcctggtgggcagcgagctggccagcctgtaccaggagattgagatgggcctgaagttccgggagctgagcacagatgcccagtggggcatccggctgggcaagctgggcatctccttccagcccgtcttccggcagcacttcctgaccaagaaggacctgatcaaggccctggtggagaacatcgacatggacaccagcctcatcctggagtactgcagcaccttccagctggactgtgatgctgtgctgcagctgttcatcgagaccctgctgcacaacaccaatgccggccagggccagggagatgcctccatggacagcgccaagagaagacaccccaagctgctggccaaggccctggagatggtgcccctgctgaccagcaccaaggacctggtgatcagcctgagcggcatcctgcacaagctggacccctatgactatgagatgattgaggtggtgctgaaggtgattgagcgggcagatgagaagatcaccaacatcaacatcaaccaggccctgagcatcctgaagcacctgaagagctaccgccgcatcagcccccctgtggacctggagtaccagtacatgctggagcacgtgatcaccctgcccagcgctgcccagacccggctgcccttccacctgatcttcttcggcacagcccagaacttctggaagatcctgagcacagagctgtctgaggagagcttccccaccctgctgctgatcagcaagctgatgaagttcagcctggacaccctgtatgtgtccacagccaagcacgtgtttgagaagaagctgaagcccaagctgctgaagctgacccaggccaagagcagcaccctcatcaacaaggagatcaccaagatcacccagaccatcgagagctgcctgctgagcatcgtgaaccctgagtgggccgtggccatcgccatcagcctggcccaggacatccctgagggcagcttcaagatcagcgccctgaagttctgcctgtacctggccgagcgctggctgcagaacatccccagccaggatgagaagcgggagaaggccgaggccctgctgaagaagctgcacatccagtaccgccgcagcggcacagaggccgtgctgattgcccacaagctgaacacagaggagtacctgcgggtcatcggcaagccagcccacctgattgtgtccctgtatgagcaccccagcatcaaccagaggatccagaacagcagcggcacagactacccagacatccatgctgctgccaaggagattgctgaggtgaatgagatcaacctggagaaggtgtgggacatgctgctggagaagtggctgtgccccagcaccaagccaggagagaagcccagcgagctgtttgagctgcaggaggatgaggccctgcggcgggtgcagtacctgctgctgagccggcccatcgactacagcagcaggatgctgtttgtgtttgccaccagcaccaccaccaccctgggcatgcaccagctgacctttgcccacaggacccgggccctgcagtgcctcttctacctggccgacaaggagaccatcgagagcctcttcaagaagcccatcgaggaggtgaagagctacctgcgctgcatcaccttcctggccagctttgagaccctgaacatccccatcacctatgagctgttctgcagcagccccaaggagggcatgatcaagggcctgtggaagaaccacagccatgagagcatggctgtgcggctggtgacagagctgtgcctggagtacaagatctatgacctgcagctgtggaatggcctgctgcagaagctgctgggcttcaacatgatcccctacctgaggaaggtgctgaaggccatcagcagcatccacagcctgtggcaggtgccctacttcagcaaggcctggcagagggtcatccagatccccctgctgagcgccagctgccccctgagcccagaccagctgagtgactgcagcgagagcctgattgctgtgctggagtgccctgtgtctggggacctggacctgattggagtggcccggcagtacatccagctggagctgcctgcctttgccctggcctgcctgatgctgatgccccacagcgagaagaggcaccagcagatcaagaacttcctgggcagctgtgacccccaggtgatcctgaagcagctggaggagcacatgaacacaggccagctggccggcttcagccaccagatccgcagcctcatcctgaacaacatcatcaacaagaaggagtttggcatcctggccaagaccaagtacttccagatgctgaagatgcacgccatgaacaccaacaacatcacagagctggtgaactacctggccaatgacctgagcctggatgaggcctctgtgctgatcacagagtacagcaagcactgcggcaagcctgtgcccccagacacagccccctgtgagatcctgaagatgttcctgagcggcctgtcctag

SEQ ID NO: 181751 - DNA, 6957 bp, Artificial Sequence
  derived and/or modified sequence
caatttaagcctgtggcatggaacctaaagactagaggcggttgtgtgagtcaggaagaggggccagatatctgagtgttcctctttagtttcttcaattgcagataatatggtgtctaattttatgttgttcaggaaagacagtggttcctgactcaggaagacagtctcagaaacatgtggaatgatattgagctgctaacaaatgatgataccggaagtgggtacctgagtgtcggttcaagaaaagaacatggaactgctttatatcaagtagatttgctagtgaagatctcttctgaaaaggcctcattaaatccaaagatacaggcatgcagcttaagtgatgggtttattattgtagccgaccaatcagtgatattgcttgacagtatttgtagatcacttcaattgcatcttgtctttgatactgaagtggatgtagttggcctttgtcaagaaggaaagtttcttttggttggcgagagaagtggcaacctacatcttattcatgtaacatcaaaacaaacactactcactaatgcatttgttcagaaagctaacgatgaaaatcggcggacttaccagaatcttgtcattgagaaggatggttcaaatgaaggtacctattatatgctacttcttacatacagtggatttttttgtattacaaaccttcagcttttaaaaattcaacaagcaattgagaatgtagacttcagtacagcaaaaaagttacaaggacaaatcaagtccagttttatttctactgaaaattatcatactcttggttgtctcagtcttgtggctggagatttagcaagtgaagttcctgtgataattgggggaaccggtaattgtgcattctcaaaatgggaaccagattcttccaagaaaggaatgacagttaagaaccttattgatgcagagattattaaaggtgcaaagaagttccagctgatagacaatctactttttgttcttgatactgataacgtgctgagtttatgggatatttacactctaactcctgtatggaactggccctctcttcacgtagaagagtttcttcttactacagaagcagactctccttcatcagtcacgtggcaaggaattacaaatctcaaattaatagctctgacagcttcagctaataagaagatgaaaaacctcatggtttattcattacctacaatggaaatactatattctttggaagtatctagtgtttcttctctggtccaaacaggaattagcacagataccatataccttttagaaggagtttgcaaaaatgatccaaaattgtctgaagactcagtctctgtgttagtactcagatgtcttacggaagctttaccagaaaacagattgagtcggttacttcacaaacacagatttgctgaagctgagagttttgccattcagtttggactagatgttgagcttgtttacaaggtcaagtcaaatcatatattggagaaactggcattgagttctgtggatgccagtgaacagaccgaatggcaacaacttgtagacgacgctaaggaaaatctacataagatccaggatgatgaatttgtggtgaattactgcctgaaagctcagtggataacctatgaaaccactcaagagatgctgaattatgccaaaaccaggcttttgaagaaagaagataaaactgctctcatttattctgatggcttgaaagaggtgctaagagctcatgcaaaattgactactttttatggagcatttggaccagaaaaattcagtggcagttcttggattgaatttctaaataatgaagatgatcttaaagatatttttttacagctaaaagaaggaaaccttgtttgtgcacagtatctttggcttcgacatcgggcaaactttgaaagcagatttgatgtgaaaatgctggagagcttgctcaactcaatgtctgcatcagtctctttgcaaaagctgtgtccatggtttaaaaatgatgtgattccatttgtaagaaggactgtgcctgaaggacagataattcttgcaaaatggttggaacaagcagccaggaaccttgaattaactgataaggcaaattggccagaaaatggacttcaattggcagagatattttttacagcagaaaaaacagacgagttgggattggcatcttcctggcattggatttccttgaaagattatcagaacacagaggaagtatgtcagctaaggactttggtaaataacttgcgagagttgatcacgttgcataggaagtacaactgcaaattagccctctctgattttgagaaggaaaatacaaccaccatagtgttccgaatgtttgataaagtgctggccccagagcttattccctccatcttagagaagtttataagagtttacatgagagaacatgacttgcaagaggaggaacttctcttgctgtacatagaggatttactgaatagatgcagctcaaagtccacatcactctttgaaacagcatgggaagcaaaggccatggcagtaatagcgtgtttatctgacacggacctcatatttgatgccgtgctcaagatcatgtatgcggcagtggttccttggagtgcagctgtggagcaactggtgaaacagcacctggaaatggaccatcccaaagtcaagttattacaggaaagttacaaactaatggagatgaaaaaacttttacgaggctatggaataagagaggtaaatctcttaaacaaggaaataatgagagtggttagatacattctcaaacaagatgtcccatcttctttagaagatgctttaaaggtagcccaagcgtttatgttatctgatgatgagatctacagtctaagaattattgacctgattgatagagaacagggtgaagactgtctccttctgttgaagtctttgcctcctgctgaagctgagaaaactgcagaaagagtcatcatatgggcacgactggcattacaagaagagccagatcattctaaagagggcaaggcctggagaatgtctgtagcgaagacatccgtggacattcttaagatactatgtgacattcagaaagacaatctgcagaagaaggacgaatgtgaagaaatgttgaaactatttaaagaggttgctagcttacaggagaactttgaggtctttctttcatttgaagattatagcaatagttccctggtagcagatctccgtgagcagcacattaaagctcacgaagttgcacaggcgaaacacaaacctgggagcaccccagagcccatagctgctgaggtgaggagcccaagcatggaatcaaagctgcacagacaggcactggccctgcagatgtccaaacaagagctggaggcagagctgaccttgagagccttaaaagatgggaacatcaaaacagcactgaaaaaatgcagcgacttgtttaagtatcactgcaatgctgacactgggaaattgctatttctgacatgtcagaagctttgtcagatgttggctgataatgtcccagtgacagtgcctgtgggactgaatcttccttccatgatacatgatctagcaagccaagctgccaccatttgcagtccagattttttactagatgctttagaactatgtaaacatactttaatggctgtagagctttccagacaatgccaaatggatgactgtggaatcctcatgaaagcttcttttgggacacataaagatccatatgaagagtggtcttacagtgacttcttcagtgaagatggaattgttcttgagtcacagatggtgcttccagtgatttatgaactgatttcatctcttgtgcctctagctgaaagcaagagatatcccttggagtctaccagtttgccatactgctcccttaatgaaggagatggccttgttttacctgttataaattccatctctgccctgcttcagaatcttcaggaatctagccagtgggagctagccctaagatttgtggttggttcatttggtacctgtcttcagcactctgtgtcaaacttcatgaatgccactttgagtgaaaagttatttggagagactacattagttaaatcaaggcatgttgttatggaattgaaagaaaaagctgttatatttatcagggaaaatgctacaacactactgcacaaagtatttaattgtcgcttggtagatcttgacctggcgttgggttactgcactctcttacctcaaaaagatgtgtttgaaaatctctggaagctcatagataaagcatggcagaattacgacaaaatcttggcaatatctctggtgggctctgagctggcaagtctctatcaggaaatagaaatggggcttaagttccgtgaactcagtactgatgcccagtggggcattcgtcttggtaaacttggtatttcttttcaaccagttttcaggcaacattttctcaccaagaaagacctcattaaagctcttgtggagaatatagatatggacacaagcctcattttggaatattgcagcacatttcagttggactgcgatgcagttcttcagctcttcattgaaacgctgctccacaacacaaatgccggccaaggccagggagatgcaagcatggactctgcaaagcggcggcatcccaaactcctggccaaagcccttgagatggttcctttactgacgagcacaaaagatttggtcatcagtcttagtggaatactacataagttggatccttatgactatgaaatgattgaagttgtcttgaaagttatagaacgagctgatgaaaagataaccaatattaatattaatcaggcattgagtattctgaaacatttgaagtcatacagaagaatttctcctcccgtggatctagaatatcagtatatgttggaacatgtcataactttgccatcagctgcccaaactagactgccttttcacctgatattctttggcacagcacagaacttctggaaaattctctctacagaactcagtgaagaatctttcccaacattgctcttaatttcgaaattaatgaagttctctctggacactctgtacgtgtctacagcaaaacacgttttcgaaaaaaaactgaagccaaagctcctgaagttaacacaagctaaatcctcaacactgattaacaaggaaataactaagatcacgcagaccatcgaatcctgcttactctctatagtcaacccagagtgggctgtagctattgccatcagccttgcccaggatatccctgaaggttccttcaagatatctgctttgaaattctgcctttatttagctgagagatggctacagaatatcccatcgcaggacgaaaaacgtgaaaaagccgaggctttgttgaagaagcttcatatccagtaccggcgatcgggcacagaagctgtgctcatagcccacaagctgaacactgaggaatatttaagagtgatcggaaagccagcacatcttattgtcagtctctacgaacatcctagcatcaatcaaagaattcagaattcatctggcacagattatcctgatattcatgcagcagctaaagaaatagccgaagtcaatgaaattaatttggaaaaagtctgggacatgttgttggaaaaatggctatgcccttcaacaaaacctggtgaaaaaccatcagaattatttgaacttcaagaagatgaagccctacgaagagtgcagtatctcctcctgtctcgtccaattgattatagttcaagaatgctgtttgtatttgcaacatcaactacaaccacattaggtatgcatcagttaacttttgcccatagaactcgagctcttcagtgtctcttctatttggctgacaaggaaactatagaatctctctttaaaaaacccattgaagaagtgaaatcttatttgagatgtataacttttctggcatcatttgagactttgaatatccccatcacatatgaattattttgcagcagtcctaaagaaggaatgattaagggtctgtggaaaaaccacagccacgagtccatggcagtaagattggtgactgagctgtgtttagaatacaaaatctatgacctgcagctttggaatggactcttgcaaaagcttctgggcttcaatatgattccttatctaaggaaagttttaaaagccatctccagtatccattctttatggcaggttccctacttcagcaaagcgtggcagcgtgtgatacagataccactgctttcagcctcttgtcctttaagtcctgatcagctgtcagattgttctgagagtctcatcgctgtcctcgaatgtccagtctcaggtgatcttgacctgatcggagtcgccaggcagtatatccagttagaacttccggcttttgcattagcttgtctgatgctcatgccccactcagagaaaagacaccagcaaattaagaattttctgggttcctgtgaccctcaggttattttaaagcaattggaagagcatatgaacacgggccagctagcaggattttcacatcaaattagaagtctgattttgaataatatcatcaataagaaggagtttgggattttggcaaagaccaaatactttcaaatgttgaagatgcatgcgatgaataccaacaatatcactgagctagtgaactatttggcaaatgacttaagtttagatgaagcttcagtcttgataactgaatattcaaagcactgcgggaaacctgtgcctccagacactgctccctgtgaaattctgaagatgtttcttagtggattatcgtaaatcactgaacctttttttcaagaaggacaagaattttggagtctgctattaatggaccatatttattacagtttttaaattgtacaatctctgtattatagctatttgtctaacattaccccacatgtaataaataaaacaatatgagca

SEQ ID NO: 181752 - DNA, 2395 bp, Artificial Sequence
  derived and/or modified sequence
tatagtttagatgaataatgttaaagagaatactagaaaaggttttgatcctctttctgaaaacaagatggtctcaggaatggaaacttttgatggtatactattagatgattttatgacagtttaggattgggttactcttactggacaaaagttttttattttaatataggcattgagtattctgaaacatttgaagtcatacagaagaatttctcctcccgtggatctagaatatcagtatatgttggaacatgtcataactttgccatcagctgcccaaactagactgccttttcacctgatattctttggcacagcacagaacttctggaaaattctctctacagaactcagtgaagaatctttcccaacattgctcttaatttcgaaattaatgaagttctctctggacactctgtacgtgtctacagcaaaacacgttttcgaaaaaaaactgaagccaaagctcctgaagttaacacaagctaaatcctcaacactgattaacaaggaaataactaagatcacgcagaccatcgaatcctgcttactctctatagtcaacccagagtgggctgtagctattgccatcagccttgcccaggatatccctgaaggttccttcaagatatctgctttgaaattctgcctttatttagctgagagatggctacagaatatcccatcgcaggacgaaaaacgtgaaaaagccgaggctttgttgaagaagcttcatatccagtaccggcgatcgggcacagaagctgtgctcatagcccacaagctgaacactgaggaatatttaagagtgatcggaaagccagcacatcttattgtcagtctctacgaacatcctagcatcaatcaaagaattcagaattcatctggcacagattatcctgatattcatgcagcagctaaagaaatagccgaagtcaatgaaattaatttggaaaaagtctgggacatgttgttggaaaaatggctatgcccttcaacaaaacctggtgaaaaaccatcagaattatttgaacttcaagaagatgaagccctacgaagagtgcagtatctcctcctgtctcgtccaattgattatagttcaagaatgctgtttgtatttgcaacatcaactacaaccacattaggtatgcatcagttaacttttgcccatagaactcgagctcttcagtgtctcttctatttggctgacaaggaaactatagaatctctctttaaaaaacccattgaagaagtgaaatcttatttgagatgtataacttttctggcatcatttgagactttgaatatccccatcacatatgaattattttgcagcagtcctaaagaaggaatgattaagggtctgtggaaaaaccacagccacgagtccatggcagtaagattggtgactgagctgtgtttagaatacaaaatctatgacctgcagctttggaatggactcttgcaaaagcttctgggcttcaatatgattccttatctaaggaaagttttaaaagccatctccagtatccattctttatggcagagatggaggtcttgctatgttgcctaggctggtcttagaactcctgagctgaaacaatcctcctgccttggcctcccaaagtactgggattacaggttccctacttcagcaaagcgtggcagcgtgtgatacagataccactgctttcagcctcttgtcctttaagtcctgatcagctgtcagattgttctgagagtctcatcgctgtcctcgaatgtccagtctcaggtgatcttgacctgatcggagtcgccaggcagtatatccagttagaacttccggcttttgcattagcttgtctgatgctcatgccccactcagagaaaagacaccagcaaattaagaattttctgggttcctgtgaccctcaggttattttaaagcaattggaagagcatatgaacacgggccagctagcaggattttcacatcaaattagaagtctgattttgaataatatcatcaataagaaggagtttgggattttggcaaagaccaaatactttcaaatgttgaagatgcatgcgatgaataccaacaatatcactgagctagtgaactatttggcaaatgacttaagtttagatgaagcttcagtcttgataactgaatattcaaagcactgcgggaaacctgtgcctccagacactgctccctgtgaaattctgaagatgtttcttagtggattatcgtaaatcactgaacctttttttcaagaaggacaagaattttggagtctgctattaatggaccatatttattacagtttttaaattgtacaatctctgtattatagctatttgtctaacattaccccacatgtaataaataaaacaatatgagcat

SEQ ID NO: 181753 - DNA, 6630 bp, Artificial Sequence
  derived and/or modified sequence
atgtggaacgacatcgagctgctgaccaacgacgacaccggcagcggttatctgagtgtaggttctcgcaaagaacatgggactgccctttaccaagttgatttattggtcaagatcagcagtgagaaggcctcactcaaccctaaaatacaggcgtgttcactgtctgatggctttattatcgtagcagaccaatcagtgatcttgctggactccatttgtaggtccctgcagctacatttagtgttcgacacagaggtcgacgtggtgggactgtgccaggaaggcaagttcctgcttgtaggcgagagatccgggaatctacacctgattcacgtgacctcaaagcagaccctcctgaccaatgcctttgtgcagaaggccaacgatgaaaatcgccgcacataccagaatcttgtcatcgaaaaagacgggtcgaacgaaggcacctattacatgttgttactgacttacagcgggtttttttgcattactaacttgcagctgctgaaaattcagcaggcgatcgaaaacgtggacttttcaactgctaagaagctgcaggggcaaatcaaaagttcttttatatcgaccgaaaactaccataccctgggctgtttgtcactggtggctggggacctcgcatcggaagtccctgtcataattgggggtaccggcaattgtgccttctcaaaatgggagccagacagctcaaagaaaggaatgaccgtcaagaatttgattgacgccgagatcataaagggtgcaaagaaatttcagctcattgacaacttacttttcgtgctggataccgacaatgttctatctctgtgggatatttatacactcaccccagtctggaactggccaagtctgcatgttgaagagttcctgctgactacggaagccgactccccatcctcagtcacatggcaaggcattacgaatttaaagctgatcgccctgaccgcctccgctaacaaaaagatgaagaatctcatggtgtactcactcccgaccatggagattctctactctctcgaggtgtccagcgtatcctctctcgttcagacagggatttccactgacactatttatcttctagagggcgtgtgtaaaaatgatccgaagttgtccgaagactcagttagtgtcctggtccttcggtgcctgacagaggccctcccagagaaccggctgtctcggcttctgcataagcatagatttgccgaggccgaaagctttgcgatacagttcggcctcgatgtcgagcttgtatataaagtgaagtctaaccacattctggaaaagctggcactctcctccgtggacgcaagtgaacagacagagtggcagcaactggtggatgatgcgaaagagaacctccacaaaatacaggatgacgagtttgtagttaattattgcttgaaggcccaatggatcacatacgagacaacccaggagatgttgaactatgccaagaccaggctgcttaagaaggaagacaagacagccctcatttattcagacggactaaaggaggtgcttcgggctcatgcaaaattgacaactttctatggggcatttgggcctgaaaagttctctggcagctcctggatcgaattcctcaacaatgaagacgacctaaaggatatatttctgcaactgaaagagggtaacctggtgtgcgcacaatacctctggctccgacatcgcgccaatttcgaatccagattcgacgttaagatgctcgagtcccttttaaacagtatgtctgccagcgtgtctctccagaagttatgcccatggtttaaaaacgacgtgattccgtttgtgaggcgcactgtccccgaaggacagattattttagcaaaatggctcgagcaggcagccagaaatctggagctgacagacaaggctaactggcctgagaacggccttcagctggctgagatctttttcacagctgaaaagaccgacgagcttggcctcgcaagcagctggcactggatatcactcaaggactaccagaatactgaggaagtttgccagttaaggactttggtaaataatctgcgtgagctaatcactctgcatagaaagtataactgtaagctcgctctgtccgactttgagaaggagaacaccaccacgatcgttttccgaatgttcgacaaagtactggccccagaactaattccctccatcctcgaaaaatttatcagggtgtacatgagagaacatgacctccaggaagaagagttgctgttgctgtatatcgaagacttacttaataggtgttctagcaaatctactagcctgtttgagactgcctgggaagccaaggctatggcagtgattgcgtgcctctcggacactgaccttatattcgatgccgtactgaagattatgtatgctgccgtggttccctggtccgccgcagtggagcaactggttaaacagcatctggagatggatcatccgaaggttaagctcctgcaagagagttacaaattgatggagatgaagaagttgctgcgcggttatggcatacgtgaagtgaaccttctcaataaggagatcatgcgggtcgtccgctacatcctaaagcaggatgttcctagctcactggaggacgctctgaaagtcgcgcaggctttcatgctgtctgatgacgagatttatagtctacgcattattgatctcattgacagagaacagggcgaggattgcctgctcctgttgaagtcccttccccccgcagaagccgaaaagacagctgagagggtcatcatctgggcccgcctcgcgctgcaggaagagccagatcacagcaaggaaggtaaggcttggcggatgtctgtggccaaaacaagcgtggacatactcaaaattctatgcgacattcagaaggacaacttacaaaaaaaagacgaatgtgaggagatgttgaagttgttcaaagaggtcgccagtctccaggaaaacttcgaggtctttttaagttttgaggactactccaactcctccctggtcgccgacctccgcgagcagcacatcaaggctcacgaggtcgcccaggccaaacacaaacctggctccactcctgaacccatcgcagccgaggtaagaagccctagtatggagagcaagctgcaccgacaggccttggcccttcagatgtcaaaacaggagctggaagccgagctgacattgagggcactgaaggacggaaatatcaagacggcccttaaaaaatgttctgacctgttcaaataccattgcaacgctgacactggaaagctgctgttccttacttgtcaaaagctctgccagatgctcgccgataatgtccctgtgaccgtgcccgttgggctcaatttgccttccatgattcacgacttggcttcccaggctgccaccatctgttcccctgatttcctgttggacgccctggagctctgcaagcataccctgatggctgtagagttgtcccgtcaatgtcaaatggatgactgcggaatcctgatgaaagcctccttcgggacacataaggacccctacgaggagtggagttactccgatttcttcagtgaggatgggatcgttcttgagagccagatggttctgcccgtgatctatgaactaattagttctctggttccgctggctgaatcaaagcgttatccactggagtctacttcattaccctattgctcgctcaacgagggcgatggcctcgtactaccagtgatcaactctatctcggccctcctccaaaacctgcaggagtcctcacaatgggaactggctctccgcttcgtagtggggtcatttggcacctgtcttcagcatagcgtgtccaatttcatgaatgctaccttgtccgagaaactgttcggcgagacaaccctcgtgaaaagccgccacgtggttatggaacttaaggagaaggctgtcatattcatacgggagaatgccacaaccctattgcacaaggtatttaactgtaggctagttgatctcgatctggccttggggtactgcaccttactcccacagaaggacgtctttgaaaatctctggaaactgatcgataaagcatggcagaattacgacaagattctcgcgatcagcctcgtggggtcagaactggcctccctgtaccaagaaatcgagatgggactgaagttcagggaattgagcaccgatgcccagtgggggatccggttgggaaagttagggatttctttccagccagtctttagacagcatttcctgacaaagaaagatctgatcaaggccctggttgaaaatatcgatatggacaccagtctgatcctggaatactgctctacattccaacttgattgtgacgcggtgctgcaattgttcattgagaccctgctccataatacgaacgcaggacaggggcagggcgacgcgtctatggattccgccaagcgtcgccatcctaagctgttggcaaaagcactagagatggttccattgctgactagcacaaaggaccttgtgatctccctgtcaggaatcctgcacaaacttgacccctacgattatgagatgattgaagttgtgctgaaggtgatagagagagcggacgagaagatcaccaatatcaacattaatcaagctctgtctattcttaaacatctgaagtcttatagaaggatcagccctcctgtggatttggagtatcaatatatgttggagcacgtcataaccctaccctcagccgcacagactagactcccttttcacctgatttttttcgggaccgcccagaacttctggaaaatcttgtccacagagctttccgaagagtcattccccactcttctgctgatttcgaagctaatgaaattctcccttgatacactgtacgtatcaaccgcaaagcatgtctttgagaaaaagctgaaacccaagcttctcaagctgactcaagccaaaagcagcacactgattaataaggaaatcaccaaaatcacccagacaatcgagtcttgcctgctgtccatcgttaaccccgaatgggccgtggctatcgcaattagcttggctcaggatattccggaggggtcattcaagatctccgcactgaaattctgcttgtatctagccgaaaggtggctccagaatattccttctcaagatgagaaaagagagaaagcggaagcactcctgaagaagctgcacattcaatatcgaagatctgggacagaggccgttctgatcgctcacaaactcaatacagaagagtatctgagggtaatcggaaagccagctcacctgattgtgtctctgtacgaacaccctagtattaatcaaaggatccagaattccagcggcacagactacccggacattcacgccgcggcgaaggagatagctgaagtgaatgaaattaatctcgaaaaggtctgggatatgcttttggagaaatggctgtgcccttctaccaagcctggtgaaaagccctccgagttattcgaactgcaagaggacgaggcacttcgccgcgtacagtatttgttactgagccgacccatcgactatagctcccgcatgctgttcgtatttgcaacctccacgacaaccaccttaggtatgcaccagctgacgtttgcccatcgcaccagggccttgcagtgcctgttctacctggctgacaaggagactattgagtccctcttcaagaaaccaatcgaagaagtaaagagctacctccggtgtatcacgtttctcgcgagcttcgaaactctgaacatccctatcacctatgaattattctgctcctctcctaaagaagggatgatcaaagggctgtggaagaaccatagtcacgaatcaatggcagttcgcctggttaccgaactttgcctcgagtataagatttacgacctccaactctggaacggactcttgcagaaattactaggcttcaacatgatcccctatctgaggaaggtactcaaagctatttcgtctattcactcattgtggcaagtgccgtatttttctaaagcgtggcagagggtaatacagatcccgttgctgagtgccagctgcccccttagccctgatcagctgtctgactgctccgaaagcctcatcgccgtcctagagtgtcctgtttcgggggatttggatttaatcggagtagcccgccagtatattcagctcgagcttcctgccttcgctctggcctgcctaatgctgatgcctcactctgagaaacgccatcagcagattaagaactttctaggatcatgtgacccgcaagtcattctgaagcagcttgaagaacatatgaacaccgggcagctggcaggcttcagccaccagatacggtctctcatcctcaataatatcatcaacaaaaaggagttcgggatattggcgaaaacgaaatacttccaaatgcttaagatgcacgcaatgaatacgaataatatcacggaactcgtcaactacttggccaatgatctaagtctggacgaggcctcggtgttgatcactgaatactcaaagcattgtggcaaaccggtgccacctgacacagctccgtgcgaaatcctgaaaatgttcttgtccggtttaagttag

SEQ ID NO: 181754 - DNA, 6629 bp, Artificial Sequence
  derived and/or modified sequence
atgtggaacgatatcgagctgttgactaatgacgacacgggatccggctatttaagtgtcggtagcaggaaggagcatggaacagctctgtaccaagttgatctgctggttaaaatctccagcgaaaaggcctctttgaacccgaaaatccaggcgtgttctctctctgacggttttatcatagtggcagaccagagtgtaatactactggactccatttgcagatccttacagttgcacctcgtctttgacacagaggtggatgtggttgggctttgccaggaaggaaaatttcttctggtcggagagagatccggtaatctgcacctgatccacgtcacttcaaagcagaccctcctaacaaatgcgttcgttcagaaagctaacgacgaaaaccgtagaacataccagaaccttgtaattgaaaaagatggcagcaacgaaggaacctattatatgctcctgctgacctactcaggtttcttttgcatcaccaaccttcagctgctgaagattcagcaggctatcgagaacgtggacttctcgacagccaagaagctgcagggccaaattaagtccagtttcattagtacagagaactatcatacactggggtgtttaagcttggtggctggcgaccttgcatccgaggtgccagtcattatcggtggaacaggcaactgtgcattttctaagtgggaacccgattcttctaagaaaggaatgacagtgaaaaatttgattgacgcagaaattatcaagggcgcaaagaaattccagctgatcgataatcttctgttcgtgctggacacagacaacgttctctctctgtgggatatttacacactaacaccagtttggaactggccttccttgcatgttgaggagttcctgttgacaaccgaagcagactcaccatcttccgtgacctggcaaggcatcaccaatcttaaactgattgctctcactgcgtccgcaaacaagaagatgaaaaacctaatggtatacagtctccctactatggagattctttacagccttgaggtgtcaagcgtcagtagcctcgtgcagaccgggatcagcaccgatactatctatcttttagaaggagtttgcaaaaacgatcccaagctcagtgaagacagcgtgtctgtcctggtactgaggtgcctgacagaggccttgccagaaaaccgtctgagtaggttgctacataaacatcgcttcgccgaggctgagtcctttgctatccagtttgggctggatgtggagttggtatataaagtgaagagcaaccacatattagagaagttagcactttccagtgtggacgcttccgaacaaaccgaatggcagcaactggtcgatgatgccaaagaaaatctccacaagatccaagacgatgaatttgttgttaattattgccttaaagctcaatggatcacgtacgagacaacccaggaaatgctgaactacgccaagacgaggttgctgaagaaagaagacaagactgctctgatttatagcgatgggctgaaagaagtactgagagcacatgcaaaactaacaaccttctacggggctttcggcccagagaaattcagtggatccagctggatcgagtttctgaataacgaggatgatttgaaggacattttcctgcagcttaaggagggcaatcttgtttgtgcccaatatctctggctacggcaccgggctaatttcgaatcccgatttgacgtgaaaatgctcgaatctctcttgaattctatgtctgctagcgtgtctctgcagaagctctgcccatggtttaaaaacgatgtgatccctttcgtgaggcggacagtccctgagggtcagattatccttgctaaatggcttgagcaggccgcacgaaaccttgagctgacagacaaagctaactggcctgaaaatgggctccaactggctgaaatctttttcaccgcggaaaaaacagacgagctgggacttgcatcaagttggcactggatctcactgaaggactaccagaacactgaggaagtgtgtcagctccggacactcgttaataacctgagagagctgataaccctccacaggaagtacaactgtaagctggccctgagcgactttgaaaaagagaacacaaccaccatcgtcttcaggatgttcgacaaggtgttggcgccagaactgattccatccattctggagaaattcattcgagtgtatatgcgcgagcacgatttacaggaggaggaactgttgctgctgtatatcgaggacttgctcaaccgctgcagcagcaagagcacctctctatttgaaactgcctgggaagcgaaggccatggctgtgattgcgtgtctgagcgatacggatctcatctttgatgctgtcctgaagataatgtacgcagctgtggtgccatggagtgctgctgttgaacagctcgtcaaacaacacctcgagatggaccaccccaaggtgaaactgctccaggaaagctacaaactcatggaaatgaagaaactgctccgaggctacggtataagagaggtcaaccttctgaataaggagattatgcgggtggtgcgctacattcttaaacaggacgtgccaagctccctcgaagacgcactcaaggtagcccaggcattcatgttgagtgatgacgaaatttattccctgcgcatcatcgatcttatcgaccgggagcagggggaggactgcctgctgctgctgaagtctctgcccccagccgaagcagaaaaaactgccgaacgagttatcatttgggcacggctggctctgcaggaggaacccgatcactcaaaagagggtaaggcttggcgaatgagcgtggctaaaacatctgtcgacatcctgaagatcctgtgtgacattcagaaggacaacttgcagaagaaagatgaatgcgaggagatgctgaaactttttaaagaggtcgcctccttacaggagaacttcgaggtgttcctctcttttgaggactactctaattccagtctggtcgccgacttgcgggaacaacatatcaaggcccacgaagtcgcccaggcaaagcacaaaccgggatcaacaccagagccgatcgctgcagaagtacgatcacccagtatggagtccaaattacaccggcaggcactggccctacagatgtccaaacaggaactcgaggccgagcttacactgcgtgccctgaaagatggcaatattaaaacggctctgaaaaagtgttctgatctgttcaaataccactgtaatgctgataccggcaagctactgtttctcacctgccagaaattatgccagatgctggccgacaacgtgcccgttacagtcccagtgggacttaatttgccaagtatgatccatgatctcgcatcccaggcagccaccatatgctccccggactttttgttggacgctctcgagctctgcaagcataccttgatggctgtggagctgagcaggcagtgccaaatggatgactgtgggatcctcatgaaagcctcattcggaactcacaaggatccctacgaggagtggtcttattctgattttttctctgaggatggaatcgtcctcgagtcccagatggtcttaccagtaatctacgagttaattagcagcctggtcccacttgcagaatctaagagatacccccttgagagtacctcactgccttactgtagtttgaacgaaggcgatgggcttgtgctgcccgtaatcaattccatctctgcactgttgcagaacctgcaggagtctagtcaatgggagctagcattaaggtttgtggtcggctctttcggcacttgtcttcaacactccgtatccaactttatgaatgccaccctgagtgagaagctgttcggagaaacaactttggtgaaaagtagacatgtcgtaatggagctaaaggaaaaagcagtaatttttatcagagaaaacgcaacaactctgctccacaaagttttcaactgccggttggtggaccttgatctggcactgggatactgtacattactgcctcagaaagatgttttcgaaaatctttggaagttgatcgataaggcttggcagaattatgataagatattagccatatctctggtggggtccgaactagcctccctgtaccaggagatcgaaatggggctgaaatttagggagctctccaccgacgctcagtggggcatacggctgggtaagctcgggatttccttccagcccgtgtttaggcagcatttcctgaccaagaaggaccttattaaagcccttgtggaaaatatcgatatggatacctcattgatcttggagtactgtagtacttttcagctggattgcgacgccgtcctgcagctgtttattgaaaccctgctgcacaatacaaatgcgggacaggggcaaggagacgccagcatggacagcgcaaagcgcaggcacccaaaactcctggccaaggccctggagatggtgcctctccttacttcaacaaaggatctggtgatctccctttccggcatactgcacaagctggacccctacgattacgaaatgatcgaggtggttttaaaggtaatcgaacgcgctgacgagaaaataactaacatcaatattaatcaggccctcagtatcctgaaacacttaaagagttatcggagaatctccccccctgtcgaccttgaataccaatacatgctggaacacgtcatcacactccccagcgctgcgcagacaaggttgccctttcacctgatttttttcggaaccgcccagaacttttggaagatcctgagcacagagctgtccgaagaatcattccccacactgctgctcatcagcaagctgatgaaattttcactcgatacactatacgtaagcaccgctaagcacgtgttcgagaaaaagctaaagcctaagctgcttaaattaacacaagcaaagtcttctactctcatcaacaaggaaattacaaaaattacacagaccattgagtcatgcctgctgagcattgtcaacccagaatgggccgtagccattgccatctctttagcccaggacattccggagggctcgttcaaaatatcggctctgaagttctgcctgtacctggcggagaggtggttgcagaatataccgtctcaggacgaaaagcgagaaaaggccgaagccctcctgaaaaaacttcacatccagtataggcgctctgggacggaggctgttctgatcgctcacaaactgaatacagaggaatatttacgcgtgattgggaagccagcccacttaatcgtctcactgtatgagcacccaagcattaaccaaaggattcagaactcatcaggaaccgactacccggatattcacgccgcagctaaagaaatcgccgaagtgaatgagattaacctggagaaggtgtgggatatgttgctggaaaagtggctgtgtcctagtaccaaaccaggagagaaaccttccgaactcttcgagctgcaggaggacgaagctctgagacgagtgcaatacctcctgctgagcagacccatcgactactcctcaagaatgctgtttgttttcgccacctccactaccaccaccttggggatgcaccagttaaccttcgcgcatagaacccgcgctcttcagtgcctcttctatttagctgataaggaaaccattgagtccttgtttaaaaaaccaatcgaagaggtgaagtcatatttgcgatgcatcaccttcctggcttcatttgagactctgaatatcccaattacttacgagctgttttgttccagcccaaaggaaggtatgatcaaaggtctgtggaaaaatcatagtcatgagtccatggctgtgagattagtgaccgaactttgtttggagtacaagatctacgacctgcaactctggaatggattgctgcagaaacttctgggcttcaatatgatcccttatctgagaaaggtgctaaaagcaatttcttctattcatagtctatggcaggtgccttacttctctaaagcgtggcagagggttattcaaatcccattactcagcgcatcatgcccattgtccccagaccagctgtcagactgttcagagagtctgattgctgtgcttgagtgtccagtgagcggcgacctcgatcttatcggtgtggctcgacagtatatccagctggagctgcccgctttcgcgctcgcgtgtctcatgttaatgccacatagtgaaaaacgtcaccagcagattaaaaactttttaggatcctgtgatccacaagtgatactcaagcagcttgaggaacatatgaataccggacagcttgcaggcttttcacaccagattaggtctctcattctcaacaacatcattaataaaaaagagttcgggatactcgcaaaaactaaatactttcagatgttgaagatgcatgccatgaatactaacaacattacagaattagttaactacctcgccaacgacctgtccctggacgaagcttcggtattaatcactgagtatagcaagcattgtgggaagccagtcccccctgataccgcaccctgtgaaatcctgaaaatgttcctgtctgggctgtcata

SEQ ID NO: 181755 - protein, 991 aa, Artificial Sequence
  derived and/or modified sequence
MEEYEKFCEKSLARIQEASLSTESFLPAQSESISLIRFHGVAILSPLLNIEKRKEMQQEKQKALDVEARKQVNRKKALLTRVQEILDNVQVRKAPNASDFDQWEMETVYSNSEVRNLNVPATFPNSFPSHTEHSTAAKLDKIAGILPLDNEDQCKTDGIDLARDSEGFNSPKQCDSSNISHVENEAFPKTSSATPQETLISDGPFSVNEQQDLPLLAEVIPDPYVMSLQNLMKKSKEYIEREQSRRSLRGSINRIVNESHLDKEHDAVEVADCVKEKGQLTGKHCVSVIPDKPSLNKSNVLLQGASTQASSMSMPVLASFSKVDIPIRTGHPTVLESNSDFKVIPTFVTENNVIKSLTGSYAKLPSPEPSMSPKMHRRRSRTSSACHILINNPINACELSPKGKEQAMDLIIQDTDENTNVPEIMPKLPTDLAGVCSSKVYVGKNTSEVKEDVVLGKSNQVCQSSGNHLENKVTHGLVTVEGQLTSDERGAHIMNSTCAAMPKLHEPYASSQCIASPNFGTVSGLKPASMLEKNCSLQTELNKSYDVKNPSPLLMQNQNTRQQMDTPMVSCGNEQFLDNSFEKVKRRLDLDIDGLQKENCPYVITSGITEQERQHLPEKRYPKGSGFVNKNKMLGTSSKESEELLKSKMLAFEEMRKRLEEQHAQQLSLLIAEQEREQERLQKEIEEQEKMLKEKKAMTAEASELDINNAVELEWRKISDSSLLETMLSQADSLHTSNSNSSGFTNSAMQYSFVSANEAPFYLWGSSTSGLTKLSVTRPFGRAKTRWSQVFSLEIQAKFNKITAVAKGFLTRRLMQTDKLKQLRQTVKDTMEFIRSFQSEAPLKRGIVSAQDASLQERVLAQLRAALYGIHDIFFVMDAAERMSILHHDREVRKEKMLRQMDKMKSPRVALSAATQKSLDRKKYMKAAEMGMPNKKFLVKQNPSETRVLQPNQGQNAPVHRLLSRQGSICRKNPKKAAKCCDNLRRQHSLG

SEQ ID NO: 181756 - DNA, 2976 bp, Artificial Sequence
  derived and/or modified sequence
atggaggagtacgagaagttctgcgagaagagcctggccagaatccaggaggccagcctgagcaccgagagcttcctgcccgcccagagcgagagcatcagcctgatcagattccacggcgtggccatcctgagccccctgctgaacatcgagaagagaaaggagatgcagcaggagaagcagaaggccctggacgtggaggccagaaagcaggtgaacagaaagaaggccctgctgaccagagtgcaggagatcctggacaacgtgcaggtgagaaaggcccccaacgccagcgacttcgaccagtgggagatggagaccgtgtacagcaacagcgaggtgagaaacctgaacgtgcccgccaccttccccaacagcttccccagccacaccgagcacagcaccgccgccaagctggacaagatcgccggcatcctgcccctggacaacgaggaccagtgcaagaccgacggcatcgacctggccagagacagcgagggcttcaacagccccaagcagtgcgacagcagcaacatcagccacgtggagaacgaggccttccccaagaccagcagcgccaccccccaggagaccctgatcagcgacggccccttcagcgtgaacgagcagcaggacctgcccctgctggccgaggtgatccccgacccctacgtgatgagcctgcagaacctgatgaagaagagcaaggagtacatcgagagagagcagagcagaagaagcctgagaggcagcatcaacagaatcgtgaacgagagccacctggacaaggagcacgacgccgtggaggtggccgactgcgtgaaggagaagggccagctgaccggcaagcactgcgtgagcgtgatccccgacaagcccagcctgaacaagagcaacgtgctgctgcagggcgccagcacccaggccagcagcatgagcatgcccgtgctggccagcttcagcaaggtggacatccccatcagaaccggccaccccaccgtgctggagagcaacagcgacttcaaggtgatccccaccttcgtgaccgagaacaacgtgatcaagagcctgaccggcagctacgccaagctgcccagccccgagcccagcatgagccccaagatgcacagaagaagaagcagaaccagcagcgcctgccacatcctgatcaacaaccccatcaacgcctgcgagctgagccccaagggcaaggagcaggccatggacctgatcatccaggacaccgacgagaacaccaacgtgcccgagatcatgcccaagctgcccaccgacctggccggcgtgtgcagcagcaaggtgtacgtgggcaagaacaccagcgaggtgaaggaggacgtggtgctgggcaagagcaaccaggtgtgccagagcagcggcaaccacctggagaacaaggtgacccacggcctggtgaccgtggagggccagctgaccagcgacgagagaggcgcccacatcatgaacagcacctgcgccgccatgcccaagctgcacgagccctacgccagcagccagtgcatcgccagccccaacttcggcaccgtgagcggcctgaagcccgccagcatgctggagaagaactgcagcctgcagaccgagctgaacaagagctacgacgtgaagaaccccagccccctgctgatgcagaaccagaacaccagacagcagatggacacccccatggtgagctgcggcaacgagcagttcctggacaacagcttcgagaaggtgaagagaagactggacctggacatcgacggcctgcagaaggagaactgcccctacgtgatcaccagcggcatcaccgagcaggagagacagcacctgcccgagaagagataccccaagggcagcggcttcgtgaacaagaacaagatgctgggcaccagcagcaaggagagcgaggagctgctgaagagcaagatgctggccttcgaggagatgagaaagagactggaggagcagcacgcccagcagctgagcctgctgatcgccgagcaggagagagagcaggagagactgcagaaggagatcgaggagcaggagaagatgctgaaggagaagaaggccatgaccgccgaggccagcgagctggacatcaacaacgccgtggagctggagtggagaaagatcagcgacagcagcctgctggagaccatgctgagccaggccgacagcctgcacaccagcaacagcaacagcagcggcttcaccaacagcgccatgcagtacagcttcgtgagcgccaacgaggcccccttctacctgtggggcagcagcaccagcggcctgaccaagctgagcgtgaccagacccttcggcagagccaagaccagatggagccaggtgttcagcctggagatccaggccaagttcaacaagatcaccgccgtggccaagggcttcctgaccagaagactgatgcagaccgacaagctgaagcagctgagacagaccgtgaaggacaccatggagttcatcagaagcttccagagcgaggcccccctgaagagaggcatcgtgagcgcccaggacgccagcctgcaggagagagtgctggcccagctgagagccgccctgtacggcatccacgacatcttcttcgtgatggacgccgccgagagaatgagcatcctgcaccacgacagagaggtgagaaaggagaagatgctgagacagatggacaagatgaagagccccagagtggccctgagcgccgccacccagaagagcctggacagaaagaagtacatgaaggccgccgagatgggcatgcccaacaagaagttcctggtgaagcagaaccccagcgagaccagagtgctgcagcccaaccagggccagaacgcccccgtgcacagactgctgagcagacagggcagcatctgcagaaagaaccccaagaaggccgccaagtgctgcgacaacctgagaagacagcacagcctgggctag

SEQ ID NO: 181757 - DNA, 2976 bp, Artificial Sequence
  derived and/or modified sequence
atggaggaatatgagaaattctgcgagaagtccctggctcgcattcaagaggccagcctcagcacggaatctttcctgccagcccagtcagagtcgattagcctcatccggttccacggagtcgcgatactatctcctctcttgaatatcgagaaaaggaaagagatgcagcaggaaaaacagaaggcactagacgtggaggctcgaaagcaggtgaataggaagaaggcccttctcacaagggtgcaagagatcttagataacgtgcaagtccgcaaggccccaaatgctagcgacttcgatcaatgggaaatggaaactgtttatagcaattcagaggtgcgaaacttaaatgtgccggctactttcccgaattcgttcccatcacatacagagcactccactgcagccaagctagataagatcgctggaatcctgcccctcgacaatgaagatcagtgcaagaccgatgggattgacctggcacgcgactcagaaggatttaattcccccaaacagtgcgatagcagcaatatcagccacgtcgaaaatgaggcctttcccaaaacctctagtgcaactccgcaggaaaccttgatctctgatggcccattcagcgtcaacgaacagcaggatctgccactgcttgccgaggttatcccagacccgtatgtaatgtccttgcaaaacttaatgaaaaagtctaaggagtatatcgagcgcgagcaaagtagacggtccctgcgcggcagcattaataggatcgtaaacgaaagccatctcgataaagagcacgacgccgtggaggttgccgactgcgtgaaggaaaaagggcagctgaccgggaagcactgcgtctccgttatccccgacaaacccagtctgaataaaagtaacgtcctcctgcagggcgctagcacacaggcctcatctatgagtatgcctgtactggcctctttcagtaaggttgacattcctattaggactggacatccaaccgtcctggagtccaacagcgacttcaaagtcatccccacttttgtgaccgaaaacaatgtgataaaaagtttgaccggtagctatgccaagctcccctctcccgaaccttcaatgagtcctaagatgcatcgccgacgtagccggacctctagcgcttgtcacatactgattaataaccccatcaacgcctgcgaattgagcccaaaaggcaaagaacaggcaatggatcttattattcaggacacagatgagaacactaacgttcccgagattatgcccaaattgcccacggaccttgcaggtgtctgtagctccaaagtttacgtcggaaaaaataccagtgaagttaaggaggacgtcgtactcggtaaatcgaaccaggtgtgtcagtcctccggaaaccatctggagaataaagtgacccacgggttggtgactgtagaaggacagttaacgtctgacgagcgaggggcccacattatgaactcaacgtgtgccgctatgcctaaactgcacgagccttatgcaagttcccaatgcatcgcgtcaccaaatttcggaacggtatccggtctgaaaccagcaagtatgctggagaagaattgttctctgcagaccgagctgaataagtcctacgacgtgaaaaaccccagtcccctcctgatgcagaaccagaacactcgacagcagatggatacccccatggtgtcctgtggtaacgagcaatttctggataatagcttcgaaaaagtgaagaggcggctagacctggatatcgacggcttgcaaaaggagaactgtccgtacgtgatcaccagcggtattactgagcaggaaaggcagcatcttccggaaaagaggtaccctaagggcagtggctttgtcaataagaacaaaatgcttggtacttcaagtaaagaaagcgaagaattgctcaaatctaagatgctggccttcgaggaaatgcgcaagagattagaggagcaacatgcccagcagttgtctctcttgattgccgaacaggagcgcgaacaggagagactccagaaggagattgaggaacaggagaagatgctgaaagaaaagaaggccatgacagccgaagctagtgaactggacattaataacgccgtggagttggagtggagaaaaatcagcgattcaagtctgctggagacgatgctcagccaggcagacagtctgcacacctcaaatagtaatagcagcggcttcactaacagtgcaatgcagtactcctttgtgtctgcgaatgaggcacctttctacctgtggggtagctcaacctctggattaacaaagctgagtgttactcggccctttggaagggcgaagacaagatggtcccaggttttttcactcgaaattcaggctaagttcaataagatcactgcggtcgccaaggggtttctgacccgtagattaatgcagacagacaagctcaagcagctgaggcagaccgtgaaggacaccatggagttcatcaggtccttccagtcagaagccccactgaagagggggatcgtgagcgcacaggatgcctctctccaggagcgggttctggcgcagcttagggccgccctctacggtatccacgacatctttttcgttatggacgccgctgagcggatgtccattcttcaccatgatagggaagttaggaaagaaaaaatgcttagacaaatggacaaaatgaaatctcctagagtggctctttctgcagccactcagaagtcactagataggaaaaaatacatgaaggcagctgaaatggggatgccgaataaaaaattcctggttaaacagaatccaagcgagacgagagtgttgcagcctaatcaggggcagaacgctccggtccatcgattattaagtcgacagggctcaatctgcaggaagaacccaaagaaagctgcaaagtgttgcgataacctgcgccgtcagcatagcctggggtag

SEQ ID NO: 181758 - DNA, 2976 bp, Artificial Sequence
  derived and/or modified sequence
atggaagaatatgaaaagttctgcgaaaaatccctcgcgcgaattcaggaggcctcccttagcacagaaagttttctgcctgctcagagtgaaagtatctcactgattcgctttcacggggtcgctatcctttcccccttgctgaatatcgagaagaggaaagagatgcaacaagagaaacagaaggccctggacgtagaagccagaaaacaggttaatcgcaaaaaggcccttttgacacgagttcaggaaatcctcgacaacgttcaggtgaggaaggccccaaacgcatcagatttcgaccagtgggaaatggagacggtgtattctaattcagaggtcaggaatcttaatgtacccgccacctttccgaatagcttccccagccatacggagcatagcacggctgccaaactggataagatcgccggaattctccccttggacaatgaggatcagtgcaagaccgatggaatcgacttagctcgcgactccgaaggcttcaacagcccaaaacaatgtgacagtagtaacataagccatgtggagaatgaagccttccctaagacttcctccgctacgccacaagagacactgatttcagacggaccattttctgtcaacgaacagcaagatcttccactcctggccgaagttataccagacccttatgttatgtctctgcagaacctcatgaagaagtcgaaagagtacatagaaagggaacagtccaggaggtccctgagagggagcattaaccgaattgtgaacgaaagtcacttggataaggaacacgatgcggtcgaagtcgccgactgtgtcaaggaaaagggccagctcaccggtaagcactgcgtgtctgtgattccagacaaacccagtctgaacaaaagcaacgtgcttcttcagggggccagcacccaggcttccagtatgtccatgcctgtactggctagcttctccaaggtggacatcccaatcagaaccggacaccctacagtgcttgagagtaactctgatttcaaagtgatccctaccttcgtgacagaaaataatgtgattaaatcgctcacaggcagctacgcgaagcttccatctcccgaaccaagcatgtcccctaaaatgcaccgaaggcgtagtagaacatcaagtgcttgccacatcctgatcaataaccctatcaacgcctgtgagctgtcacctaaggggaaagaacaggcgatggatctgatcattcaagataccgacgagaatactaacgtcccagaaattatgccaaaactaccgaccgacttggcaggggtttgtagcagcaaagtttacgttggtaagaacactagtgaagtaaaggaagacgtggttctaggtaaaagcaaccaagtatgccaatcctcagggaaccacttagagaacaaagtgactcacgggttagtcacagtcgagggacagcttacctcggatgagcgcggagcccacattatgaattcaacctgcgctgccatgcccaaactgcacgagccatacgccagttcccaatgcattgcttcaccaaatttcgggacagtttctggcctgaagccagcctcgatgctcgagaaaaattgctcactgcaaaccgaattgaataagagctacgacgtcaaaaatccttctccactgttgatgcaaaatcagaataccagacagcagatggacactcctatggtgagctgcggaaacgagcagtttttggataacagttttgagaaggttaaaaggaggctggatctggatattgacggtcttcagaaggaaaattgcccatacgtgatcacctcaggcataacagagcaggagaggcagcacctgcccgagaagcgctatcctaaagggtccggattcgtcaacaaaaataagatgttgggtacgtcatcaaaggagagcgaggagcttctcaagtccaaaatgctggccttcgaggagatgaggaaaaggctagaggagcagcacgcccaacagctgtctctcctgattgctgagcaggaacgcgagcaggagaggctgcagaaggaaatcgaggaacaggaaaaaatgctgaaagagaagaaagcgatgacggcagaggccagcgagctcgacatcaataacgcagtggagctggagtggaggaaaataagtgacagctcacttctggaaactatgttaagtcaggcggattcactccacacaagtaattccaattcttccgggttcacaaatagcgccatgcagtacagctttgtcagcgccaacgaagccccgttctatctttggggatcgtccacttcaggcctgacgaagctgtcagtcacaagaccattcggtcgggcgaagaccaggtggtcgcaagtcttctcgctcgagatccaagccaaattcaacaagatcactgcagtcgccaaaggctttctgacgcggagactgatgcagaccgataagttaaaacagttaaggcagacagtcaaggataccatggaattcattcggtcttttcagagcgaagcgcctttgaaacggggcatcgtttcagcccaggatgccagtctgcaggaaagagtgctggcccagctccgagctgcactgtacggaattcacgatatttttttcgttatggatgccgccgagaggatgtcgattctccaccacgatcgtgaggtacggaaagaaaaaatgctgcgccagatggataaaatgaagagccctcgggtggccctctcagcggctactcagaaatcacttgatcgcaaaaagtacatgaaagccgccgaaatgggtatgcctaacaagaagtttctcgtgaagcagaacccctccgagacccgagtgctgcagccaaaccaggggcagaatgcaccggtccacagactcctgtccaggcaggggtcaatctgccgcaagaacccaaaaaaagccgccaagtgctgtgacaatttacgccgccagcattcactgggctag

SEQ ID NO: 181759 - DNA, 2976 bp, Artificial Sequence
  derived and/or modified sequence
atggaggagtatgagaagttctgtgagaagagcctggcccgcatccaggaggccagcctgagcacagagagcttcctgcctgcccagagcgagagcatcagcctcatccgcttccatggagtggccatcctgagccccctgctgaacatcgagaagaggaaggagatgcagcaggagaagcagaaggccctggatgtggaggccaggaagcaggtgaacaggaagaaggccctgctgaccagggtgcaggagatcctggacaacgtgcaggtgaggaaggccccaaatgccagtgactttgaccagtgggagatggagaccgtgtacagcaacagcgaggtgaggaacctgaatgtgcctgccaccttccccaacagcttccccagccacacagagcacagcacagctgccaagctggacaagattgctggcatcctgcccctggacaatgaagaccagtgcaagacagatggcatcgacctggcccgggacagcgagggcttcaacagccccaagcagtgtgacagcagcaacatcagccacgtggagaatgaggccttccccaagaccagcagcgccaccccccaggagaccctcatcagtgatggccccttctctgtgaatgagcagcaggacctgcccctgctggccgaggtgatcccagacccctacgtgatgagcctgcagaacctgatgaagaagagcaaggagtacatcgagcgggagcagagcagaagaagcctgcggggcagcatcaacagaattgtgaatgaaagccacctggacaaggagcatgatgctgtggaggtggccgactgtgtgaaggagaagggccagctgaccgggaagcactgtgtgtctgtcatcccagacaagcccagcctgaacaagagcaatgtgctgctgcagggcgccagcacccaggccagctccatgtccatgcctgtgctggccagcttcagcaaggtggacatccccatcagaacaggccaccccaccgtgctggagagcaacagcgacttcaaggtgatccccacctttgtgacagagaacaacgtcatcaagagcctgaccggcagctatgccaagctgcccagccctgagcccagcatgagccccaagatgcacagaagaagaagcaggaccagcagcgcctgccacatcctgatcaacaaccccatcaatgcctgtgagctgagccccaagggcaaggagcaggccatggacctgatcatccaggacacagatgagaacaccaacgtgcctgagatcatgcccaagctgcccacagacctggccggcgtgtgcagcagcaaggtgtatgtgggcaagaacaccagcgaggtgaaggaggatgtggtgctgggcaagagcaaccaggtgtgccagagcagcggcaaccacctggagaacaaggtgacccacggcctggtgacagtggagggccagctgaccagtgatgagcggggggcccacatcatgaacagcacctgtgccgccatgcccaagctgcacgagccctatgccagcagccagtgcatcgccagccccaactttggaacagtgtctggcctgaagccagcctccatgctggagaagaactgcagcctgcagacagagctgaacaagagctatgatgtgaagaaccccagccccctgctgatgcagaaccagaacacccggcagcagatggacacccccatggtgtcctgtggaaatgagcagttcctggacaacagctttgagaaggtgaagaggcggctggacctggacattgatggcctgcagaaggagaactgcccctacgtgatcaccagcggcatcacagagcaggagcggcagcacctgcctgagaagcgctaccccaagggcagcggctttgtgaacaagaacaagatgctgggcaccagcagcaaggagagcgaggagctgctgaagagcaagatgctggcctttgaggagatgaggaagaggctggaggagcagcacgcccagcagctgagcctgctgattgctgagcaggagcgggagcaggagcggctgcagaaggagattgaggagcaggagaagatgctgaaggagaagaaggccatgacagctgaggccagcgagctggacatcaacaatgctgtggagctggagtggaggaagatcagtgacagcagcctgctggagaccatgctgagccaggccgacagcctgcacaccagcaacagcaacagcagcggcttcaccaacagcgccatgcagtacagctttgtgtctgccaatgaggcccccttctacctgtggggcagcagcaccagcggcctgaccaagctgtctgtgacccggcccttcggccgggccaagacccgctggagccaggtgttcagcctggagatccaggccaagttcaacaagatcacagctgtggccaagggcttcctgacccggcggctgatgcagacagacaagctgaagcagctgcggcagacagtgaaggacaccatggagttcatccgctccttccagagcgaggcccccctgaagaggggcatcgtgtctgcccaggatgccagcctgcaggagcgggtgctggcccagctgcgggccgccctgtatggcatccatgacatcttctttgtgatggatgctgctgagaggatgagcatcctgcaccacgaccgggaggtgaggaaggagaagatgctgcggcagatggacaagatgaagagcccccgggtggccctgtctgctgccacccagaagagcctggacaggaagaagtacatgaaggctgctgagatgggcatgcccaacaagaagttcctggtgaagcagaaccccagcgagaccagggtgctgcagcccaaccagggccagaatgcccctgtgcaccggctgctgagccggcagggcagcatctgcaggaagaaccccaagaaggccgccaagtgctgtgacaacctgcggcggcagcacagcctgggctag

SEQ ID NO: 181760 - DNA, 5252 bp, Artificial Sequence
  derived and/or modified sequence
taatatggcggggaggaggaggagaaggcggcggcggaccgagctgcgctctgtcagtaccatttgagccattcgcttcctgacaaggcccgtggcgaggggagaggagctgaaggggccgtgggggatcagtgtgactgtgggaagatggaggagtatgagaagttctgtgaaaaaagtcttgccagaatacaagaagcatcactatccacagagagctttctccctgctcagtctgaaagtatctcacttattcgctttcatggagtggctatcctttctccactgcttaacattgagaaaagaaaggaaatgcaacaagaaaagcagaaagcacttgatgtagaagcaagaaagcaggttaacaggaagaaagctttactgactcgtgtccaggagattcttgacaatgttcaggttagaaaagcacctaatgccagtgattttgatcagtgggagatggaaacagtttactctaattcagaagtcagaaacttgaatgttcctgctacatttccaaatagctttccaagccatacggaacactctactgcagcaaagcttgataagatagctgggattttgccattggataatgaggaccaatgtaaaactgatggaatagacttagctagagattcagaaggatttaattctccgaagcaatgtgatagttccaatattagtcatgtagaaaatgaagcttttccaaagacctcttcagcaaccccacaagaaactcttatttctgatggtcccttctcagtaaatgaacaacaggatctaccacttttggcagaagtcatcccagatccctatgtaatgagtcttcagaatctgatgaaaaagtcaaaggaatatatagaaagagaacaatctagacgcagtctgagaggtagtatcaacagaattgttaatgagagtcatttagacaaagaacatgatgctgttgaagtggctgactgtgtaaaagagaaaggccagttgacaggcaaacactgtgtctcagttattcctgacaaaccaagccttaataaatcaaatgttcttctccaaggtgcttccactcaagcaagcagcatgagtatgccagttttagctagcttttcgaaagtggacatacctatacgaactggccatcccactgttctagagtctaattctgattttaaagttattcccacttttgttaccgaaaataatgttatcaaaagtcttacaggttcatatgccaaattacctagtccagagccaagtatgagtcctaaaatgcaccgaagacgttccaggacatcatcagcgtgtcatatacttataaataacccaataaatgcctgtgaattaagccctaaaggaaaagaacaggcaatggacttaattattcaagatactgatgaaaacacaaatgtgcccgaaattatgccaaagttaccaactgatttagcgggagtttgttcaagcaaggtttatgtgggcaaaaatacatctgaagtcaaagaagatgtggttttaggtaaatcaaatcaggtatgtcaatcttcaggaaatcatttagaaaataaagttactcatggacttgttactgtggaaggtcagttaacatccgatgagagaggcgcacacataatgaacagtacctgtgctgcgatgccaaagctgcatgaaccatatgccagcagtcagtgtatagcaagtccaaactttggaactgtgagtggactcaagccagccagtatgttagagaaaaactgcagtttgcaaacagaactgaataagtcttatgatgtaaaaaacccttctcctttattgatgcaaaaccagaatacgagacagcagatggacacacctatggtgtcctgtggaaatgaacaatttttggataacagttttgagaaagttaaacggagacttgatttagatattgatggtttgcaaaaagaaaactgcccttatgtcataacaagtggaataactgaacaagaaaggcaacatttgccagaaaaaagataccctaagggatctggcttcgttaacaagaataaaatgttaggaactagttccaaagaaagcgaggagttactaaaaagcaagatgttagcttttgaagaaatgcggaagagactagaagaacagcacgcccagcaattatcactactcatagctgagcaggaaagggaacaagaaagactgcaaaaggaaatagaagagcaggagaaaatgttaaaagagaagaaggcaatgacagcggaagcctctgagttggacattaacaatgcagtggaattagaatggagaaaaataagtgactctagtttgctggaaacaatgctgtctcaagcggactcactccatacttcaaattcaaatagttctggtttcacaaattctgccatgcaatatagctttgtttctgcaaacgaagcaccattctacctctggggatcatcaactagtggcttgaccaaactctcagtaacaaggccttttggaagagccaaaactagatggtctcaagtttttagtctggaaatacaagcaaaatttaacaaaataactgcagtggcaaaaggatttcttactcgtagacttatgcagacagataagctgaagcaacttcgacaaactgtaaaagatactatggaattcataagaagttttcagtcagaagcaccattaaagagaggcattgtttcagctcaagatgcttcacttcaggaaagagtgttagctcagttgcgagctgccttgtacggtattcatgacatattctttgtaatggatgcagctgaaagaatgtctattctacatcatgatcgagaagttcgcaaagagaaaatgctcaggcaaatggataaaatgaaaagtccacgagtggctctttcagctgcaacacagaagtctcttgataggaagaaatacatgaaagctgctgaaatgggaatgccaaataagaaatttctggttaaacaaaatccttctgaaacaagagtccttcagccaaaccaaggacagaatgcacctgttcataggctacttagtagacaagggagtatatgcaggaaaaatccaaagaaagcggccaaatgttgcgacaatttaagaagacaacattcattaggataaaatggggggaaggattattattcatgttattttccctgcccaagactttatttaaccctggactccgtttacacagacaaagtgacatcagaaggctgagcacttatctggatcatttggtcagtttggtaattcctgctccacacccctattttcctcttaataatacgtttgggtgaagacaaattagtgtttagtaattgcatcatctctgtgcttacctatacaaacataagtttattttatatgcccagatgtctacagagaccctttttgtaaatgtcaaggacatttggatttacttttacagaatattgaaaagataagacaaattataaataagttctaaaacataaatttaattcatctctgcatagtgatttttgaatttgattcaaagggaaattattgcagaagaatgcctttccctcattttataactttaaaaacttggattaaccactcaatgtccactttctttgacttacagtataaccatgtagccaattgtggcccactaaaatctacagaagttaatgtgggtcaccattttggtcagaagcatacattcctgtcagacaactagttgtctgacagaaatgttaggcttcatgtatgttaccccagtactgttagaaacatttgtactaggttataagatctttctgtgacaggtaacaaatttggggaagacagcacaatcttcttgaatgtagctcttgggaatgcattattacatccatttctgtaacataataatatgttgcatgcagttatattttctatttagtctgtatattttgttcttcatagtctgttttttctagcatgcttgatttaggagagaataaagggctatataataataaatccagatttccggataagaatattgcctggttaaaattctgcattgcttaaagacacccatgtttaagatttttcatcactaacatatccattaaaagtatcaactggccaggcagggtggctcacgcctgtactcccagcattttgtgaggccaaggtgggtggatcacctgaggtcaggagtttgagaccagcctgaccaaacatggcgaaaccccatctgtactgaaaatacaaaaattaggcatggtggtgcatgcctgtagttccagctacttgggaggctgagacaggcgaattgcttgaacctgggaggcagaggttgcagtgagctgagactgtgccattgcactccagtcgggttaacagagcaagacactgtctcaaaaaaaaaaaaaaaaaaaagtatcaaccaacaaatgttaccaagataacgtgacttcatgagggagaatgtcactattaatttatcataccatttccaaaaagggctttgtgcttttcacataaaattgagacagtgtatatttaatctaatttaaattttaaagagatactggtattttgaaaatgcaacctatatatattcttaatatccttttaagaatatggagatgaagattgttttctccaattttctgtgccattttaaatttaactttgacatccagctatagacagaaataataagccaccctgggtgtaaacttgattttctttattgagatgtatcatgtattgaatgagtgaaccagaaaattagaagatggtcaaaaaaagtccaagttaccaattttttaaaatttataggcaaagtatcaaattgtcttcttaatatgataaactgtgctttatcattctgaaaactcaggatacagcttattcatagcattgtgggtctctccagtaagaaagatgctaaaagttttgtgcactttttgtgtgtgtaatgcaaattagttaaaacaaatagttttggagaaagttaaaactagctttagagtaaggatgagaaacttgagtgtttttaatttaaagataaaagcctgtgttttacacattcttttttggtgttcatagcttcttctcatacaggtgccagacactgtttgtgcttttgatggatttttatttatatactttttttgcttatttttactttgagtggaatgttcattaatgtaaattgtatttatttttatacttttattttcactagttttgcttctaggcaaaaagcaaaataaacttttcatctt

SEQ ID NO: 181761 - DNA, 5474 bp, Artificial Sequence
  derived and/or modified sequence
ggccctgagaggtggagtcggggtggcagcggcggcggttgccaggagcccgcgttgcagcctgagatccgtaatatggcggggaggaggaggagaaggcggcggcggaccgagctgcgctctgtcagtaccatttgagccattcgcttcctgacaaggcccgtggcgaggggagaggagctgaaggggccgtgggggatcagtgcctgctgtgtgctgatactgttctgtgtaatggggattcagtgaacaagactgaaaaggtacctgtacttatggcgcttacattttggtggaggaagacagacaaaaatcaaggaaataaacacgataatttcagatagtgtgtgactgtgggaagatggaggagtatgagaagttctgtgaaaaaagtcttgccagaatacaagaagcatcactatccacagagagctttctccctgctcagtctgaaagtatctcacttattcgctttcatggagtggctatcctttctccactgcttaacattgagaaaagaaaggaaatgcaacaagaaaagcagaaagcacttgatgtagaagcaagaaagcaggttaacaggaagaaagctttactgactcgtgtccaggagattcttgacaatgttcaggttagaaaagcacctaatgccagtgattttgatcagtgggagatggaaacagtttactctaattcagaagtcagaaacttgaatgttcctgctacatttccaaatagctttccaagccatacggaacactctactgcagcaaagcttgataagatagctgggattttgccattggataatgaggaccaatgtaaaactgatggaatagacttagctagagattcagaaggatttaattctccgaagcaatgtgatagttccaatattagtcatgtagaaaatgaagcttttccaaagacctcttcagcaaccccacaagaaactcttatttctgatggtcccttctcagtaaatgaacaacaggatctaccacttttggcagaagtcatcccagatccctatgtaatgagtcttcagaatctgatgaaaaagtcaaaggaatatatagaaagagaacaatctagacgcagtctgagaggtagtatcaacagaattgttaatgagagtcatttagacaaagaacatgatgctgttgaagtggctgactgtgtaaaagagaaaggccagttgacaggcaaacactgtgtctcagttattcctgacaaaccaagccttaataaatcaaatgttcttctccaaggtgcttccactcaagcaagcagcatgagtatgccagttttagctagcttttcgaaagtggacatacctatacgaactggccatcccactgttctagagtctaattctgattttaaagttattcccacttttgttaccgaaaataatgttatcaaaagtcttacaggttcatatgccaaattacctagtccagagccaagtatgagtcctaaaatgcaccgaagacgttccaggacatcatcagcgtgtcatatacttataaataacccaataaatgcctgtgaattaagccctaaaggaaaagaacaggcaatggacttaattattcaagatactgatgaaaacacaaatgtgcccgaaattatgccaaagttaccaactgatttagcgggagtttgttcaagcaaggtttatgtgggcaaaaatacatctgaagtcaaagaagatgtggttttaggtaaatcaaatcaggtatgtcaatcttcaggaaatcatttagaaaataaagttactcatggacttgttactgtggaaggtcagttaacatccgatgagagaggcgcacacataatgaacagtacctgtgctgcgatgccaaagctgcatgaaccatatgccagcagtcagtgtatagcaagtccaaactttggaactgtgagtggactcaagccagccagtatgttagagaaaaactgcagtttgcaaacagaactgaataagtcttatgatgtaaaaaacccttctcctttattgatgcaaaaccagaatacgagacagcagatggacacacctatggtgtcctgtggaaatgaacaatttttggataacagttttgagaaagttaaacggagacttgatttagatattgatggtttgcaaaaagaaaactgcccttatgtcataacaagtggaataactgaacaagaaaggcaacatttgccagaaaaaagataccctaagggatctggcttcgttaacaagaataaaatgttaggaactagttccaaagaaagcgaggagttactaaaaagcaagatgttagcttttgaagaaatgcggaagagactagaagaacagcacgcccagcaattatcactactcatagctgagcaggaaagggaacaagaaagactgcaaaaggaaatagaagagcaggagaaaatgttaaaagagaagaaggcaatgacagcggaagcctctgagttggacattaacaatgcagtggaattagaatggagaaaaataagtgactctagtttgctggaaacaatgctgtctcaagcggactcactccatacttcaaattcaaatagttctggtttcacaaattctgccatgcaatatagctttgtttctgcaaacgaagcaccattctacctctggggatcatcaactagtggcttgaccaaactctcagtaacaaggccttttggaagagccaaaactagatggtctcaagtttttagtctggaaatacaagcaaaatttaacaaaataactgcagtggcaaaaggatttcttactcgtagacttatgcagacagataagctgaagcaacttcgacaaactgtaaaagatactatggaattcataagaagttttcagtcagaagcaccattaaagagaggcattgtttcagctcaagatgcttcacttcaggaaagagtgttagctcagttgcgagctgccttgtacggtattcatgacatattctttgtaatggatgcagctgaaagaatgtctattctacatcatgatcgagaagttcgcaaagagaaaatgctcaggcaaatggataaaatgaaaagtccacgagtggctctttcagctgcaacacagaagtctcttgataggaagaaatacatgaaagctgctgaaatgggaatgccaaataagaaatttctggttaaacaaaatccttctgaaacaagagtccttcagccaaaccaaggacagaatgcacctgttcataggctacttagtagacaagggagtatatgcaggaaaaatccaaagaaagcggccaaatgttgcgacaatttaagaagacaacattcattaggataaaatggggggaaggattattattcatgttattttccctgcccaagactttatttaaccctggactccgtttacacagacaaagtgacatcagaaggctgagcacttatctggatcatttggtcagtttggtaattcctgctccacacccctattttcctcttaataatacgtttgggtgaagacaaattagtgtttagtaattgcatcatctctgtgcttacctatacaaacataagtttattttatatgcccagatgtctacagagaccctttttgtaaatgtcaaggacatttggatttacttttacagaatattgaaaagataagacaaattataaataagttctaaaacataaatttaattcatctctgcatagtgatttttgaatttgattcaaagggaaattattgcagaagaatgcctttccctcattttataactttaaaaacttggattaaccactcaatgtccactttctttgacttacagtataaccatgtagccaattgtggcccactaaaatctacagaagttaatgtgggtcaccattttggtcagaagcatacattcctgtcagacaactagttgtctgacagaaatgttaggcttcatgtatgttaccccagtactgttagaaacatttgtactaggttataagatctttctgtgacaggtaacaaatttggggaagacagcacaatcttcttgaatgtagctcttgggaatgcattattacatccatttctgtaacataataatatgttgcatgcagttatattttctatttagtctgtatattttgttcttcatagtctgttttttctagcatgcttgatttaggagagaataaagggctatataataataaatccagatttccggataagaatattgcctggttaaaattctgcattgcttaaagacacccatgtttaagatttttcatcactaacatatccattaaaagtatcaactggccaggcagggtggctcacgcctgtactcccagcattttgtgaggccaaggtgggtggatcacctgaggtcaggagtttgagaccagcctgaccaaacatggcgaaaccccatctgtactgaaaatacaaaaattaggcatggtggtgcatgcctgtagttccagctacttgggaggctgagacaggcgaattgcttgaacctgggaggcagaggttgcagtgagctgagactgtgccattgcactccagtcgggttaacagagcaagacactgtctcaaaaaaaaaaaaaaaaaaaagtatcaaccaacaaatgttaccaagataacgtgacttcatgagggagaatgtcactattaatttatcataccatttccaaaaagggctttgtgcttttcacataaaattgagacagtgtatatttaatctaatttaaattttaaagagatactggtattttgaaaatgcaacctatatatattcttaatatccttttaagaatatggagatgaagattgttttctccaattttctgtgccattttaaatttaactttgacatccagctatagacagaaataataagccaccctgggtgtaaacttgattttctttattgagatgtatcatgtattgaatgagtgaaccagaaaattagaagatggtcaaaaaaagtccaagttaccaattttttaaaatttataggcaaagtatcaaattgtcttcttaatatgataaactgtgctttatcattctgaaaactcaggatacagcttattcatagcattgtgggtctctccagtaagaaagatgctaaaagttttgtgcactttttgtgtgtgtaatgcaaattagttaaaacaaatagttttggagaaagttaaaactagctttagagtaaggatgagaaacttgagtgtttttaatttaaagataaaagcctgtgttttacacattcttttttggtgttcatagcttcttctcatacaggtgccagacactgtttgtgcttttgatggatttttatttatatactttttttgcttatttttactttgagtggaatgttcattaatgtaaattgtatttatttttatacttttattttcactagttttgcttctaggcaaaaagcaaaataaacttttcatcttaaagaaaa

SEQ ID NO: 181762 - DNA, 2976 bp, Artificial Sequence
  derived and/or modified sequence
atggaggagtacgagaagttctgcgagaagagcctggcccggatccaagaagccagcctgagtacagagtcctttttgccagcccagagcgagtccatttctctgatcaggtttcacggcgttgctatcctctcaccactgctgaatatagaaaaacgcaaggagatgcagcaagagaaacagaaagcactggacgtcgaggcccgaaaacaggtgaataggaaaaaagcactcttaacccgggtccaggagatcttagacaacgttcaggttaggaaggctccaaacgcctcagattttgatcagtgggagatggagaccgtgtacagtaacagtgaggtgaggaacctcaatgtgcccgccacttttccaaactcctttccctctcacacagagcactctacagcagcaaaactggacaagatcgcggggatcctgccgctcgataacgaggaccagtgtaagaccgatgggatcgacctggccagagacagcgaaggtttcaattccccaaagcagtgcgattcatccaacattagccatgttgagaacgaggcgttcccgaagacaagctccgccacaccacaggagaccctcataagtgacggacctttttcagtcaatgaacagcaagacctgccactactcgctgaagttatccccgatccctatgtgatgagcctgcaaaatttgatgaaaaagagcaaggaatacatcgaacgcgaacagtctaggcgatctctgcggggcagtattaacagaattgtgaacgagagccatctggataaagaacacgacgctgtggaggtcgctgattgtgtgaaagaaaaggggcagctgaccggcaagcactgcgtgtccgtgatccctgacaaaccatcactgaacaaatctaacgtgctgctccaaggagccagtacccaggcttcctccatgagcatgcccgtgctggccagctttagcaaggtggatattcccatcaggacaggacatcctaccgtcctcgagagcaactccgactttaaggtaatcccaacatttgtgaccgaaaataatgtcattaagtcactgactggtagttacgcaaaactaccttctcccgagccaagtatgtctccaaagatgcatagacggagatctcgaacgtcctccgcctgccacatcctgataaacaaccccataaacgcctgcgaactgtctccaaaggggaaagaacaggctatggatcttatcatccaggacactgacgaaaacactaacgtaccggaaattatgcccaaactgcctacagacttagccggtgtctgctcgtcaaaagtctacgtagggaagaacacttcagaggtaaaagaggatgtggttctggggaaatctaaccaggtgtgccaatcatcgggcaatcacttagaaaataaggtgacacatggtcttgtgaccgtcgaagggcaattgacctctgatgagcggggagcccacattatgaattcaacctgcgctgccatgccaaagttgcatgaaccttatgctagttcacaatgtatagccagtcccaattttggcaccgttagcggcctgaaacccgcctctatgctagagaaaaattgtagcctgcagaccgaactgaataagtcctatgatgtgaagaacccaagtcccctgttaatgcagaatcagaataccaggcaacagatggatacaccaatggtctcctgtggaaatgagcagttcctcgacaatagcttcgagaaggtaaagaggcgccttgatctggatatagacgggcttcagaaagaaaattgcccttatgtgataacatccggcattactgaacaggagaggcaacatttacccgagaagcgctaccctaaaggatcgggattcgtcaacaagaataaaatgttggggacaagctctaaggagtccgaggaattgctgaaaagcaaaatgttggcattcgaggagatgcgaaaacggctggaagagcagcacgcccagcagctctcactgctgatagccgagcaggaacgggagcaggagaggctgcaaaaggagatagaggaacaggagaagatgctgaaggagaaaaaggccatgactgcggaggcttccgagctcgatattaacaacgccgtcgagttagaatggaggaaaatcagcgatagcagtctcttggaaacaatgcttagccaggctgattctttacacaccagcaattctaatagttccggctttacaaactccgcgatgcagtactcattcgtgagcgcaaacgaggcgcctttctacttgtggggaagctccacgagcgggctgaccaagctatctgtgactaggccgtttggcagggctaagaccaggtggtcgcaggtcttttcgctggaaattcaggctaagttcaacaagattaccgcggttgcaaaagggtttctgactcggcgactcatgcaaaccgacaagctcaaacagttgcgccagacagttaaggatactatggagtttataaggagttttcagagcgaagcaccgctgaagcggggcatcgtttcagcccaggacgcctcgcttcaggaacgggtcctggctcagctgcgagcagccctgtacgggattcatgacatcttcttcgttatggacgccgcagagcggatgagcatccttcaccacgatcgcgaagtgcgcaaagagaagatgttgcgtcagatggacaagatgaagtcaccgagggttgctttgagcgctgccacacaaaagagccttgacaggaagaagtacatgaaggctgccgaaatggggatgcctaataagaaattcttagtaaaacagaacccaagtgaaacgagggtgctccagcctaatcagggtcagaacgccccagtgcaccgcctcctgagtcggcagggatctatttgccgcaagaatccaaagaaggctgccaaatgctgtgacaacctacgacgccagcatagcttaggatag

SEQ ID NO: 181763 - DNA, 2976 bp, Artificial Sequence
  derived and/or modified sequence
atggaggagtacgagaagttctgcgagaagagcctggcccggatccaggaagctagcctcagcactgagtcattcttgcctgcgcagtccgaaagtataagcttgatccgctttcacggcgtggctattctatcaccgttgctgaacatagagaagcggaaggaaatgcaacaggaaaagcagaaggccctcgacgtcgaggctcgtaaacaggtgaataggaagaaggccttgctaacaagagttcaggagattcttgataatgttcaggtgagaaaagcaccgaacgccagcgattttgatcagtgggaaatggagacggtgtattccaacagtgaggtgcggaacctgaatgtacccgcgacttttcctaactctttccctagtcatacagagcacagcaccgcagcaaaactggacaagattgcaggtatcttgcctctggataacgaagaccaatgtaaaaccgatggcattgatcttgcacgcgatagtgaggggttcaactcccccaaacaatgcgacagctccaacattagtcacgtggaaaatgaggcattccctaaaacctcatctgcaactccccaggagacactaatctcggacgggcctttttctgtcaacgagcaacaggatctgcctctcctggccgaggtcatccctgatccgtacgtgatgtctcttcagaacctgatgaaaaaatctaaggagtacattgagagagagcaatccaggaggagccttagaggttccatcaaccgcatcgttaacgagtcacatctggacaaagagcacgatgcagtcgaggtggcagattgtgttaaagaaaagggccagcttacaggaaaacattgcgttagcgtcatcccggacaagcctagtttaaacaaatcaaacgttcttctgcagggggcttcaacacaagccagctctatgtctatgcctgttttggcaagtttctccaaggtggacatacccattcgcacaggccatcccaccgtgttggagtccaattccgattttaaagttattcctacttttgtcaccgaaaacaatgtcatcaaaagcttaaccggaagctacgcaaaactcccatcccctgagccctccatgtcacccaagatgcacagaagacgcagtaggacgagcagcgcttgccacattttaatcaacaatcctattaacgcctgcgaactctcccctaaaggtaaagagcaggctatggacttgatcatccaagatacagatgagaatacaaatgtgcccgaaataatgcccaagcttccgactgacctagccggtgtgtgttcatccaaggtgtatgtgggcaagaacacctccgaggtcaaggaggacgtcgtgctgggtaagtccaaccaggtctgccagtcgagcggcaaccacctggaaaataaggtaacccacggcttggtgacagttgaaggacaactgacatccgacgagcggggggcccacatcatgaatagtacttgtgcagccatgccaaagttgcatgaaccctatgcatcttctcagtgtatcgcgagccccaatttcggaacagtgtccggattgaagcccgcctccatgctcgagaagaattgtagtctccagaccgaactaaataaaagctacgatgtcaagaacccgtctccattgctcatgcagaatcagaacactaggcagcagatggacacgcctatggtgtcctgcggtaatgaacagtttcttgataactccttcgaaaaggtcaaaagacgtctcgatctggacatagacggactccaaaaagagaattgcccatatgttatcacaagcggcataactgagcaggaacggcaacatctgccggaaaagcgatacccaaaaggaagcggctttgttaataagaacaagatgctcggtaccagttcaaaggaaagtgaggagctcctgaagtccaagatgcttgccttcgaggaaatgcgtaagcggttggaagagcagcatgcacagcagttaagcctactcatcgccgagcaggaacgcgagcaggagcgcctccaaaaagagatcgaggaacaagaaaaaatgctgaaggagaagaaagccatgaccgccgaggcgagtgaactcgacattaataatgccgtagagctggaatggagaaagatttccgactcatcgttgctcgagacaatgctctcccaggctgattcccttcatactagtaacagcaattctagcggatttactaatagcgcaatgcagtacagcttcgtgtcagccaatgaggcacccttttatttgtgggggtcctccactagtggcctgaccaagctcagcgtaacacggcctttcggtcgagccaaaacaaggtggtctcaggttttttccctggaaatccaggctaagtttaacaaaattaccgcagtcgcgaaaggctttttgacaagaagactgatgcagaccgataagcttaaacaacttagacagactgtcaaggacacaatggagtttatccgatcattccagtccgaggcccctctgaaacggggaattgtatctgctcaggatgcgtctctgcaggagagagtgctggctcagctgcgggctgcattgtatggaatccatgacatcttcttcgttatggacgccgctgagaggatgagcatactgcatcatgatagggaagttaggaaagaaaaaatgctccgccagatggacaagatgaaatcccctcgcgtggctctgtctgccgctacccagaaaagcctggatcgaaagaagtatatgaaagccgcggaaatgggcatgcccaacaagaaattcttagtcaaacagaaccctagtgaaacacgggtactgcagcctaaccagggccagaatgctcctgttcatagactgttatcacggcaagggtccatctgcagaaagaatccgaaaaaagctgcaaaatgctgtgacaatcttcgtcgccaacactccctgggatag

SEQ ID NO: 181764 - DNA, 2976 bp, Artificial Sequence
  derived and/or modified sequence
atggaggaatacgagaagttctgcgaaaagagcctcgctaggattcaagaggcttcactctccacagagagcttccttcccgcacagagcgaatccatcagcctgatccgttttcacggagtggccatcctgagtcctctgttgaatatcgagaaacgaaaagagatgcaacaggagaagcaaaaggctctggacgtggaggcccgtaagcaggtgaacaggaagaaagcgctcttgacaagagtccaagaaatactcgataacgtgcaagtgcgaaaggcgcctaacgcctccgacttcgaccagtgggagatggagacagtatactcaaacagcgaagtcagaaatctgaacgttcctgcaacctttccaaatagtttcccatcacacactgaacactctacagcagccaaactggacaagattgctggaattcttcctctggacaacgaggaccagtgcaaaaccgacggaatagacctggccagagactcggaggggttcaatagccccaagcaatgtgattcctccaacatctcacacgttgagaacgaggccttcccaaaaacatctagtgctactccccaagaaactctcatctctgacggaccttttagcgtaaatgagcagcaggatttgccattgttggctgaagttattccagacccatacgtgatgagcttgcagaacctcatgaaaaagtccaaggagtatattgagagagaacagagtcgacgatccttgcgtggctcaatcaaccggatcgtcaacgaaagccaccttgacaaggaacatgatgccgtggaggtggcagactgtgtcaaggaaaaaggtcagctcaccggaaagcattgtgtttccgtgatccccgataaaccttcattaaataagtcaaacgttctgctgcagggggcatccactcaggcttccagcatgtcaatgccagtcctcgcttcattcagcaaagtcgatatccctattaggactggacaccccaccgtgctggagagtaactctgacttcaaagtgattcccactttcgtgaccgaaaataacgtgattaagtcactgacgggttcctatgccaaactccccagccccgaaccttcaatgtcgccgaagatgcacaggcgccgttcaaggacgagttcggcgtgtcacattcttatcaataatcccataaatgcgtgtgagctgtcccccaagggtaaggaacaggcgatggacttaatcatacaggacactgatgaaaatacgaacgttccggaaattatgccaaagctcccaactgatctggccggagtgtgctctagcaaggtctatgtgggcaaaaatacctcagaggtgaaggaggatgttgttttaggaaaatcaaatcaggtttgccagagttcgggaaatcacttagaaaacaaggtgacgcatggattggtgaccgtagagggccagctgacctctgacgaaagaggcgctcacattatgaactcaacctgcgctgccatgcccaagctgcatgaaccgtacgcctcctcccaatgcatcgccagccctaatttcggcaccgtctcaggcttgaaacccgctagtatgttggagaagaactgtagcctccagaccgaactgaataaaagctatgacgtcaagaacccatccccgctcctgatgcagaaccaaaacaccagacagcagatggacacgcccatggtgtcttgcggcaatgaacaatttctggataattccttcgagaaagtgaagcgtagactggatctggatattgacggtttgcagaaggaaaattgtccctatgtgattacgtctggcatcacagaacaagaaaggcagcacctacccgaaaaacgctaccccaagggctccgggttcgttaacaaaaataagatgctcgggacaagttccaaggaaagcgaggaactgctgaagtctaagatgctggctttcgaggagatgaggaagcgcctggaggaacagcatgcacaacagctgagcctgctaatcgcggagcaggagcgagagcaggaacggctccagaaagaaatcgaggagcaagagaagatgctcaaggaaaagaaagctatgacggcggaagcctctgaactagacataaacaatgccgttgagctggagtggcgtaagatatccgattccagcctcctggaaaccatgttatcacaggctgatagcttgcatacctctaattccaacagctccggctttacaaatagtgccatgcaatattctttcgtgtctgcaaatgaagctcctttttacttgtgggggagctcaacttcaggactgactaaactgtctgttactcgcccatttggcagagctaagacacgctggagccaggtctttagtctcgaaattcaggctaaattcaacaaaattacggccgtcgccaaagggtttctcacaagaagactgatgcagaccgacaaactcaagcagctgaggcagaccgtcaaagacaccatggagtttattcgtagtttccagagcgaggctcctctcaagcgtggaatcgttagtgcccaggacgccagtctgcaggaaagagtgctggcccagctgagagctgcgctctacggcatccacgatatcttttttgtgatggacgctgctgaacgaatgtcaattctccatcacgatagagaggtgcggaaggagaagatgctgcgacagatggacaaaatgaaaagccctcgtgtcgctttgtctgctgccactcaaaaaagcctggacagaaaaaaatacatgaaggccgctgagatgggtatgccgaacaaaaagtttttggttaaacagaatccctccgagacccgagtgctccagccaaaccaaggacagaatgcccctgtccacagactcctgtcccgccaggggtccatctgcaggaagaatccaaaaaaggccgcaaaatgttgcgacaatctccggaggcagcatagcctcggatag

SEQ ID NO: 181765 - DNA, 2976 bp, Artificial Sequence
  derived and/or modified sequence
atggaagagtatgaaaaattctgtgaaaagtccctggcccgaattcaggaagcctctctctctacagagagtttcctgcccgctcagtcagaaagcataagtttaattcgatttcacggggtggctatcctttcaccactactgaacatcgagaagaggaaagagatgcagcaggagaagcaaaaggcgttggacgttgaagcaagaaaacaggtcaacagaaagaaggcccttctgacacgggttcaggagatcctggataatgtacaagtgagaaaagcaccgaatgctagtgattttgaccagtgggaaatggagacagtctattcaaatagcgaggttcggaatctgaacgtacctgctacgtttccaaactcctttccctctcacaccgagcactcaactgccgcaaaactggataagatcgccggtattttgccgttggacaatgaggaccagtgcaaaacagacggcatcgacctcgccagggattccgagggcttcaactctcctaagcagtgtgacagttctaacatctcccacgtggagaacgaggcatttccgaagacttccagtgctacgccccaagagacactcatttctgacgggcctttcagcgtcaatgaacagcaggatctcccactactggccgaagtgattcctgacccttatgttatgtcactacagaacctaatgaaaaagtcaaaagaatatatagagagagaacaatcaaggaggtccttgaggggcagcatcaatcgcattgtgaatgaaagtcatctcgataaggagcatgacgcagtcgaggtcgccgattgtgtgaaggagaagggtcaactgacaggtaaacactgtgtctctgtgattcctgacaaaccttctttgaacaaatctaacgtgctgttgcagggcgcttctacacaggctagctccatgagcatgccagtgctcgcctcattctctaaggtcgatatccccatcagaactggccatccaactgtcctggagtctaacagtgacttcaaggtaatccccaccttcgttacagaaaataatgttatcaaatccctcaccgggagttacgccaagttaccctccccagaaccctctatgagccctaaaatgcatagacggcgttcccggacaagttccgcatgtcatatactgataaataacccaatcaatgcctgtgagcttagccctaagggaaaggagcaggctatggatctcatcatccaagataccgacgaaaacaccaacgtacccgagatcatgcccaaactcccaaccgacctagccggtgtttgctcatcaaaagtttatgtcggtaagaatacatccgaagtgaaggaggacgtcgtgcttggtaagagcaaccaagtgtgccagtcgtccggaaaccatctggaaaacaaagtgacgcacggcctggttaccgtcgaaggccagttaacatccgacgagagaggggcacatattatgaactcgacttgtgccgctatgcctaaactccacgagccctatgcatctagccagtgcatagccagccccaattttggaacagtgagtggactcaagcccgctagcatgttggagaaaaattgcagcctgcaaacagagctgaataagagctacgatgttaagaatcccagcccactgctgatgcagaaccagaacacccgtcagcagatggataccccgatggtcagctgcgggaacgagcaatttctggataacagttttgaaaaagtaaaaagacgtctcgacctggacattgacgggcttcaaaaagagaattgtccttacgtcataacaagcggcattacagagcaggagagacaacacttgccagaaaaaagatatcctaaagggtcaggttttgtcaacaagaacaagatgctcggaacaagttctaaggaaagtgaggaattgctaaaaagtaagatgctggctttcgaagaaatgcgcaagcgccttgaagagcagcatgcgcagcaactctcactcttgatagcggagcaggagagagagcaggaacggctgcagaaagagattgaagaacaggagaaaatgttgaaagagaagaaagccatgactgcagaagcctccgagctggatatcaataatgctgtggagcttgagtggaggaagatcagtgactcatccctactggaaaccatgctctcacaggcggattctcttcacacctcaaactcgaacagctccggcttcactaactccgctatgcagtactccttcgtcagtgccaatgaagctccattctacctgtgggggtcgagcacatctggtctaaccaagctcagtgtcacgcggccttttggtagagcaaaaacaaggtggagccaagtgttcagtctggagatccaggccaaattcaataagattactgcggtcgccaagggtttccttaccaggcggttgatgcagacggataaactgaagcaacttcgacagaccgtcaaagatacaatggagtttatacgatctttccagagcgaagccccacttaaacgcggaatagtgagcgctcaggacgcttctctacaggagagggtcctggcccagctgagggcggcactttacggcatccacgacattttcttcgttatggacgcggcagagagaatgagtatcttgcaccatgatagagaggtacggaaggaaaaaatgctacgccagatggataagatgaaaagtcccagagtggctttatctgcagctactcagaagagcctggatcggaagaaatacatgaaggcggctgagatgggaatgcctaacaagaaatttcttgtgaagcagaatccttccgagactcgcgtgcttcagcctaatcagggacagaatgcaccagtccaccgcctcctctccagacagggatctatctgtcgtaagaaccccaaaaaggctgccaaatgttgtgacaacctcaggcgtcagcacagccttggctag

SEQ ID NO: 181766 - protein, 1707 aa, Artificial Sequence
  derived and/or modified sequence
MDQEGGGDGQKAPSFQWRNYKLIVDPALDPALRRPSQKVYRYDGVHFSVNDSKYIPVEDLQDPRCHVRSKNRDFSLPVPKFKLDEFYIGQIPLKEVTFARLNDNVRETFLKDMCRKYGEVEEVEILLHPRTRKHLGLARVLFTSTRGAKETVKNLHLTSVMGNIIHAQLDIKGQQRMKYYELIVNGSYTPQTVPTGGKALSEKFQGSGAATETAESRRRSSSDTAAYPAGTTAVGTPGNGTPCSQDTSFSSSRQDTPSSFGQFTPQSSQGTPYTSRGSTPYSQDSAYSSSTTSTSFKPRRSENSYQDAFSRRHFSASSASTTASTAIAATTAATASSSASSSSLSSSSSSSSSSSSSQFRSSDANYPAYYESWNRYQRHTSYPPRRATREEPPGAPFAENTAERFPPSYTSYLPPEPSRPTDQDYRPPASEAPPPEPPEPGGGGGGGGPSPEREEVRTSPRPASPARSGSPAPETTNESVPFAQHSSLDSRIEMLLKEQRSKFSFLASDTEEEEENSSMVLGARDTGSEVPSGSGHGPCTPPPAPANFEDVAPTGSGEPGATRESPKANGQNQASPCSSGDDMEISDDDRGGSPPPAPTPPQQPPPPPPPPPPPPPYLASLPLGYPPHQPAYLLPPRPDGPPPPEYPPPPPPPPHIYDFVNSLELMDRLGAQWGGMPMSFQMQTQMLTRLHQLRQGKGLIAASAGPPGGAFGEAFLPFPPPQEAAYGLPYALYAQGQEGRGAYSREAYHLPMPMAAEPLPSSSVSGEEARLPPREEAELAEGKTLPTAGTVGRVLAMLVQEMKSIMQRDLNRKMVENVAFGAFDQWWESKEEKAKPFQNAAKQQAKEEDKEKTKLKEPGLLSLVDWAKSGGTTGIEAFAFGSGLRGALRLPSFKVKRKEPSEISEASEEKRPRPSTPAEEDEDDPEQEKEAGEPGRPGTKPPKRDEERGKTQGKHRKSFALDSEGEEASQESSSEKDEEDDEEDEEDEDREEAVDTTKKETEVSDGEDEESDSSSKCSLYADSDGENDSTSDSESSSSSSSSSSSSSSSSSSSSSSSSESSSEDEEEEERPAALPSASPPPREVPVPTPAPVEVPVPERVAGSPVTPLPEQEASPARPAGPTEESPPSAPLRPPEPPAGPPAPAPRPDERPSSPIPLLPPPKKRRKTVSFSAIEVVPAPEPPPATPPQAKFPGPASRKAPRGVERTIRNLPLDHASLVKSWPEEVSRGGRSRAGGRGRLTEEEEAEPGTEVDLAVLADLALTPARRGLPALPAVEDSEATETSDEAERPRPLLSHILLEHNYALAVKPTPPAPALRPPEPVPAPAALFSSPADEVLEAPEVVVAEAEEPKPQQLQQQREEGEEEGEEEGEEEEEESSDSSSSSDGEGALRRRSLRSHARRRRPPPPPPPPPPRAYEPRSEFEQMTILYDIWNSGLDSEDMSYLRLTYERLLQQTSGADWLNDTHWVHHTITNLTTPKRKRRPQDGPREHQTGSARSEGYYPISKKEKDKYLDVCPVSARQLEGVDTQGTNRVLSERRSEQRRLLSAIGTSAIMDSDLLKLNQLKFRKKKLRFGRSRIHEWGLFAMEPIAADEMVIEYVGQNIRQMVADMREKRYVQEGIGSSYLFRVDHDTIIDATKCGNLARFINHCCTPNCYAKVITIESQKKIVIYSKQPIGVDEEITYDYKFPLEDNKIPCLCGTESCRGSLN

SEQ ID NO: 181767 - protein, 70 aa, Artificial Sequence
  derived and/or modified sequence
MDQEGGGDGQKAPSFQWRNYKLIVDPALDPALRRPSQKVYRYDGVHFSVNDSKYIPVEDLQDPRCHVRSK

SEQ ID NO: 181768 - protein, 247 aa, Artificial Sequence
  derived and/or modified sequence
MDQEGGGDGQKAPSFQWRNYKLIVDPALDPALRRPSQKVYRYDGVHFSVNDSKYIPVEDLQDPRCHVRSKNRDFSLPVPKFKLDEFYIGQIPLKEVTFARLNDNVRETFLKDMCRKYGEVEEVEILLHPRTRKHLGLARVLFTSTRGAKETVKNLHLTSVMGNIIHAQLDIKGQQRMKYYELIVNGSYTPQTVPTGGKALSEKFQGSGAATETAESRRRSSSDTAAYPAGTTAVGTPGNGTPCSQDT

SEQ ID NO: 181769 - DNA, 726 bp, Artificial Sequence
  derived and/or modified sequence
atggccccagccacagacacagcctggctgcccccccaccctgagatccagctgcggctgctgtgccctggagagacctacggcaagctgatgggcggcagccccagcgctggccccaccacccagagccagccccacgccctgcggcccggcctgcggggccggggcggctggtggccccagcccttctggatccacagcccccccctgacccacagcgtgggcaccttcatctgcctggatggcctggtgtgtgccctgacagcccctggcctgggcgtgggcctgaccccagccccctggaggcctcctggccagagcaggatgctggagggccacggcccctggcccaccccaggcagcaggcctggccccacctgtgtgtgcctgctgaccccagccagcagcagcctgcggccctgcctgagtgaccggggcacctgccctggggccccccagggcgctgtgggcacctgccgggccagcccccagagcccctgccaccgccaccccagcctgcggagcggcctggagtggacccagcccccagaccaggaccagggcctgctgaccccaggcagcccccccctggtgtctggagtgacccagaccccctggaccagccccttctgccccccccggcccaccccctgggtgggcgccgccttcaccgctgccaacccctgccccccagcccccacagccagctctgtgacaggcctgtag

SEQ ID NO: 181770 - DNA, 5124 bp, Artificial Sequence
  derived and/or modified sequence
atggatcaggagggcggaggagatggacagaaagccccctcgttccagtggcgcaattataagctgatcgtggatcctgccctggatcctgctcttagacgtcccagccagaaagtctacagatacgatggagtgcactttagtgtgaatgacagcaagtatatcccagtggaggacttgcaggaccctcggtgccatgttcggagcaagaacagagacttttccttgcctgtccccaaattcaagcttgacgaattttatataggtcagattccactgaaagaagtgacgttcgcacgccttaatgacaacgttcgggaaacctttctgaaggacatgtgcaggaaatacggcgaggtcgaagaagtggagatcttgctccatccacgaacacggaaacacctgggactagctagagtcctgttcaccagtactaggggagccaaagagactgtgaagaatctacatttgacatctgtgatggggaatatcatccacgctcagctagacattaagggccagcaaagaatgaaatattatgaactgatcgtgaacggttcctatacaccacagactgttcctacagggggcaaggctctatctgaaaagtttcaaggatcaggggctgcgactgagaccgcagaaagtcggagaaggtcctcctccgacacagctgcttatccggcaggcacaacagcagtcggcactccgggaaacggcaccccttgtagccaggacacctcattctcctcatccagacaagacacaccctctagtttcgggcagtttaccccccagtcatcacagggtacaccttacaccagccgcgggagcacgccctactcacaggacagcgcttatagctcaagcactactagcacgtcttttaagccccgtaggtcggaaaattcttatcaagatgcattctcacgaaggcacttctcagcgagctccgcgagcactaccgccagtacagcaatagctgctacaaccgctgcaacagccagtagcagcgcctcttcatccagtctgagttcttctagtagctccagttcttcctcctctagctcccaatttagaagctcagacgcaaattacccggcgtattacgagtcttggaacagatatcagcggcacacctcttatccacccagacgggctactcgcgaggaaccacccggcgccccgttcgccgagaataccgctgaacgctttccaccctcatacacctcatatctgccgcctgaaccctcaaggcccaccgatcaggactatcgccctccggcttcagaggccccccctcctgaaccgccggaacctggaggcggtgggggcggagggggtccatccccggagcgagaagaggtcagaacatcgccaagaccagctagcccagcaagatccgggtccccagcccccgagacaactaacgaatccgtgcccttcgcgcagcactcttcattagatagccggatcgagatgctgctgaaggaacagcgctccaaatttagcttcttggcctctgatactgaagaggaagaagaaaacagctcaatggtgctcggggcacgcgacaccggttccgaagtgccatccggaagcgggcatgggccctgcacccccccaccggcaccggccaacttcgaagacgtggctcccaccggatctggagagcctggagctactagagagagtcctaaggcaaatggccagaaccaagcgtcaccttgttcatccggcgacgacatggaaatcagcgacgacgatcgcggcggcagccctccgcccgccccaacccctcctcagcagcctccgcccccacctccccctccacctcccccacctccttatctggcaagcttgccattgggatacccaccacaccagcctgcttacctgctgccgcccaggccagacggaccaccaccgccagaatacccccctcctcctccaccgcctccccacatttacgactttgttaacagtttggaactgatggatagactgggggcacaatggggcggcatgcccatgtccttccagatgcaaacccagatgctgaccagacttcaccaactgagacagggcaagggtctgatagcggccagtgccggacctccgggaggagcgttcggcgaggccttcctgccctttcctcctccccaggaggctgcatatggattgccctatgccctgtacgctcagggccaagaaggtcggggcgcctattcgcgcgaggcttatcacctgcccatgcctatggcggctgaaccccttccctcgagctcagttagcggggaggaggccaggctgcctccccgagaggaggcagaattggcagagggcaagacactgccaacggcaggcaccgtaggacgtgttcttgcgatgctggtgcaggagatgaagtccatcatgcaacgcgatttaaaccggaagatggttgaaaacgttgcatttggcgccttcgaccagtggtgggagtccaaagaggagaaggcaaaaccatttcagaacgctgcaaaacaacaagcaaaggaggaagataaggaaaagacgaaactcaaagaacctggcctcttatcattagtggactgggctaagtctggtggcactaccggaatcgaggcgtttgctttcggttctggtttacgcggcgctctacgacttccttccttcaaagtgaagcggaaagaaccctctgagatatcagaagcctcagaggagaagaggccccgacccagtactcctgccgaggaggacgaggatgatcctgagcaggagaaagaggctggcgagccgggccggcccggcaccaagccgccgaaaagagacgaggaacgcgggaagactcagggcaagcacaggaaatccttcgcgcttgacagcgagggcgaagaggcttcccaggaatcaagcagcgagaaggacgaggaggatgacgaggaagacgaagaggacgaggacagagaagaggctgtggatacaaccaagaaagaaactgaagtgtctgatggcgaggacgaggaatcggacagttctagcaagtgctcactctacgctgactcagatggcgagaacgactcaacatcggactccgagtcctcttcgtcttcatcatcttcctcatcaagttcgtcaagtagtagcagttcttcatcctcaagcagtagtgagtcaagtagcgaagatgaagaggaggaggagcggcccgcagccctgccatctgcctccccaccaccccgtgaagtgccagtgccaacaccggctcctgtcgaggtacctgtgcccgaaagagtcgccgggagccctgtgaccccattaccagagcaggaggccagtcctgcaaggccggctggcccaacggaagagtcccctccctcagcgccgctgcggccacccgagcctccggctggacccccagcccccgctcctcggcctgatgaacgcccctctagtcccatccctttgttgccaccccctaagaaacggagaaaaactgtcagtttttctgcgattgaggtagtgcctgctccggagcctccacccgccacaccacctcaggccaagttccccggacccgctagccgcaaagcgcctcggggggtcgagcgaacgatccgcaacctgccactggaccacgcctccctggttaaaagttggcctgaggaagtttctcggggtggcaggtctagagccgggggacggggccggctaacagaggaggaagaggcagaacctggcactgaagtggatttggctgttctcgcagacttagcactgactccagctcgccgcgggttacccgccttaccagccgtcgaggacagtgaggccacagaaacaagcgacgaggccgagaggccacggcctctgctgagccacatcctgttagaacacaattacgccctggcagtgaagcctactccgcctgcgcctgctctgcgcccccccgaacctgtgccagcccccgcggcattgttcagctcccccgcggacgaggtcttggaggcaccagaggtggtggttgctgaggccgaggagcccaaacctcaacagcttcagcagcaacgtgaggaaggtgaagaagagggggaagaggagggagaagaggaggaggaagagtctagcgatagctcatcttcctctgatggcgagggagcattgaggcgcagaagccttcgatcccacgcaaggaggcggaggccaccccctcctccaccgccccccccaccaagggcttacgagcccaggagcgagtttgagcagatgacaatcctttacgacatttggaattccggactcgactctgaggacatgtcctatcttagattaacgtacgagcgactgctgcaacagacctctggagcagactggctcaatgacacccattgggttcaccataccatcacaaatcttacaacccccaagagaaaaaggcggcctcaggacggccctcgagagcaccagactggaagcgcaaggagcgaagggtactacccgataagtaagaaggaaaaagacaagtatttggatgtctgccctgtgtcggcccgtcagctcgaaggagttgatacccaggggacaaatagggtcctgagcgaacggagatctgaacagagaaggctattatctgccattgggacgagtgccattatggactcagatctgttaaaactgaatcagctcaaatttcggaaaaaaaagctcagattcggccgttcccgaatccatgaatgggggctgttcgcgatggagcccatcgctgcagacgagatggtgattgagtatgtaggtcagaatatcagacagatggtcgcagacatgagagaaaagcgctacgtgcaggaaggcataggtagcagttatctgtttcgggtcgaccacgataccatcatcgatgcaactaagtgtgggaacctcgcgagatttattaatcattgttgcaccccgaattgctacgccaaggtgattacgatcgagagccagaagaagattgtaatctactccaaacaacctatcggggtcgatgaagagatcacctatgactacaaattccccttagaagacaataaaatcccttgtctgtgcggtacagagagttgtcgagggtccttgaactag

SEQ ID NO: 181771 - DNA, 213 bp, Artificial Sequence
  derived and/or modified sequence
atggaccaggaaggaggtggagacggacaaaaagcgccatctttccagtggcggaactacaaacttatcgtggacccagccttagatccagctttgcgcaggccctcccaaaaggtttaccgctatgatggagttcacttctccgtgaacgacagtaagtacattcctgtcgaagacctccaggaccctaggtgtcacgtgcggtccaagtag

SEQ ID NO: 181772 - DNA, 744 bp, Artificial Sequence
  derived and/or modified sequence
atggatcaggaaggcggaggagacggacagaaggccccttcttttcagtggagaaattataagctgatcgtggatcccgcattggacccagctctaaggcgcccatctcagaaagtttatagatacgacggagtgcacttcagcgtgaacgattccaaatacattcctgtcgaagacctgcaggatccaaggtgtcacgtgagatcaaaaaacagggatttctctctgcctgttccaaagttcaaattggacgaattttatattgggcaaattccgctgaaggaagtgacattcgctcggctgaacgacaatgtgagggagacattcctaaaagacatgtgtcgaaagtacggggaagtggaggaggttgagatcctcttgcaccctcggacacgaaaacatctcggcttggctcgagtactgttcaccagcacacggggcgcgaaagagaccgtgaaaaacctgcacctgaccagtgttatgggaaatataatccacgctcaactggatataaaaggtcaacaacgaatgaaatactacgagctcatcgttaacgggagttataccccccagactgtccctactggggggaaagcattgagcgagaaattccagggcagcggagctgccactgagaccgctgagagcagacgtcgcagctcttccgacactgcagcttatcctgctggaactactgcagtgggaacaccaggtaacggtaccccatgttctcaagacacgtag

SEQ ID NO: 181773 - DNA, 5124 bp, Artificial Sequence
  derived and/or modified sequence
atggaccaggagggcggcggagatggccagaaggcccccagcttccagtggaggaactacaagctgattgtggaccctgccctggaccctgccctgcggcggcccagccagaaggtgtaccgctatgatggagtgcacttctctgtgaatgacagcaagtacatccctgtggaggacctgcaggacccccgctgccacgtgcgcagcaagaacagagacttcagcctgcctgtgcccaagttcaagctggatgagttctacatcggccagatccccctgaaggaggtgacctttgcccggctgaatgacaacgtgcgggagaccttcctgaaggacatgtgcaggaaatatggagaggtggaggaggtggagatcctgctgcaccccaggaccaggaagcacctgggcctggcccgggtgctcttcaccagcaccaggggggccaaggagaccgtgaagaacctgcacctgacctctgtgatgggcaacatcatccacgcccagctggacatcaagggccagcagaggatgaagtactatgagctgattgtgaatggcagctacaccccccagacagtgcccactggaggcaaggccctgtctgagaagttccagggcagcggggccgccacagaaacagctgagagcagaagaagaagcagcagtgacacagctgcctacccagctggcaccacagctgtgggcaccccaggaaatggcaccccctgcagccaggacaccagcttcagcagcagccggcaggacacccccagcagctttggccagttcaccccccagagcagccagggcaccccctacaccagccggggcagcaccccctacagccaggacagcgcctacagcagcagcaccaccagcaccagcttcaagcccaggagaagtgagaacagctaccaggatgccttcagcagaagacacttcagcgccagcagcgccagcaccacagccagcacagccatcgccgccaccacagctgccacagccagcagcagcgccagcagcagcagcctgagcagcagcagcagcagcagcagcagcagcagcagcagccagttccgcagcagtgatgccaactacccagcctactatgagagctggaaccgctaccagaggcacaccagctaccccccaagaagagccacccgggaggagcccccaggggccccctttgctgaaaatacagctgagcgcttcccccccagctacaccagctacctgcccccagagcccagccggcccacagaccaggactacagacctccagccagcgaggcccctcctcctgagcccccagagcccggcggcggcggcggcggcggcggccccagccctgagcgggaggaggtgaggaccagccccaggcctgccagccctgcccggagcggcagccctgcccctgagaccaccaatgaatctgtgccctttgcccagcacagcagcctggacagccgcatcgagatgctgctgaaggagcagaggagcaagttctccttcctggccagtgacacagaggaggaggaggagaacagctccatggtgctgggcgcccgggacaccggcagcgaggtgcccagcggcagcggccacggcccctgcaccccacctccagccccagccaactttgaagatgtggcccccaccggcagcggggagcccggggccacccgggagagccccaaggccaacggccagaaccaggccagcccctgcagcagtggagatgacatggagatcagtgatgatgacagaggaggcagccccccaccagcccccaccccaccccagcagcccccacctcctcctcctcctcctcctcctcctccaccctacctggccagcctgcccctgggctacccaccccaccagcctgcctacctgctgccccccaggccagatggccccccacctcctgagtacccacctcctcctcctcctccaccccacatctatgactttgtgaacagcctggagctgatggaccggctgggcgcccagtggggcggcatgcccatgtccttccagatgcagacccagatgctgacccggctgcaccagctgcggcagggcaagggcctgattgctgccagcgctggccccccaggaggagcctttggagaggccttcctgcccttccccccaccccaggaggccgcctacggcctgccctatgccctgtatgcccagggccaggagggccgcggggcctacagccgggaggcctaccacctgcccatgcccatggctgctgagcccctgcccagcagctctgtgtctggagaggaggcccggctgcccccccgggaggaggccgagctggccgagggcaagaccctgcccacagctggcaccgtgggccgggtgctggccatgctggtgcaggagatgaagagcatcatgcagagggacctgaacaggaagatggtggagaatgtggccttcggggcctttgaccagtggtgggagagcaaggaggagaaggccaagcccttccagaatgctgccaagcagcaggccaaggaggaggacaaggagaagaccaagctgaaggagcccggcctgctgagcctggtggactgggccaagagcggcggcaccactggaattgaggcctttgccttcggcagcggcctgcggggggccctgcggctgcccagcttcaaggtgaagaggaaggagcccagcgagatcagcgaggccagcgaggagaagaggccccggcccagcaccccagctgaggaggatgaagatgatcctgagcaggagaaggaggccggggagcccggccggcccggcaccaagccacccaagagagatgaggagcggggcaagacccagggcaagcacaggaagagctttgccctggacagcgagggggaggaggccagccaggagagcagcagcgagaaggatgaagaagatgatgaagaagatgaggaggatgaggaccgggaggaggccgtggacaccaccaagaaggagacagaggtgtctgatggagaagatgaggagagtgacagcagcagcaagtgcagcctgtatgctgacagtgatggagaaaatgacagcaccagtgacagcgagagcagcagcagcagcagcagcagcagcagcagcagcagcagcagcagcagcagcagcagcagcagcagcagcgagagcagcagtgaagatgaggaggaggaggagaggcctgctgccctgcccagcgccagccccccaccccgggaggtgcctgtgcccaccccagcccctgtggaggtgcctgtgcctgagcgggtggccggcagccctgtgacccccctgcctgagcaggaggccagccctgcccggcctgctggccccacagaggagagcccccccagcgcccccctgcggcccccagagcccccagctggccccccagccccagcccccaggccagatgagcggcccagcagccccatccccctgctgcccccacccaagaagaggaggaagacagtgtccttcagcgccatcgaggtggtgcctgcccctgagcccccaccagccaccccaccccaggccaagtttcctggccctgccagcaggaaggccccccggggcgtggagaggaccatccggaacctgcccctggaccacgccagcctggtgaagtcctggccagaggaggtgtcccggggcggccgcagcagagctgggggccggggccgcctgacagaggaggaggaggccgagcctggaacagaggtggacctggccgtgctggccgacctggccctgaccccagcccggcggggcctgcctgccctgcctgctgtggaggacagcgaggccacagagaccagtgatgaggccgagcggccccggcccctgctgagccacatcctgctggagcacaactatgccctggccgtgaagcccaccccaccagccccagccctgcggcccccagagcctgtgcctgccccagctgccctcttcagcagccctgcagatgaggtgctggaggcccctgaggtggtggtggccgaggccgaggagcccaagccccagcagctgcagcagcagcgggaggagggggaggaggagggggaggaggagggggaggaggaggaggaggagagcagtgacagcagcagcagcagtgatggagagggcgccctgcggcggcgcagcctgcggagccacgccaggagaagaagacctcctcctcctcctcctcctcctccaccccgggcctatgagcccaggagtgaatttgagcagatgaccatcctgtatgacatctggaacagcggcctggacagcgaggacatgagctacctgcggctgacctatgagcggctgctgcagcagaccagcggggctgactggctgaatgacacccactgggtgcaccacaccatcaccaacctgaccacccccaagaggaagaggcggccccaggacggcccccgggagcaccagacaggcagcgcccggtctgagggctactaccccatcagcaagaaggagaaggacaagtacctggatgtgtgccctgtgtctgcccggcagctggagggcgtggacacccagggcaccaacagagtgctgtctgagcggcgctctgagcagaggcggctgctgagcgccatcggcaccagcgccatcatggacagcgacctgctgaagctgaaccagctgaagttcaggaagaagaagctgcgcttcggccgcagccgcatccacgagtggggcctgtttgccatggagcccatcgccgcagatgagatggtgattgaatatgtgggccagaacatccggcagatggtggccgacatgagggagaagcgctacgtgcaggagggcatcggcagcagctacctgttccgggtggaccatgacaccatcattgatgccaccaagtgtggcaacctggcccgcttcatcaaccactgctgcacccccaactgctacgccaaggtgatcaccatcgagagccagaagaagatcgtcatctacagcaagcagcccatcggcgtggatgaggagatcacctatgactacaagttccccctggaggacaacaagatcccctgcctgtgtggcacagagagctgccggggcagcctgaactag

SEQ ID NO: 181774 - DNA, 213 bp, Artificial Sequence
  derived and/or modified sequence
atggaccaggagggcggcggagatggccagaaggcccccagcttccagtggaggaactacaagctgattgtggaccctgccctggaccctgccctgcggcggcccagccagaaggtgtaccgctatgatggagtgcacttctctgtgaatgacagcaagtacatccctgtggaggacctgcaggacccccgctgccacgtgcgcagcaagtag

SEQ ID NO: 181775 - DNA, 744 bp, Artificial Sequence
  derived and/or modified sequence
atggaccaggagggcggcggagatggccagaaggcccccagcttccagtggaggaactacaagctgattgtggaccctgccctggaccctgccctgcggcggcccagccagaaggtgtaccgctatgatggagtgcacttctctgtgaatgacagcaagtacatccctgtggaggacctgcaggacccccgctgccacgtgcgcagcaagaacagagacttcagcctgcctgtgcccaagttcaagctggatgagttctacatcggccagatccccctgaaggaggtgacctttgcccggctgaatgacaacgtgcgggagaccttcctgaaggacatgtgcaggaaatatggagaggtggaggaggtggagatcctgctgcaccccaggaccaggaagcacctgggcctggcccgggtgctcttcaccagcaccaggggggccaaggagaccgtgaagaacctgcacctgacctctgtgatgggcaacatcatccacgcccagctggacatcaagggccagcagaggatgaagtactatgagctgattgtgaatggcagctacaccccccagacagtgcccactggaggcaaggccctgtctgagaagttccagggcagcggggccgccacagaaacagctgagagcagaagaagaagcagcagtgacacagctgcctacccagctggcaccacagctgtgggcaccccaggaaatggcaccccctgcagccaggacacctag

SEQ ID NO: 181776 - DNA, 5124 bp, Artificial Sequence
  derived and/or modified sequence
atggaccaggagggcggcggcgacggccagaaggcccccagcttccagtggagaaactataagctcatagtcgacccggctctggatcctgcgctgcgcaggccgagccagaaggtctatcggtacgacggggtccatttttcggtgaacgattctaagtacatccccgtggaggacctacaagaccccaggtgccacgtgcgctccaagaatagagatttcagtctgccagtacccaagttcaaattagacgaattctacatcggccaaatcccactcaaggaggtgacgtttgcccgcctgaacgacaacgtgagagagaccttcttaaaggatatgtgccggaaatacggtgaggtcgaggaagtagaaattctgctccacccaaggacacgcaagcatctgggtttggcccgagtgctattcacctccactagaggcgccaaggagaccgtaaagaacctccacctgacgagcgtcatgggaaacatcatacatgcacagcttgacatcaaaggccaacagagaatgaaatattacgaactgattgtcaatggctcttacaccccccaaacagtacctacaggaggcaaggcactttcggaaaaatttcaaggaagtggggctgcaacagagaccgcagagtcacgcaggcgcagcagtagtgacacggcggcttatccagcaggcacaaccgccgtggggacccctggaaacggaaccccgtgtagccaggacacctcattttctagttctagacaggacacacccagtagcttcggtcagttcacccctcagtcaagtcaaggaactccttataccagccggggttccacgccttattctcaggactcagcatactcttcaagtacaacgagtacttcctttaagccaaggcgctccgaaaatagttaccaagacgccttctccagaaggcatttctcagcttcaagcgccagcaccactgctagcaccgccattgcagccacgacggccgccacagcctcctcttcagcatcttcttcaagcctgagttcctcatccagtagcagcagctccagttcctcatcccagttccgcagcagtgatgcaaattacccagcctactatgaaagttggaatcggtatcaaagacacacatcatatccgcctcggcgtgcgacaagagaggagccacctggggcacctttcgcggagaataccgccgagagattccctccctcttatactagctatcttcctcccgagccaagcagaccaaccgatcaggactacagaccccccgcctcagaagctccaccacccgaacctccagagcctgggggaggaggcggcggcggtggtccatcaccggagcgtgaagaagtgcggacctcacctaggcccgcaagtcctgctcggagtggctcccctgcaccagagaccaccaatgagtccgtccccttcgctcagcatagctcactggacagccgcattgagatgctcctcaaggagcagaggtctaagttcagctttctcgccagtgataccgaggaggaggaagagaactccagcatggttctgggtgcccgtgacacaggaagtgaggtgccatccggctcaggccacggaccttgcacacctccccctgcccctgccaactttgaggatgttgctccaactggttccggggaacctggcgctacccgggagtctcctaaagccaatgggcagaatcaagcatccccttgtagcagtggagatgacatggaaatatctgacgatgaccggggtggctctcctcccccagccccgactcctccccagcaaccgccacccccccctccacctcctccaccgcctccaccatatctcgctagcctgcccctcggctatcctcctcaccagccggcctacctgctccctccccgtcccgacgggccccccccccccgaataccctccacccccaccgccccccccccatatttatgactttgttaattcactggagctgatggaccggctgggagctcagtggggaggtatgccaatgtcattccagatgcagacacagatgctgaccaggttgcatcaactcagacaggggaaaggactcatcgccgcatccgccgggccccctggaggagctttcggcgaagcttttctcccctttccgcccccccaggaagccgcctatgggctcccttatgccttatacgcccagggtcaggagggacgcggtgcctacagccgggaagcttatcatctccccatgcctatggctgctgaacctctgccctcatcctcagtgtccggggaagaggcccgtctgcctccccgggaagaggccgaactggctgaaggaaagactctgccaacggccgggacagttggtcgggtactcgccatgcttgtgcaagaaatgaagagcatcatgcagagagacctaaatcgaaaaatggtggagaatgttgctttcggggctttcgaccagtggtgggagagtaaggaggagaaagctaagccatttcaaaatgccgccaaacaacaggcgaaagaggaggacaaagagaaaacaaagctgaaggaacctggtctcctaagcctggttgactgggctaagtccggcggcactaccggtattgaagcattcgcgttcggctccgggcttagaggtgccctgcgactcccgtcgtttaaagtgaagagaaaggaacccagcgagattagcgaggccagcgaagagaaacggcctcgcccttctacccccgctgaggaggacgaagacgacccagagcaggagaaggaagcaggcgagcccggaaggcctggaaccaaacccccaaaacgagatgaagaacgcgggaagactcaggggaagcatcggaaatcatttgctctggattccgagggggaggaggcctctcaggagtcctcctcggagaaggatgaagaagatgatgaggaggatgaggaagacgaggacagggaggaagccgtggatactactaagaaagaaaccgaagtgagcgacggtgaagatgaggagtctgacagctcatccaaatgctctctatatgccgattcagacggagagaatgatagcacctccgacagcgagtcttcttcatcctcttcttccagttcatccagcagctctagcagtagctcatcttccagttcgtccagctccgagtcatccagcgaggacgaggaggaagaagagaggccagcagctctacccagtgcctccccaccgccgagggaagtgcccgttccaactcctgcccccgttgaggtccctgtgcctgagcgcgtggccgggagtcccgtgaccccgctccctgagcaagaggcttcaccagctcgcccagccggccccacggaggagtcgcctccgagtgcccccctacgcccgccagagccacctgccgggcctcctgccccagcaccccgccctgacgaacggccttccagccccatcccactgctcccccctccaaagaagaggagaaaaaccgtgagtttctccgcaatagaggtggtgccagccccggaaccgccccctgctactcccccccaggccaagtttcctgggcccgcctcacggaaagcccctcgaggagtggaacggaccattcgtaacctgcctctggaccacgctagcctggtgaagagctggcctgaggaagtgtctcgcggcggacggtccagagctggtggtcgcggaagacttactgaggaagaggaggccgaaccaggaaccgaagtggatctggcggtgctcgccgatttggccttgacccctgcccgaaggggccttcccgctctgccggccgtggaggattccgaggccacagagacgtcagacgaagcggaaagaccaaggcctttgctgtcacatatcctcttggaacataattatgcactggccgtgaaacccacccctcctgccccagctttgcgacctcctgagccagttccagctcctgctgcactgttttcctccccagccgatgaagtcctagaggcacccgaagtcgtcgtggctgaggcagaggagccaaagccccagcagctgcagcagcaacgcgaagagggagaggaggagggcgaagaggagggagaagaggaagaggaggagagtagtgattcctctagttcatccgacggagaaggcgcattaaggcggcgatcactgaggtctcacgcccggaggcggcggcccccgcccccccctccacctccacccccaagggcctacgaaccaaggtccgagttcgagcagatgacaatcctttatgacatttggaatagcggactggactccgaagacatgagttatcttcgtctcacttacgagcggctactccagcaaacaagcggggcggattggcttaacgacacccactgggtccaccacacaatcaccaatttaacgacacccaagcgcaagaggcgcccccaggacggcccgcgcgaacatcagacagggagcgccaggtccgagggttactaccccatatctaagaaagagaaggacaagtatctggacgtgtgtccggtgtcagcaaggcaactggagggggtggatacccaggggacaaatcgggtcctgtccgagcggcggagcgaacagcgacggctactgtcggccatcgggaccagtgccatcatggacagcgatctgctgaagctcaaccagctcaagttccgaaagaagaaactgcgcttcgggaggagccggattcacgagtggggccttttcgccatggagcccatcgcagcggatgagatggttattgagtacgtcggacagaacatcaggcagatggttgcggacatgcgggagaagcggtacgtgcaagaggggataggtagttcctatctgttccgcgtggatcacgatacaattatcgacgccacgaagtgcggaaacctcgctcgctttatcaaccactgttgcacgcctaactgttatgccaaggtgatcacgattgagtcacaaaagaaaattgtgatttattccaagcagccaattggcgtggacgaagaaattacttatgattataagtttcctctggaggataacaagatcccatgtctgtgcggaacagagtcttgtaggggatctttgaattag

SEQ ID NO: 181777 - DNA, 213 bp, Artificial Sequence
  derived and/or modified sequence
atggaccaggagggcggcggcgacggccagaaggcccccagcttccagtggcgaaactacaagctcattgtagatcctgctctggatccggccttgcgcaggccctctcagaaagtttacaggtacgacggagtgcacttctccgttaacgatagcaaatacatacccgtggaggacctgcaagacccaaggtgccacgtccgctctaaatag

SEQ ID NO: 181778 - DNA, 744 bp, Artificial Sequence
  derived and/or modified sequence
atggaccaggagggcggcggcgacggccagaaggcccccagcttccagtggcgtaattacaaactgattgtcgaccccgccctcgatcctgcactgcgaagaccttctcagaaggtatacagatatgacggcgtccatttttcagttaatgatagcaagtatatccccgtggaagacctgcaggatccccgatgccacgtgcggtctaaaaacagagacttcagcctacccgtgcccaagttcaaattagacgagttttacattgggcagataccgctgaaggaggtgaccttcgccagactgaacgacaatgtgagggaaacctttttaaaagacatgtgccgcaaatatggggaagttgaggaggtcgagattctcctccacccacggacccggaaacacctcggacttgcccgggttctgttcacatccacacgcggcgccaaagaaactgtgaaaaatttgcacttaacctcagttatgggtaacataatacatgcccagttggatattaaaggccaacagcgaatgaaatactacgaactgatcgtgaatggctcctacacgcctcagaccgtacctacaggcggtaaagcactctccgaaaaatttcagggttccggtgctgcaactgagacagccgaatctaggagacgcagttcatcagatacagccgcgtacccggcggggaccaccgcagtgggaactcccggaaacggaaccccctgttcccaagacacttag

SEQ ID NO: 181779 - DNA, 5124 bp, Artificial Sequence
  derived and/or modified sequence
atggatcaggagggtggaggcgatggtcagaaggctccgagctttcagtggcgaaactataaactgatagtggatccagccctagaccctgccctgcggaggccctcccagaaggtgtataggtacgatggagttcattttagcgtcaatgacagcaaatacatcccggtcgaggatctccaagaccctaggtgccacgtgcgatctaaaaatcgagattttagcttgcctgtgcctaaatttaagctggatgaattctacatcggccagattcccctgaaggaggtcacttttgcccgtctcaacgacaatgtgagagaaacgttcctgaaagatatgtgccgcaaatatggcgaggtagaagaggtagaaatcctgctacacccccgtacaagaaaacacctcggtctagcgcgtgttctctttacttctacaaggggggcaaaggaaaccgtcaaaaatctgcaccttacctctgtgatgggcaacatcatccacgcccaattggacattaagggacagcagcggatgaagtattacgaactgattgtaaatggcagttataccccacagacggtccccacaggagggaaagccttgagcgagaaattccaggggagcggtgccgcaactgaaaccgcagaaagccggcgaaggtcgtctagcgacactgcggcatacccggctggtacaaccgccgtcggaacacccggaaacggcacaccgtgcagccaggataccagtttttcctcgtccagacaggatacgccttcgtcctttggccagttcacccctcagtcctcccaaggaacaccctacacatctaggggcagtactccatattcccaggatagtgcctacagctcatctaccacctcaaccagctttaaacctcggcgatccgaaaactcttaccaggatgcatttagccggcgtcattttagcgcctcaagcgcgtcaactacagcctcaaccgccattgccgcaacgactgctgccacggcatcatcatccgcctctagttcctccctaagctcatccagctccagttcatcttccagctcatcttcacagttccgaagctctgacgctaattatcctgcctactacgagtcttggaaccggtatcagcgccacacgagctacccccctcgccgtgccaccagagaggagcctccgggtgccccattcgctgagaacaccgctgagcggttcccgccttcatatacctcatacttaccgcctgagccgagcagaccaaccgaccaggactacagacccccagcaagtgaggccccacctcccgagcctcctgagcccggaggaggaggagggggagggggacccagccctgagcgcgaggaagttcgcacatctcccagacccgcatcacccgctcggtccgggagtccagccccagagaccacaaatgagtctgttcccttcgctcagcacagctcactagacagtaggatcgagatgctcctgaaagagcagcgatccaagttctcatttctggcctccgacacagaggaggaggaagagaactcttcaatggtgctaggcgcacgggacacaggttctgaggtcccgtcgggttctgggcatggcccttgtacccctcccccagcccctgctaattttgaagacgtggccccaacggggagcggggagcccggtgccactcgggagagtcccaaggcaaacggccagaaccaggcaagtccctgttcctccggtgacgatatggagatttctgacgatgatagggggggttctccaccccctgcccctaccccaccacagcagcccccaccgccacccccaccaccccctccccctccaccttatctcgcatccttgccgcttggatatcccccacatcaaccagcttatctgttgccaccccgaccagacggaccgcctccccctgaatacccacccccaccaccccctccgcctcacatctatgactttgtgaactccttggagctaatggatcgcctgggcgctcagtgggggggaatgccaatgtcatttcagatgcagacacagatgctgactcgtttgcatcagcttcgccagggtaagggtctgatcgctgcttcagctgggccacctggtggcgctttcggagaggccttcctgccattcccccctccacaggaggctgcttatggactcccctatgcgctatacgcccagggacaggaaggcagaggcgcatatagccgagaggcttaccacttgcccatgcccatggctgcggaacctctcccctcatcatccgtgagcggcgaggaagcacggctccccccaagagaggaggcagaacttgccgagggaaagactttaccaacggccggaaccgtggggagagtgcttgctatgttagttcaggagatgaagtccataatgcagcgggacctgaatagaaagatggtcgaaaatgtagcgttcggcgcatttgaccagtggtgggagtccaaagaggagaaggccaagccgttccagaacgctgccaagcagcaagcaaaggaagaagacaaagagaaaacaaaacttaaagagcctgggcttctcagcttagttgactgggcgaagagtggtggaacaaccgggatagaggcctttgctttcggatccggcctgaggggagccctccgactgcccagctttaaggtcaagcgcaaagagccttcagagatatctgaagcctccgaggaaaaaaggcccaggccctctacccccgcagaggaggatgaagatgatccagagcaagaaaaggaagctggcgaacccggtcggcctggtacgaagccgcctaagagagatgaggagcgcggaaagacccagggtaaacaccgaaaatccttcgccctggactctgagggtgaagaagcctcccaggagagttcttctgagaaagacgaagaggatgatgaggaagacgaggaagatgaagatcgagaggaagcggtcgacacaaccaagaaggaaaccgaggtctcggatggcgaggatgaggaatctgatagctcctccaaatgtagtctgtacgccgactctgatggagagaacgatagcacatccgattcagagagctcttcctctagctcaagtagttctagtagcagctcttcaagttcctcctcttcctctagttcttcttcggagtccagtagtgaggacgaagaggaagaagagcgccctgccgcacttccctccgccagccccccacctagagaggtgcctgttcccacacctgcgcctgttgaagtccctgtccctgaacgggtcgcaggcagtccagtaacccctctcccagagcaagaggcttcccctgccagaccggctgggccaactgaggagagccccccttctgcccctctgcgacccccagaacccccagcaggaccccctgcgcctgctcctagaccagatgagagaccgtcaagtccaatcccgctccttccgccaccaaaaaaacgccgaaagactgtgagcttctccgcaatcgaggttgtgccagccccagagcctcctcctgccacacctccccaggccaaatttccaggacccgcttctcgaaaggcccctaggggggtagagagaaccattcgcaacttgcctttagatcatgcctcactagttaagagttggccggaggaagtctcccgcggaggcagaagtagggcaggcggtcgcggaaggcttacagaagaggaggaggccgaacccggtacagaagtagacctcgctgtgctggctgacttggcactgacccctgcgaggagggggctgccagccctgcctgcggtggaggattctgaggcgacagagaccagtgatgaagccgagcgccctaggccattgctgtcgcatatcttattggagcacaactacgcattggccgtcaagcccaccccacccgctcccgctttgcggccacctgaaccggtgcctgctccagccgctctattttcgagccctgccgacgaggtcttagaggcgcctgaggtagtggtggctgaagcagaggagcctaagcctcagcagctgcagcagcagcgcgaggagggcgaggaggaaggcgaagaggaaggtgaagaagaggaagaggaaagctctgattctagcagctcaagcgatggcgagggcgctctgcgacggagaagtctcaggagccacgctagaagacggcgtccccctccgccaccaccacccccacccccacgtgcatacgaacccagaagtgagttcgagcagatgaccatcctgtacgacatctggaacagcggtcttgacagcgaggacatgtcctacctccggttaacatatgagagattgttacagcaaacctccggagctgactggctcaacgatactcactgggtacatcacacaatcactaatttaacgaccccaaagaggaagaggaggccacaggatggacctcgggaacaccagacggggtccgccagatctgaaggctactatcccatctctaagaaggaaaaggacaagtatttagatgtttgccccgtcagcgcccgacagctggagggagtggacacacagggcaccaatagagtactttcggagagacggtccgagcaaaggaggcttctgtccgccatcgggacctccgccattatggactcggatctcctgaaattaaatcagctcaaatttagaaaaaaaaagctgcgcttcgggagaagccgaatacacgaatggggactgtttgctatggagcccatcgccgctgatgagatggtgattgaatatgtggggcaaaatatccgacagatggtagccgatatgcgcgagaagcgctatgtccaggagggcataggatcctcctacctgtttcgagtggaccacgatacaattattgacgcgactaagtgtgggaatttggccaggttcatcaatcactgttgcacccctaattgctacgctaaagtgatcactatagagtcgcagaaaaagattgtaatttacagtaagcagcccatcggcgtcgatgaggagataacgtacgactataagttcccacttgaagacaacaagataccctgcctctgcgggacggaatcctgcagagggtcacttaactag

SEQ ID NO: 181780 - DNA, 213 bp, Artificial Sequence
  derived and/or modified sequence
atggaccaagaagggggtggagatggacagaaggccccaagcttccagtggcggaactacaagctcattgtcgaccctgcactggatcccgctctccggagaccaagtcagaaagtgtaccggtacgatggagttcacttctccgttaacgattctaaatacattcccgtggaggacctccaggatcccaggtgtcatgtgcgaagtaaatag

SEQ ID NO: 181781 - DNA, 744 bp, Artificial Sequence
  derived and/or modified sequence
atggaccaggagggtgggggtgatggccagaaggcaccgtcttttcagtggagaaactataaactcatcgtggacccagcgcttgatcctgctctcagacgtccatctcagaaagtgtatcggtacgacggggtgcatttctctgtaaacgattccaagtacattcccgtggaagatcttcaggatcctcggtgtcacgttagaagtaagaatcgtgacttttctctgccagttccaaagtttaagttggacgagttttatataggtcagatccctctcaaggaggtgacattcgcccgtctaaatgacaatgtacgcgagacttttctcaaggacatgtgtaggaagtacggagaggtggaggaagtggaaatactgttgcaccccagaacccgaaagcatttaggcctagccagagttctcttcaccagtacaagaggggctaaggagaccgtgaagaacctccatctcactagcgttatgggtaatataatacatgcccaactggatattaagggtcagcagcgtatgaagtattatgagttaattgtgaacggatcatatacaccccaaaccgtccccactggcggtaaggcattgtcagagaaattccagggctcaggagccgctaccgagacggccgagagtagaagaaggtcctccagtgacaccgctgcataccccgctgggacaaccgcggtcgggactcccggtaacgggactccatgcagtcaagacacttag

SEQ ID NO: 181782 - DNA, 6451 bp, Artificial Sequence
  derived and/or modified sequence
atcctcagaattcctcgggtccctcgatactcggctgaaaattctcatcggactctgagaggagcgctgggctggaggcattttccccagggacagaagcgggctattctctcacttgggccagtaagaaaaatccaaaaaaagttgtcgactctgccagcagggattggctaacgggccgttattttcttgactccaccaaggcggatgaaggggaggctacggctgaggccgggaacagtggcgaatctgcagcctctcagaatttggcagtgcaaggaagggacggggaagagaagcaaagcggcgcgcatcctgtccagcgattcgccccgcccgcccggtgaatctgcgtctgcagaacgcgccactgaaggttccccagcgctggctggcctcctcccctccgccccgccccttttcctcagggactagtcgcagctttcgtcgccgccgattcgtcaaggtcccgggccgcagcatctagatcgtcgtggcgaagccgactctccgggggatgcggccaatctccaagctccctgggccgcaacttccgagcctcccagggcgccggccgaggcgaagccgctaccctcggccccgtgggtcccccggcagcgcctgtggcgaaagtgcgaatgcagaccctgtgcccgctgggcctcgcgcagtgtaaatgagcaaagatggatcaggaaggtgggggagatgggcagaaggccccgagcttccagtggcggaactacaagctcatcgtggatcctgccttggaccctgccctgcgcaggccttctcagaaggtgtaccgctatgatggagtccacttcagtgtcaacgactcaaagtatataccagtcgaagacctccaagacccccgttgccatgtcaggtccaaaaacagagacttttccctcccagtccctaagtttaagctggacgagttctatattggacagattccactgaaggaagtgacttttgcaaggctgaatgacaacgtgcgggagaccttcctgaaggatatgtgccgtaagtacggtgaggtggaagaggtagagatcctccttcacccccgtacgcgcaagcacctgggcctggcccgtgtgctcttcaccagcactcggggcgccaaggaaacggtcaaaaacctccaccttacctccgtcatgggcaacatcatccatgcccagcttgacatcaaaggacaacaacgaatgaaatactatgaactaattgtcaatggctcctacacccctcagactgtgcccactgggggcaaggccctgagtgagaagttccaaggctcgggtgcagccactgagacggccgaatcccgccgccgctcttcctctgacacagctgcctacccagcaggcaccactgcggtgggcactcctggcaacggcaccccctgctcccaggacacaagcttctccagcagccgacaagataccccatcttcctttggccagttcacacctcagtcctcccaaggaaccccctacacgtctcggggcagcaccccctactctcaggactctgcctactccagcagcaccacttcaacctccttcaagccccggcggtcagagaacagctaccaagatgccttttcccgccgccacttctctgcatcttcagcctccacaaccgcctccacggccatcgccgccaccactgcagccactgcctcatcctccgcctcttcctcctcattgtcctcgtcctcctcgtcatcctcttcctcctcgtcctctcagtttcgtagttctgatgcaaactacccagcgtattatgaaagctggaatcgctaccagcgccatacttcctacccaccacgccgggccacacgggaggaaccccctggagccccttttgctgaaaatacagctgagcgcttcccaccttcttacacctcctacctgccccccgagcccagccggcccaccgaccaggactaccggcctcctgcctcagaggctccacccccggagcctccagaacctggtggaggcgggggtggaggagggcccagccctgagagagaagaagttcggacttccccccgcccagcctcccctgcccgctctggctccccagccccggagaccaccaatgagagtgtgcccttcgcccagcacagcagcctggattcccgcatcgagatgctgctgaaggagcagcgctccaagttttccttcttggcctctgacacagaggaggaggaagagaacagcagcatggtccttggggccagagatacagggagtgaggtgccttctgggtcagggcatgggccctgcacaccccctccggccccagctaattttgaggatgtggcacctacagggagcggggagccaggggctacccgggagtctcccaaggcaaatggacagaaccaggcttctccatgctcttctggagacgacatggagatctccgacgacgaccggggtggctcaccccctccggccccgacgccccctcagcagcctccgccacctccccctcccccgccgcctcctcctccctacctggcgtcccttcctcttggttatcctccccaccaacctgcctacctcctcccacccagacctgatgggccgccgccccctgagtaccccccacctcctccaccacccccgcacatctatgactttgtgaactccttggagctcatggaccgacttggggctcagtggggagggatgcccatgtccttccagatgcagacccagatgttaactcggctccatcagctgcggcagggcaagggattgattgccgcctcagctggcccccccggtggggcctttggggaggccttcctcccgtttccacccccgcaggaggcagcctacggcttgccgtatgctctatatgcacaggggcaggagggcagaggggcatactcacgggaggcctaccacctgcccatgccaatggcagccgagcccctgccctcctcctcagtctcgggagaggaggcccggctgccacccagggaagaagcagagctggcagagggcaagaccctcccgacagcaggcaccgtgggccgtgtgctcgccatgctggtccaggagatgaagagcatcatgcagcgagacctcaaccgcaagatggtggagaacgtggccttcggagcctttgaccagtggtgggagagcaaggaggagaaggccaagccattccagaacgcggccaagcagcaagccaaggaggaggataaagagaagacgaagctgaaggagcctggcctgctgtccctcgtggactgggccaagagcgggggcactacgggcatcgaggctttcgcctttgggtcagggctgagaggggccctgcggctgccttcattcaaggtaaagcggaaagagccatcggaaatttccgaggccagtgaggaaaagaggcctcgtccctccactcctgctgaggaagatgaagacgaccctgaacaagagaaggaggctggagagccaggacgtccggggaccaagcccccgaagcgggacgaagagcgaggcaagacccagggcaagcaccgcaagtcctttgctctggacagcgaaggggaggaggcatcccaggagtcctcctcggagaaggatgaggaggatgacgaggaagatgaggaagatgaagatcgagaggaagctgtggataccacaaagaaggagacagaggtgtcggatggcgaggacgaggaaagcgattcgtcttccaaatgttctctgtatgctgactcagatggcgaaaatgacagcacatcagactccgagagcagcagctcttccagctcctcatcctcctcctcctcctcgtcctcatcctcctcgtcctcttcatcctctgagtcctcctctgaagatgaagaggaagaggagcggccagcagcccttccctcagcctccccgccccccagagaagtcccagtgcccacgccagcacctgtggaggtgccagtgccggaaagggttgcaggctccccagtcacacccctgcccgaacaggaggcgtctccagcaaggcctgcaggccccacggaggagtcaccccccagtgcgcctctgcgtcccccagaaccacctgctgggcccccggcccctgccccacgccccgatgagcgtccctcttctcccatccccctcctgcccccacccaagaaacgccggaaaactgtctccttctctgccatcgaggtggtgccagccccggagccccctccagccacaccgccgcaggccaagtttcccggcccagcctcccgcaaggctccccggggcgtggagcggaccatccgcaacctgcccctggaccacgcatctctggtcaagagttggcccgaggaggtgtcccgaggaggccggagccgggctggaggccgaggccgcctcaccgaggaagaggaggctgagccagggacagaggtggacctggcggtcctggccgacctggccctgacccctgcccggcgcgggctgcctgccctgcctgctgttgaagactcagaggccacagagacatcggacgaggccgagcgccctaggcccctgctcagccacatcctcctggagcacaactatgccctggccgtcaagcccacgccccctgcgccagccctgcggcccccggagccagtgcccgcacccgccgccctcttcagttccccagctgatgaggtcctggaggcccccgaggtggtggtggctgaggcggaggagcccaagccgcagcaactgcagcagcagcgggaggagggcgaagaggagggggaggaagagggggaggaagaggaggaggagtcctctgacagcagcagcagcagcgatggggagggcgccctccggaggcgcagcctccgctcccacgcccggcgccgccgccctccgcccccacccccgccgccaccgccccgcgcctacgagccacgcagtgagtttgaacagatgaccatcctgtatgacatttggaactcgggcctggactcagaggacatgagttacctgcggcttacgtacgagcggctgctgcagcagacaagcggggctgactggctcaacgacactcactgggtccatcacacaatcaccaacctgaccaccccaaaacgcaagcggcggccccaggatgggccccgggagcaccagacaggctcagcccgcagcgaaggctactaccccatcagcaagaaggagaaggacaagtacctggacgtgtgcccagtctcggcccggcagctggagggcgtggacactcaggggacgaaccgcgtgctgtccgagcgccggtccgagcagcggcggctgctgagcgccatcggtacctccgccatcatggacagtgacctgctgaaactcaaccagctcaagttccggaagaagaagctccgatttggccggagccggatccacgagtggggtctgtttgccatggaacccattgctgctgacgagatggtcatcgaatacgtgggtcagaacatccgtcagatggtggccgacatgcgggagaagcgctacgtgcaggagggcattggcagcagctacctgttccgggtggaccacgacaccatcatcgatgccaccaagtgtggcaacctggccagattcatcaaccactgctgcacgcctaactgctacgccaaggtcatcaccatcgagtcccagaagaagatcgtgatctactccaagcagcccattggcgtggacgaggagatcacctacgactacaagttcccactggaagacaacaagatcccgtgtctgtgtggcacagagagctgccggggctccctaaactgaggtggggcaggatgggtgcccacacccctatttattccccctggtgccctgagctcccagcacccccccagccttagtgggctcagcagggcccacatgcccccatctccaagcgtggggttgggggccccaagcccagcgagggagcctcagtccctggaggcagcttctgcctctcctgtcacccctgcccaccaccccctgattgtttttctttgcggagaagaagctgtaaatgttttgtagcagccagcagctgtttcctgtggaaacctggggtgccggcctgtacagattctgtcctggggggctacacagtcctcttgctttgtgttaatggggacttccccttacgccctgcgtgtacccctccccagtttaggggtctctggggcagtggccatgttctccccctgggggggctctgcacccccagtcctggggactccgtgcctggaaccctgcctcatctgttcctgccagaccctgagggtcacccttccaccctggtgtcactccccggctcagccaggccaggatggcggggtgggtcccttttgctgggctggactgtacatatgttaatagcgcaaacccgacgccacatttttataattgtgattaaactttattgtacaaaa

SEQ ID NO: 181783 - DNA, 315 bp, Artificial Sequence
  derived and/or modified sequence
ggtgccacctttcggccggaggatcggggcgcggggaggagagcgggtgtgtgggagccgtggccgggctcggcccgggccgctggccgtgtaaatgagcaaagatggatcaggaaggtgggggagatgggcagaaggccccgagcttccagtggcggaactacaagctcatcgtggatcctgccttggaccctgccctgcgcaggccttctcagaaggtgtaccgctatgatggagtccacttcagtgtcaacgactcaaagtatataccagtcgaagacctccaagacccccgttgccatgtcaggtccaaaa

SEQ ID NO: 181784 - DNA, 926 bp, Artificial Sequence
  derived and/or modified sequence
caaggtcccgggccgcagcatctagatcgtcgtggcgaagccgactctccgggggatgcggccaatctccaagctccctgggccgcaacttccgagcctcccagggcgccggccgaggcgaagccgctaccctcggccccgtgggtcccccggcagcgcctgtggcgaaatgtaaatgagcaaagatggatcaggaaggtgggggagatgggcagaaggccccgagcttccagtggcggaactacaagctcatcgtggatcctgccttggaccctgccctgcgcaggccttctcagaaggtgtaccgctatgatggagtccacttcagtgtcaacgactcaaagtatataccagtcgaagacctccaagacccccgttgccatgtcaggtccaaaaacagagacttttccctcccagtccctaagtttaagctggacgagttctatattggacagattccactgaaggaagtgacttttgcaaggctgaatgacaacgtgcgggagaccttcctgaaggatatgtgccgtaagtacggtgaggtggaagaggtagagatcctccttcacccccgtacgcgcaagcacctgggcctggcccgtgtgctcttcaccagcactcggggcgccaaggaaacggtcaaaaacctccaccttacctccgtcatgggcaacatcatccatgcccagcttgacatcaaaggacaacaacgaatgaaatactatgaactaattgtcaatggctcctacacccctcagactgtgcccactgggggcaaggccctgagtgagaagttccaaggctcgggtgcagccactgagacggccgaatcccgccgccgctcttcctctgacacagctgcctacccagcaggcaccactgcggtgggcactcctggcaacggcaccccctgctcccaggacaca

SEQ ID NO: 181785 - DNA, 5124 bp, Artificial Sequence
  derived and/or modified sequence
atggaccaggagggcggcggcgacggccagaaggcccccagcttccagtggagaaactacaagctgatcgtggaccccgccctggaccccgccctgagaagacccagccagaaggtgtacagatacgacggcgtgcacttcagcgtgaacgacagcaagtacatccccgtggaggacctgcaggaccccagatgccacgtgagaagcaagaacagagacttcagcctgcccgtgcccaagttcaagctggacgagttctacatcggccagatccccctgaaggaggtgaccttcgccagactgaacgacaacgtgagagagaccttcctgaaggacatgtgcagaaagtacggcgaggtggaggaggtggagatcctgctgcaccccagaaccagaaagcacctgggcctggccagagtgctgttcaccagcaccagaggcgccaaggagaccgtgaagaacctgcacctgaccagcgtgatgggcaacatcatccacgcccagctggacatcaagggccagcagagaatgaagtactacgagctgatcgtgaacggcagctacaccccccagaccgtgcccaccggcggcaaggccctgagcgagaagttccagggcagcggcgccgccaccgagaccgccgagagcagaagaagaagcagcagcgacaccgccgcctaccccgccggcaccaccgccgtgggcacccccggcaacggcaccccctgcagccaggacaccagcttcagcagcagcagacaggacacccccagcagcttcggccagttcaccccccagagcagccagggcaccccctacaccagcagaggcagcaccccctacagccaggacagcgcctacagcagcagcaccaccagcaccagcttcaagcccagaagaagcgagaacagctaccaggacgccttcagcagaagacacttcagcgccagcagcgccagcaccaccgccagcaccgccatcgccgccaccaccgccgccaccgccagcagcagcgccagcagcagcagcctgagcagcagcagcagcagcagcagcagcagcagcagcagccagttcagaagcagcgacgccaactaccccgcctactacgagagctggaacagataccagagacacaccagctacccccccagaagagccaccagagaggagccccccggcgcccccttcgccgagaacaccgccgagagattcccccccagctacaccagctacctgccccccgagcccagcagacccaccgaccaggactacagaccccccgccagcgaggcccccccccccgagccccccgagcccggcggcggcggcggcggcggcggccccagccccgagagagaggaggtgagaaccagccccagacccgccagccccgccagaagcggcagccccgcccccgagaccaccaacgagagcgtgcccttcgcccagcacagcagcctggacagcagaatcgagatgctgctgaaggagcagagaagcaagttcagcttcctggccagcgacaccgaggaggaggaggagaacagcagcatggtgctgggcgccagagacaccggcagcgaggtgcccagcggcagcggccacggcccctgcacccccccccccgcccccgccaacttcgaggacgtggcccccaccggcagcggcgagcccggcgccaccagagagagccccaaggccaacggccagaaccaggccagcccctgcagcagcggcgacgacatggagatcagcgacgacgacagaggcggcagccccccccccgcccccacccccccccagcagccccccccccccccccccccccccccccccccccccccctacctggccagcctgcccctgggctaccccccccaccagcccgcctacctgctgccccccagacccgacggcccccccccccccgagtaccccccccccccccccccccccccccacatctacgacttcgtgaacagcctggagctgatggacagactgggcgcccagtggggcggcatgcccatgagcttccagatgcagacccagatgctgaccagactgcaccagctgagacagggcaagggcctgatcgccgccagcgccggcccccccggcggcgccttcggcgaggccttcctgcccttcccccccccccaggaggccgcctacggcctgccctacgccctgtacgcccagggccaggagggcagaggcgcctacagcagagaggcctaccacctgcccatgcccatggccgccgagcccctgcccagcagcagcgtgagcggcgaggaggccagactgccccccagagaggaggccgagctggccgagggcaagaccctgcccaccgccggcaccgtgggcagagtgctggccatgctggtgcaggagatgaagagcatcatgcagagagacctgaacagaaagatggtggagaacgtggccttcggcgccttcgaccagtggtgggagagcaaggaggagaaggccaagcccttccagaacgccgccaagcagcaggccaaggaggaggacaaggagaagaccaagctgaaggagcccggcctgctgagcctggtggactgggccaagagcggcggcaccaccggcatcgaggccttcgccttcggcagcggcctgagaggcgccctgagactgcccagcttcaaggtgaagagaaaggagcccagcgagatcagcgaggccagcgaggagaagagacccagacccagcacccccgccgaggaggacgaggacgaccccgagcaggagaaggaggccggcgagcccggcagacccggcaccaagccccccaagagagacgaggagagaggcaagacccagggcaagcacagaaagagcttcgccctggacagcgagggcgaggaggccagccaggagagcagcagcgagaaggacgaggaggacgacgaggaggacgaggaggacgaggacagagaggaggccgtggacaccaccaagaaggagaccgaggtgagcgacggcgaggacgaggagagcgacagcagcagcaagtgcagcctgtacgccgacagcgacggcgagaacgacagcaccagcgacagcgagagcagcagcagcagcagcagcagcagcagcagcagcagcagcagcagcagcagcagcagcagcagcagcagcgagagcagcagcgaggacgaggaggaggaggagagacccgccgccctgcccagcgccagccccccccccagagaggtgcccgtgcccacccccgcccccgtggaggtgcccgtgcccgagagagtggccggcagccccgtgacccccctgcccgagcaggaggccagccccgccagacccgccggccccaccgaggagagcccccccagcgcccccctgagaccccccgagccccccgccggcccccccgcccccgcccccagacccgacgagagacccagcagccccatccccctgctgcccccccccaagaagagaagaaagaccgtgagcttcagcgccatcgaggtggtgcccgcccccgagcccccccccgccacccccccccaggccaagttccccggccccgccagcagaaaggcccccagaggcgtggagagaaccatcagaaacctgcccctggaccacgccagcctggtgaagagctggcccgaggaggtgagcagaggcggcagaagcagagccggcggcagaggcagactgaccgaggaggaggaggccgagcccggcaccgaggtggacctggccgtgctggccgacctggccctgacccccgccagaagaggcctgcccgccctgcccgccgtggaggacagcgaggccaccgagaccagcgacgaggccgagagacccagacccctgctgagccacatcctgctggagcacaactacgccctggccgtgaagcccaccccccccgcccccgccctgagaccccccgagcccgtgcccgcccccgccgccctgttcagcagccccgccgacgaggtgctggaggcccccgaggtggtggtggccgaggccgaggagcccaagccccagcagctgcagcagcagagagaggagggcgaggaggagggcgaggaggagggcgaggaggaggaggaggagagcagcgacagcagcagcagcagcgacggcgagggcgccctgagaagaagaagcctgagaagccacgccagaagaagaagaccccccccccccccccccccccccccccccagagcctacgagcccagaagcgagttcgagcagatgaccatcctgtacgacatctggaacagcggcctggacagcgaggacatgagctacctgagactgacctacgagagactgctgcagcagaccagcggcgccgactggctgaacgacacccactgggtgcaccacaccatcaccaacctgaccacccccaagagaaagagaagaccccaggacggccccagagagcaccagaccggcagcgccagaagcgagggctactaccccatcagcaagaaggagaaggacaagtacctggacgtgtgccccgtgagcgccagacagctggagggcgtggacacccagggcaccaacagagtgctgagcgagagaagaagcgagcagagaagactgctgagcgccatcggcaccagcgccatcatggacagcgacctgctgaagctgaaccagctgaagttcagaaagaagaagctgagattcggcagaagcagaatccacgagtggggcctgttcgccatggagcccatcgccgccgacgagatggtgatcgagtacgtgggccagaacatcagacagatggtggccgacatgagagagaagagatacgtgcaggagggcatcggcagcagctacctgttcagagtggaccacgacaccatcatcgacgccaccaagtgcggcaacctggccagattcatcaaccactgctgcacccccaactgctacgccaaggtgatcaccatcgagagccagaagaagatcgtgatctacagcaagcagcccatcggcgtggacgaggagatcacctacgactacaagttccccctggaggacaacaagatcccctgcctgtgcggcaccgagagctgcagaggcagcctgaactag

SEQ ID NO: 181786 - DNA, 213 bp, Artificial Sequence
  derived and/or modified sequence
atggaccaggagggcggcggcgacggccagaaggcccccagcttccagtggagaaactacaagctgatcgtggaccccgccctggaccccgccctgagaagacccagccagaaggtgtacagatacgacggcgtgcacttcagcgtgaacgacagcaagtacatccccgtggaggacctgcaggaccccagatgccacgtgagaagcaagtag

SEQ ID NO: 181787 - DNA, 744 bp, Artificial Sequence
  derived and/or modified sequence
atggaccaggagggcggcggcgacggccagaaggcccccagcttccagtggagaaactacaagctgatcgtggaccccgccctggaccccgccctgagaagacccagccagaaggtgtacagatacgacggcgtgcacttcagcgtgaacgacagcaagtacatccccgtggaggacctgcaggaccccagatgccacgtgagaagcaagaacagagacttcagcctgcccgtgcccaagttcaagctggacgagttctacatcggccagatccccctgaaggaggtgaccttcgccagactgaacgacaacgtgagagagaccttcctgaaggacatgtgcagaaagtacggcgaggtggaggaggtggagatcctgctgcaccccagaaccagaaagcacctgggcctggccagagtgctgttcaccagcaccagaggcgccaaggagaccgtgaagaacctgcacctgaccagcgtgatgggcaacatcatccacgcccagctggacatcaagggccagcagagaatgaagtactacgagctgatcgtgaacggcagctacaccccccagaccgtgcccaccggcggcaaggccctgagcgagaagttccagggcagcggcgccgccaccgagaccgccgagagcagaagaagaagcagcagcgacaccgccgcctaccccgccggcaccaccgccgtgggcacccccggcaacggcaccccctgcagccaggacacctag

SEQ ID NO: 181788 - protein, 656 aa, Artificial Sequence
  derived and/or modified sequence
MARMCVKTQRLDVAKVCLGNMGHARGARALREAEQEPELEARVAVLATQLGMLEDAEQLYRKCKRHDLLNKFYQAAGRWQEALQVAEHHDRVHLRSTYHRYAGHLEASADCSRALSYYEKSDTHRFEVPRMLSEDLPSLELYVNKMKDKTLWRWWAQYLESQGEMDAALHYYELARDHFSLVRIHCFQGNVQKAAQIANETGNLAASYHLARQYESQEEVGQAVHFYTRAQAFKNAIRLCKENGLDDQLMNLALLSSPEDMIEAARYYEEKGVQMDRAVMLYHKAGHFSKALELAFATQQFVALQLIAEDLDETSDPALLARCSDFFIEHSQYERAVELLLAARKYQEALQLCLGQNMSITEEMAEKMTVAKDSSDLPEESRRELLEQIADCCMRQGSYHLATKKYTQAGNKLKAMRALLKSGDTEKITFFASVSRQKEIYIMAANYLQSLDWRKEPEIMKNIIGFYTKGRALDLLAGFYDACAQVEIDEYQNYDKAHGALTEAYKCLAKAKAKSPLDQETRLAQLQSRMALVKRFIQARRTYTEDPKESIKQCELLLEEPDLDSTIRIGDVYGFLVEHYVRKEEYQTAYRFLEEMRRRLPLANMSYYVSPQAVDAVHRGLGLPLPRTVPEQVRHNSMEDARELDEEVVEEADDDP

SEQ ID NO: 181789 - protein, 1462 aa, Artificial Sequence
  derived and/or modified sequence
MALYYDHQIEAPDAAGSPSFISWHPVHPFLAVAYISTTSTGSVDIYLEQGECVPDTHVERPFRVASLCWHPTRLVLAVGWETGEVTVFNKQDKEQHTMPLTHTADITVLRWSPSGNCLLSGDRLGVLLLWRLDQRGRVQGTPLLKHEYGKHLTHCIFRLPPPGEDLVQLAKAAVSGDEKALDMFNWKKSSSGSLLKMGSHEGLLFFVSLMDGTVHYVDEKGKTTQVVSADSTIQMLFYMEKREALVVVTENLRLSLYTVPPEGKAEEVMKVKLSGKTGRRADIALIEGSLLVMAVGEAALRFWDIERGENYILSPDEKFGFEKGENMNCVCYCKVKGLLAAGTDRGRVAMWRKVPDFLGSPGAEGKDRWALQTPTELQGNITQIQWGSRKNLLAVNSVISVAILSERAMSSHFHQQVAAMQVSPSLLNVCFLSTGVAHSLRTDMHISGVFATKDAVAVWNGRQVAIFELSGAAIRSAGTFLCETPVLAMHEENVYTVESNRVQVRTWQGTVKQLLLFSETEGNPCFLDICGNFLVVGTDLAHFKSFDLSRREAKAHCSCRSLAELVPGVGGIASLRCSSSGSTISILPSKADNSPDSKICFYDVEMDTVTVFDFKTGQIDRRETLSFNEQETNKSHLFVDEGLKNYVPVNHFWDQSEPRLFVCEAVQETPRSQPQSANGQPQDGRAGPAADVLILSFFISEEHGFLLHESFPRPATSHSLLGMEVPYYYFTRKPEEADREDEVEPGCHHIPQMVSRRPLRDFVGLEDCDKATRDAMLHFSFFVTIGDMDEAFKSIKLIKSEAVWENMARMCVKTQRLDVAKVCLGNMGHARGARALREAEQEPELEARVAVLATQLGMLEDAEQLYRKCKRHDLLNKFYQAAGRWQEALQVAEHHDRVHLRSTYHRYAGHLEASADCSRALSYYEKSDTHRFEVPRMLSEDLPSLELYVNKMKDKTLWRWWAQYLESQGEMDAALHYYELARDHFSLVRIHCFQGNVQKAAQIANETGNLAASYHLARQYESQEEVGQAVHFYTRAQAFKNAIRLCKENGLDDQLMNLALLSSPEDMIEAARYYEEKGVQMDRAVMLYHKAGHFSKALELAFATQQFVALQLIAEDLDETSDPALLARCSDFFIEHSQYERAVELLLAARKYQEALQLCLGQNMSITEEMAEKMTVAKDSSDLPEESRRELLEQIADCCMRQGSYHLATKKYTQAGNKLKAMRALLKSGDTEKITFFASVSRQKEIYIMAANYLQSLDWRKEPEIMKNIIGFYTKGRALDLLAGFYDACAQVEIDEYQNYDKAHGALTEAYKCLAKAKAKSPLDQETRLAQLQSRMALVKRFIQARRTYTEDPKESIKQCELLLEEPDLDSTIRIGDVYGFLVEHYVRKEEYQTAYRFLEEMRRRLPLANMSYYVSPQAVDAVHRGLGLPLPRTVPEQVRHNSMEDARELDEEVVEEADDDP

SEQ ID NO: 181790 - protein, 801 aa, Artificial Sequence
  derived and/or modified sequence
MALYYDHQIEAPDAAGSPSFISWHPVHPFLAVAYISTTSTGSVDIYLEQGECVPDTHVERPFRVASLCWHPTRLVLAVGWETGEVTVFNKQDKEQHTMPLTHTADITVLRWSPSGNCLLSGDRLGVLLLWRLDQRGRVQGTPLLKHEYGKHLTHCIFRLPPPGEDLVQLAKAAVSGDEKALDMFNWKKSSSGSLLKMGSHEGLLFFVSLMDGTVHYVDEKGKTTQVVSADSTIQMLFYMEKREALVVVTENLRLSLYTVPPEGKAEEVMKVKLSGKTGRRADIALIEGSLLVMAVGEAALRFWDIERGENYILSPDEKFGFEKGENMNCVCYCKVKGLLAAGTDRGRVAMWRKVPDFLGSPGAEGKDRWALQTPTELQGNITQIQWGSRKNLLAVNSVISVAILSERAMSSHFHQQVAAMQVSPSLLNVCFLSTGVAHSLRTDMHISGVFATKDAVAVWNGRQVAIFELSGAAIRSAGTFLCETPVLAMHEENVYTVESNRVQVRTWQGTVKQLLLFSETEGNPCFLDICGNFLVVGTDLAHFKSFDLSRREAKAHCSCRSLAELVPGVGGIASLRCSSSGSTISILPSKADNSPDSKICFYDVEMDTVTVFDFKTGQIDRRETLSFNEQETNKSHLFVDEGLKNYVPVNHFWDQSEPRLFVCEAVQETPRSQPQSANGQPQDGRAGPAADVLILSFFISEEHGFLLHESFPRPATSHSLLGMEVPYYYFTRKPEEADREDEVEPGCHHIPQMVSRRPLRDFVGLEDCDKATRDAMLHFSFFVTIGDMDEAFKSIKLIKRA

SEQ ID NO: 181791 - DNA, 1971 bp, Artificial Sequence
  derived and/or modified sequence
atggccagaatgtgcgtgaagacccagagactggacgtggccaaggtgtgcctgggcaacatgggccacgccagaggcgccagagccctgagagaggccgagcaggagcccgagctggaggccagagtggccgtgctggccacccagctgggcatgctggaggacgccgagcagctgtacagaaagtgcaagagacacgacctgctgaacaagttctaccaggccgccggcagatggcaggaggccctgcaggtggccgagcaccacgacagagtgcacctgagaagcacctaccacagatacgccggccacctggaggccagcgccgactgcagcagagccctgagctactacgagaagagcgacacccacagattcgaggtgcccagaatgctgagcgaggacctgcccagcctggagctgtacgtgaacaagatgaaggacaagaccctgtggagatggtgggcccagtacctggagagccagggcgagatggacgccgccctgcactactacgagctggccagagaccacttcagcctggtgagaatccactgcttccagggcaacgtgcagaaggccgcccagatcgccaacgagaccggcaacctggccgccagctaccacctggccagacagtacgagagccaggaggaggtgggccaggccgtgcacttctacaccagagcccaggccttcaagaacgccatcagactgtgcaaggagaacggcctggacgaccagctgatgaacctggccctgctgagcagccccgaggacatgatcgaggccgccagatactacgaggagaagggcgtgcagatggacagagccgtgatgctgtaccacaaggccggccacttcagcaaggccctggagctggccttcgccacccagcagttcgtggccctgcagctgatcgccgaggacctggacgagaccagcgaccccgccctgctggccagatgcagcgacttcttcatcgagcacagccagtacgagagagccgtggagctgctgctggccgccagaaagtaccaggaggccctgcagctgtgcctgggccagaacatgagcatcaccgaggagatggccgagaagatgaccgtggccaaggacagcagcgacctgcccgaggagagcagaagagagctgctggagcagatcgccgactgctgcatgagacagggcagctaccacctggccaccaagaagtacacccaggccggcaacaagctgaaggccatgagagccctgctgaagagcggcgacaccgagaagatcaccttcttcgccagcgtgagcagacagaaggagatctacatcatggccgccaactacctgcagagcctggactggagaaaggagcccgagatcatgaagaacatcatcggcttctacaccaagggcagagccctggacctgctggccggcttctacgacgcctgcgcccaggtggagatcgacgagtaccagaactacgacaaggcccacggcgccctgaccgaggcctacaagtgcctggccaaggccaaggccaagagccccctggaccaggagaccagactggcccagctgcagagcagaatggccctggtgaagagattcatccaggccagaagaacctacaccgaggaccccaaggagagcatcaagcagtgcgagctgctgctggaggagcccgacctggacagcaccatcagaatcggcgacgtgtacggcttcctggtggagcactacgtgagaaaggaggagtaccagaccgcctacagattcctggaggagatgagaagaagactgcccctggccaacatgagctactacgtgagcccccaggccgtggacgccgtgcacagaggcctgggcctgcccctgcccagaaccgtgcccgagcaggtgagacacaacagcatggaggacgccagagagctggacgaggaggtggtggaggaggccgacgacgacccctag

SEQ ID NO: 181792 - DNA, 4389 bp, Artificial Sequence
  derived and/or modified sequence
atggccctgtactacgaccaccagatcgaggcccccgacgccgccggcagccccagcttcatcagctggcaccccgtgcaccccttcctggccgtggcctacatcagcaccaccagcaccggcagcgtggacatctacctggagcagggcgagtgcgtgcccgacacccacgtggagagacccttcagagtggccagcctgtgctggcaccccaccagactggtgctggccgtgggctgggagaccggcgaggtgaccgtgttcaacaagcaggacaaggagcagcacaccatgcccctgacccacaccgccgacatcaccgtgctgagatggagccccagcggcaactgcctgctgagcggcgacagactgggcgtgctgctgctgtggagactggaccagagaggcagagtgcagggcacccccctgctgaagcacgagtacggcaagcacctgacccactgcatcttcagactgcccccccccggcgaggacctggtgcagctggccaaggccgccgtgagcggcgacgagaaggccctggacatgttcaactggaagaagagcagcagcggcagcctgctgaagatgggcagccacgagggcctgctgttcttcgtgagcctgatggacggcaccgtgcactacgtggacgagaagggcaagaccacccaggtggtgagcgccgacagcaccatccagatgctgttctacatggagaagagagaggccctggtggtggtgaccgagaacctgagactgagcctgtacaccgtgccccccgagggcaaggccgaggaggtgatgaaggtgaagctgagcggcaagaccggcagaagagccgacatcgccctgatcgagggcagcctgctggtgatggccgtgggcgaggccgccctgagattctgggacatcgagagaggcgagaactacatcctgagccccgacgagaagttcggcttcgagaagggcgagaacatgaactgcgtgtgctactgcaaggtgaagggcctgctggccgccggcaccgacagaggcagagtggccatgtggagaaaggtgcccgacttcctgggcagccccggcgccgagggcaaggacagatgggccctgcagacccccaccgagctgcagggcaacatcacccagatccagtggggcagcagaaagaacctgctggccgtgaacagcgtgatcagcgtggccatcctgagcgagagagccatgagcagccacttccaccagcaggtggccgccatgcaggtgagccccagcctgctgaacgtgtgcttcctgagcaccggcgtggcccacagcctgagaaccgacatgcacatcagcggcgtgttcgccaccaaggacgccgtggccgtgtggaacggcagacaggtggccatcttcgagctgagcggcgccgccatcagaagcgccggcaccttcctgtgcgagacccccgtgctggccatgcacgaggagaacgtgtacaccgtggagagcaacagagtgcaggtgagaacctggcagggcaccgtgaagcagctgctgctgttcagcgagaccgagggcaacccctgcttcctggacatctgcggcaacttcctggtggtgggcaccgacctggcccacttcaagagcttcgacctgagcagaagagaggccaaggcccactgcagctgcagaagcctggccgagctggtgcccggcgtgggcggcatcgccagcctgagatgcagcagcagcggcagcaccatcagcatcctgcccagcaaggccgacaacagccccgacagcaagatctgcttctacgacgtggagatggacaccgtgaccgtgttcgacttcaagaccggccagatcgacagaagagagaccctgagcttcaacgagcaggagaccaacaagagccacctgttcgtggacgagggcctgaagaactacgtgcccgtgaaccacttctgggaccagagcgagcccagactgttcgtgtgcgaggccgtgcaggagacccccagaagccagccccagagcgccaacggccagccccaggacggcagagccggccccgccgccgacgtgctgatcctgagcttcttcatcagcgaggagcacggcttcctgctgcacgagagcttccccagacccgccaccagccacagcctgctgggcatggaggtgccctactactacttcaccagaaagcccgaggaggccgacagagaggacgaggtggagcccggctgccaccacatcccccagatggtgagcagaagacccctgagagacttcgtgggcctggaggactgcgacaaggccaccagagacgccatgctgcacttcagcttcttcgtgaccatcggcgacatggacgaggccttcaagagcatcaagctgatcaagagcgaggccgtgtgggagaacatggccagaatgtgcgtgaagacccagagactggacgtggccaaggtgtgcctgggcaacatgggccacgccagaggcgccagagccctgagagaggccgagcaggagcccgagctggaggccagagtggccgtgctggccacccagctgggcatgctggaggacgccgagcagctgtacagaaagtgcaagagacacgacctgctgaacaagttctaccaggccgccggcagatggcaggaggccctgcaggtggccgagcaccacgacagagtgcacctgagaagcacctaccacagatacgccggccacctggaggccagcgccgactgcagcagagccctgagctactacgagaagagcgacacccacagattcgaggtgcccagaatgctgagcgaggacctgcccagcctggagctgtacgtgaacaagatgaaggacaagaccctgtggagatggtgggcccagtacctggagagccagggcgagatggacgccgccctgcactactacgagctggccagagaccacttcagcctggtgagaatccactgcttccagggcaacgtgcagaaggccgcccagatcgccaacgagaccggcaacctggccgccagctaccacctggccagacagtacgagagccaggaggaggtgggccaggccgtgcacttctacaccagagcccaggccttcaagaacgccatcagactgtgcaaggagaacggcctggacgaccagctgatgaacctggccctgctgagcagccccgaggacatgatcgaggccgccagatactacgaggagaagggcgtgcagatggacagagccgtgatgctgtaccacaaggccggccacttcagcaaggccctggagctggccttcgccacccagcagttcgtggccctgcagctgatcgccgaggacctggacgagaccagcgaccccgccctgctggccagatgcagcgacttcttcatcgagcacagccagtacgagagagccgtggagctgctgctggccgccagaaagtaccaggaggccctgcagctgtgcctgggccagaacatgagcatcaccgaggagatggccgagaagatgaccgtggccaaggacagcagcgacctgcccgaggagagcagaagagagctgctggagcagatcgccgactgctgcatgagacagggcagctaccacctggccaccaagaagtacacccaggccggcaacaagctgaaggccatgagagccctgctgaagagcggcgacaccgagaagatcaccttcttcgccagcgtgagcagacagaaggagatctacatcatggccgccaactacctgcagagcctggactggagaaaggagcccgagatcatgaagaacatcatcggcttctacaccaagggcagagccctggacctgctggccggcttctacgacgcctgcgcccaggtggagatcgacgagtaccagaactacgacaaggcccacggcgccctgaccgaggcctacaagtgcctggccaaggccaaggccaagagccccctggaccaggagaccagactggcccagctgcagagcagaatggccctggtgaagagattcatccaggccagaagaacctacaccgaggaccccaaggagagcatcaagcagtgcgagctgctgctggaggagcccgacctggacagcaccatcagaatcggcgacgtgtacggcttcctggtggagcactacgtgagaaaggaggagtaccagaccgcctacagattcctggaggagatgagaagaagactgcccctggccaacatgagctactacgtgagcccccaggccgtggacgccgtgcacagaggcctgggcctgcccctgcccagaaccgtgcccgagcaggtgagacacaacagcatggaggacgccagagagctggacgaggaggtggtggaggaggccgacgacgacccctag

SEQ ID NO: 181793 - DNA, 1971 bp, Artificial Sequence
  derived and/or modified sequence
atggccaggatgtgcgtgaagacccagcgactggacgtggccaaggtgtgtctaggaaatatgggacatgctaggggcgcccgggcgctccgtgaagccgagcaggagcccgaattggaggcccgggtggcagtcttggccacccaattggggatgctcgaggacgccgagcagttatatcgaaaatgtaaaagacacgaccttttgaacaagttctaccaggctgctgggcggtggcaggaggcccttcaagtggcggagcaccatgatcgggtccatcttagatcgacctatcatcggtatgcagggcatctagaagcctctgccgactgtagtcgcgcactgagctactacgaaaagtccgacacacacaggttcgaagtccctcgcatgctttccgaggatttaccctccctggaattatatgttaataaaatgaaagacaagactctgtggagatggtgggcacagtacttggagtcgcaaggggagatggatgctgctctccattactacgagctcgcgagggatcatttttccctggtccgaatacactgttttcaggggaatgttcagaaagcggcccagattgctaatgagacagggaacctggcagcgagttatcatcttgccaggcagtacgaatcacaggaggaggtgggtcaggctgtgcacttctataccagagcgcaagccttcaagaatgccatcagactatgcaaggagaatggccttgatgatcagctaatgaatctggccttattgtccagccccgaagatatgatcgaagcggcccggtattacgaggagaaaggggtccaaatggacagggctgtgatgttgtatcataaagccgggcacttctcaaaggccctggagttagcctttgccacccaacagtttgtagctctacagctaattgctgaagatttggatgagaccagcgaccccgccctgttagcaaggtgctccgactttttcattgagcactcccaatatgaacgggccgtggagttgctcctggcagcaaggaagtatcaagaggctttacaactatgtttaggccagaacatgtccatcactgaggagatggccgaaaaaatgaccgttgcaaaggactcctcggacctgccagaggaatcaaggcgggagctgctggagcagattgctgactgttgtatgcggcaggggtcatatcatctggcaaccaagaagtatactcaggcgggcaataagttgaaagcgatgcgggccctgctcaagagtggtgatactgaaaagatcactttcttcgcctctgtgtcaagacagaaggaaatatacattatggcagccaattacctgcaatcgttggactggcgcaaggagcctgaaatcatgaagaatattatcgggttctacactaagggacgcgcgctggacctgttagccggtttttatgacgcttgcgcgcaggtcgagattgacgagtaccagaattacgataaggcacacggggccctaacagaagcctataaatgcctcgccaaggccaaagctaaatcaccattggaccaggagacccgcctggcccagctccaaagtcggatggcgctagtgaagaggtttattcaagctcgccggacgtacaccgaagatcctaaagagagcattaagcaatgcgagctgctgctggaagagccagatctggattccacaattcgcattggtgatgtgtatgggttcctggtggagcattacgtaaggaaggaagaatatcaaaccgcttacaggtttttagaagagatgcgccgccgcctacctttagccaacatgtcctactacgtgtccccacaggccgtggacgctgtccaccgtgggctgggcctgccactgccgcgtaccgtcccagagcaggtgagacataattccatggaggatgcccgggaattggacgaagaggtggtggaagaggctgacgatgatccctag

SEQ ID NO: 181794 - DNA, 4389 bp, Artificial Sequence
  derived and/or modified sequence
atggccctgtattacgatcatcagatcgaagcacccgacgcagcgggctccccatccttcattagctggcaccccgtacacccatttttagctgtggcatatatctctacaacctcaacaggcagcgtggatatatacctggagcagggagaatgtgtgccagacactcatgtcgaacggcctttccgcgtggcgtctctgtgttggcatcccacccgtttggtccttgccgtgggttgggagacaggtgaggtaacagtgttcaacaagcaggacaaagagcaacataccatgccacttacgcataccgccgacatcacagttcttcgttggtcaccttctggtaactgcttacttagcggagacaggcttggggtgctccttctgtggcggctcgaccagagaggcagagtacaagggactccactgctgaaacacgagtatggaaagcatctaacccattgtatcttcagattacctccccccggggaagacttagtccagctggcgaaagctgctgtttccggagacgagaaggccttagacatgttcaattggaaaaagtcctctagcggctctctgctgaaaatgggaagccatgaaggattgttgttttttgtcagtctcatggatggcaccgttcattacgtcgatgagaaaggcaaaaccacacaggtggtgtctgctgattccactattcagatgctgttttacatggaaaaaagggaggctctcgttgtcgtgactgaaaacctgcgtctgtcactctatactgttccgccggaaggcaaggctgaggaggtgatgaaagtgaaactgagtgggaagactggtaggcgcgcagacatcgccctgattgaaggcagtctgctggtgatggctgtgggcgaggcagctttgagattttgggacattgagagaggggaaaattacattctgtctcccgatgaaaagtttggatttgaaaagggagagaatatgaattgtgtatgctactgtaaggtgaagggactcctggccgccggaacagatcgaggaagagtggctatgtggaggaaagtgccggactttctcgggagtccgggtgctgaagggaaggacaggtgggctttgcagacacctacagagctacagggaaatatcacacagattcagtggggcagccgcaagaatttgctcgctgtgaattctgtaatctcggtggctatccttagcgaaagggcaatgtcctcacacttccaccaacaagttgctgctatgcaggtttcacccagtctcctgaacgtatgtttcctgtccacaggagtcgcacattccctcaggacggatatgcacatatcaggcgttttcgccactaaagatgccgttgctgtctggaacggtaggcaggttgctatttttgagttgtccggggcggccattcgctctgccggtacctttctctgtgaaacacccgtattagccatgcatgaggaaaatgtgtatacagtagagtctaatagagtgcaggttcgaacttggcagggaacagtaaaacagctgctgttattcagcgaaacagaaggcaacccatgcttccttgatatttgcggaaatttccttgtagtgggcactgatctggcccacttcaaatcatttgacctgtctcgccgcgaggccaaggcgcactgctcttgccgctctcttgcggaactggtaccgggagttggggggatcgcctccctgcgttgcagctccagtggatcgactataagcatcttgcccagcaaagctgataactctcctgactccaaaatttgcttttatgatgtggagatggatactgtgactgtttttgactttaagaccgggcaaatcgacagaagagagaccctgagcttcaacgaacaggaaaccaataaatctcacctctttgtggatgaaggcctgaagaattacgttcccgttaaccatttttgggaccagagtgaaccccgcctgtttgtgtgtgaagccgtccaagaaaccccccgcagccagccccagtcagccaacggacagccacaggacgggagagccgggcccgccgccgatgtcctgattctcagtttttttatatcagaagaacatggattcctcctgcacgagagcttccccagaccagcgacctcccattctctccttggcatggaggtgccctattactactttacacgaaaacccgaagaggccgaccgagaagacgaagttgaaccagggtgccaccacattcctcagatggtctctcgcagaccactccgagacttcgtcggactggaggattgcgacaaagccaccagagatgccatgttgcacttttcctttttcgtgaccattggggacatggacgaggccttcaagagcattaagttgattaagtctgaggccgtatgggagaatatggcacggatgtgcgtcaagacccaacggctcgacgtggctaaggtgtgtctcggcaacatgggccacgctaggggtgccagggcactgagagaagcagagcaggagccggagttagaggcaagagtggccgtcctggcaacacagttggggatgctcgaagacgctgagcagctataccggaagtgtaaacggcacgacctactgaataagttctatcaggccgctggacgctggcaggaagcacttcaggtggccgaacatcacgaccgtgtacatcttcgcagtacctaccaccggtacgctgggcatctcgaagcgtccgcagactgttcccgcgcattgagctactacgaaaaaagtgacacccataggttcgaggtgccacgcatgctcagtgaagacttgccctccctggaattgtatgtgaataaaatgaaggacaagaccctttggagatggtgggctcagtacctcgagagccagggagaaatggatgcggccctgcattactatgaactcgcccgagaccactttagcttggttaggatccactgctttcagggcaatgtgcagaaggcagctcaaattgctaatgaaaccggcaacctggccgccagttatcatctcgcccgccagtatgaaagccaggaggaagtcggccaggcagtgcatttttacacccgggcacaagcctttaagaacgctatccgcctgtgcaaagagaacggcttggatgatcagttgatgaatctcgcactgctttccagccccgaggacatgatcgaagctgcccgttattatgaagaaaagggggtgcagatggatcgagccgtcatgctgtaccacaaggctggtcattttagcaaggcactggaattggcttttgccacccagcaatttgtcgccctccagctgatcgccgaagacttggatgagacatctgacccagcactgctggcccggtgctcagatttcttcatcgagcactcccaatatgagcgcgccgtcgagctactacttgccgcgagaaagtaccaggaggctttgcagctgtgccttggacagaatatgagcattaccgaggagatggcagaaaagatgactgtcgctaaggactcctctgacctgcccgaagagtccagaagagagctcctggagcagatcgccgattgttgcatgagacagggctcttaccacctcgcaactaagaaatatacacaggccggaaataagttaaaggcaatgcgcgccctgttgaaaagtggcgacacggaaaaaattaccttcttcgcttcagtcagccgacagaaggagatctatattatggctgcaaactacctgcagtcccttgactggcggaaggagcccgagataatgaaaaatattatcggcttctataccaagggcagagccttggacctgctggcggggttttacgatgcttgtgctcaggtggaaattgatgagtatcagaattatgataaagcccatggcgccctcacagaagcctataaatgtcttgctaaggcaaaagccaagtcccctctggaccaggagacgagactcgctcagctccagagccggatggcgctggtgaaacgtttcatccaggcccgcagaacctataccgaggaccctaaggaatctatcaagcagtgcgaactgttgttggaagagcctgacctggactcaacaatccggatcggtgatgtgtatggtttcttggtagagcattacgtgaggaaagaggaataccagactgcatatagatttctagaggaaatgaggaggaggctgcctctcgccaacatgagttattacgtgtctccacaggccgtcgacgccgtgcaccggggtctgggacttcctctgccccggacggtgcccgaacaagttcggcacaactcgatggaagacgcacgggagcttgatgaggaagtagtggaggaggctgatgacgatccttag

SEQ ID NO: 181795 - DNA, 4389 bp, Artificial Sequence
  derived and/or modified sequence
atggccctgtactatgaccaccaaattgaggccccggacgccgccggcagcccaagtttcatttcctggcaccctgtgcacccttttcttgcagttgcctacatttctactacgagcaccggatctgtggacatctatctggagcaaggcgagtgtgtgcccgatactcatgtcgaacgccctttccgggtggccagtctctgctggcatccaacgcgcttggtgttggcggtgggttgggaaaccggagaagtgacggttttcaataagcaggataaggaacagcataccatgccactgactcataccgctgacattactgtgcttaggtggtccccgagtggcaattgtctcctttccggggaccgcctcggggtgctcctattatggcggctcgatcagagagggcgcgtacaagggacccctttactaaaacacgaatacgggaaacatcttacgcactgcattttccgcctgccccctccaggtgaggacctggtgcagctggctaaggctgccgtttccggcgacgaaaaagcactggacatgtttaattggaagaagtcctcttctggatcgctcctgaagatgggcagccatgagggactcttgttttttgtctccctgatggatggaactgtacactatgtggacgaaaaagggaaaactacccaggtggtctcagccgactccaccattcaaatgttgttttacatggagaaaagggaagccttagtcgtggtcaccgagaatcttcgcctgtctctgtacacagtaccacccgagggcaaggctgaggaggtcatgaaagtgaagctgagcggcaagactgggcgccgggcagacatcgctcttattgagggaagccttcttgtaatggccgtgggggaggccgcattgagattttgggacatcgaaagaggcgagaactacattctgtcccccgatgaaaagttcggtttcgagaagggtgagaacatgaactgtgtgtgctactgcaaggtcaagggactcctcgcagcaggaaccgacagaggacgagtggccatgtggagaaaagtgccagattttctcggctcccccggagctgagggtaaggatcggtgggctctccaaacccccacagagctgcaggggaatatcacacaaatccagtgggggagcaggaagaaccttctggcagtcaattcagttatcagcgttgcaatcctctcggaaagagcaatgagttctcactttcaccagcaggtcgctgccatgcaggttagcccatcactgctgaatgtgtgttttctatctactggcgtcgcgcatagcttgcgtaccgatatgcacattagtggcgtttttgccaccaaggacgcagttgccgtgtggaacgggagacaggtggctatattcgagctgtccggcgcagcaattcgatcagcaggtactttcttgtgtgagacacctgtgctcgctatgcacgaggaaaacgtgtacacggtcgaatccaatcgggtgcaggttaggacatggcaggggacggtcaagcagctactcctcttttcagagacagagggaaatccatgcttcctggacatctgtgggaatttcctcgttgtcggtaccgatctggcgcacttcaaaagttttgacctctctagacgggaggcaaaagctcactgcagctgcaggtccctggctgagctggttcccggggtggggggcatcgcatctttgcggtgtagctctagcggctccaccatctccatactgccttctaaggccgacaactccccggatagcaaaatctgcttctatgacgtggagatggacacagttacagtcttcgactttaagacagggcagatagatagaagagaaaccctgagttttaatgaacaagaaacgaataaatcccacttatttgtggatgaaggtctcaagaattatgtgcccgtgaaccacttttgggatcagtccgagcccagactgtttgtctgcgaagcagtacaggagacaccacgtagccaaccacagagcgctaacggacagccccaggatggtagggccgggccagccgcagacgtgcttatcttaagcttcttcatttcagaggagcacggatttttgttgcatgaatccttcccccgccccgcaacgagtcattctttgctgggaatggaagtaccttattattactttacacggaagcctgaggaagcggacagagaggacgaggttgaaccggggtgccatcatatacctcaaatggtgtctagacggcccctgagagatttcgtgggcctggaagattgcgataaggcaaccagagacgccatgctccatttctctttttttgtgaccatcggagacatggatgaagcttttaaatctatcaaactgatcaaatctgaggcagtgtgggagaatatggcgagaatgtgcgtaaaaacccagcggctggacgtagctaaagtgtgtcttggcaacatgggtcacgcgcgcggggcgagagcactcagagaggcagagcaggagcctgagctcgaggctcgcgtggcagttctggccactcagctgggcatgctggaagacgccgagcagctctatcgaaaatgcaaaagacacgatctgctaaacaaattttatcaggcggcaggtagatggcaggaagccctgcaggtcgcggaacatcatgatagggtccacctgaggagcacataccatcggtacgccggtcatctggaggcttcagcagattgttcccgggcattatcctactatgaaaaatccgacacgcaccggtttgaagtgccccgtatgttgtccgaagatttaccatctttggaactgtacgtgaacaagatgaaggacaagacactttggaggtggtgggcccagtatttagagtcacagggggaaatggatgccgccctccactactacgaactggccagggatcactttagcctagtgcgcattcactgcttccagggcaacgttcagaaagctgcccagattgctaatgaaacaggcaatctcgccgcttcttaccatctagctaggcagtatgagtcacaggaagaggtgggacaagcagtccacttttatacacgggcacaggcattcaagaacgcaatcaggctgtgcaaagaaaacggtctagatgaccagctgatgaacctagcccttcttagctcccccgaggacatgatcgaggcggcccggtattatgaggaaaagggagtccagatggaccgggccgtaatgttatatcataaagcgggccatttctctaaagccctggagctcgccttcgccacacaacagtttgtcgccctccagctcattgcggaagacctagatgaaacgtccgaccccgccctcctggcacgctgtagcgacttcttcatagagcactcccaatatgagagagcagtggagttgttgttggccgcacggaagtatcaagaagcccttcaactctgtttggggcagaacatgtccataaccgaagaaatggctgagaagatgacggtggccaaggattcctccgacctgcccgaggagtctcgtcgggagctgctggagcagatcgccgattgctgcatgcgacagggaagctaccacctcgccacaaagaagtacacacaggctggcaacaagctgaaagcaatgcgcgcccttctgaagtcaggagatacagagaagattaccttctttgcttccgtgtcaagacagaaagaaatatacataatggcagcaaactacctccagagcctcgattggcggaaggagcctgagattatgaagaatatcatcggcttttacaccaaaggaagggctctagacttactggctggattctatgatgcttgtgctcaggtggaaatcgacgagtaccagaattacgataaagcgcatggagctctgacagaggcctacaagtgccttgcaaaggccaaagcaaagagccctcttgaccaggaaacacggctcgcccagctccagtcaagaatggccctcgtcaaacggttcattcaggctaggagaacatacacagaagatcctaaggaatcaatcaagcagtgtgagctgttactcgaggagcccgatctcgactccacaattcggattggggatgtgtacggcttcctggttgagcactacgtgcgcaaggaggagtatcagacagcctaccggtttctcgaggagatgaggagacgcctgccactcgctaatatgagctactacgtgagtccacaggccgtggacgccgtacaccgcggactcggcttaccattacctcggactgtgccagaacaggtcaggcacaattctatggaggatgcaagggaacttgacgaggaggtggtcgaggaagccgacgatgatccgtag

SEQ ID NO: 181796 - DNA, 1971 bp, Artificial Sequence
  derived and/or modified sequence
atggccaggatgtgtgtgaagacccagaggctggatgtggccaaggtgtgcctgggcaacatgggccacgcccggggggcccgggccctgcgggaggccgagcaggagcctgagctggaggcccgggtggccgtgctggccacccagctgggcatgctggaggatgctgagcagctgtacaggaagtgcaagagacatgacctgctgaacaagttctaccaggccgccggccgctggcaggaggccctgcaggtggccgagcaccacgacagagtgcacctgcggagcacctaccacagatatgccggccacctggaggccagcgctgactgcagccgggccctgagctactatgagaagagtgacacccacagatttgaggtgcccaggatgctgtctgaggacctgcccagcctggagctgtatgtgaacaagatgaaggacaagaccctgtggcgctggtgggcccagtacctggagagccagggcgagatggatgctgccctgcactactatgagctggcccgggaccacttcagcctggtgcgcatccactgcttccagggcaatgtgcagaaggccgcccagatcgccaatgaaacaggcaacctggccgccagctaccacctggcccggcagtatgagagccaggaggaggtgggccaggccgtgcacttctacacccgggcccaggccttcaagaatgccatccggctgtgcaaggaaaatggcctggatgaccagctgatgaacctggccctgctgagcagccctgaggacatgattgaggccgcccgctactatgaggagaagggcgtgcagatggacagagctgtgatgctgtaccacaaggccggccacttcagcaaggccctggagctggcctttgccacccagcagtttgtggccctgcagctgattgctgaggacctggatgagaccagtgaccctgccctgctggcccgctgcagcgacttcttcatcgagcacagccagtatgaaagagctgtggagctgctgctggccgccaggaagtaccaggaggccctgcagctgtgcctgggccagaacatgagcatcacagaggagatggccgagaagatgacagtggccaaggacagcagtgacctgcctgaggagagccggcgggagctgctggagcagattgctgactgctgcatgaggcagggcagctaccacctggccaccaagaagtacacccaggccggcaacaagctgaaggccatgagggccctgctgaagagcggggacacagagaagatcaccttctttgcctctgtgtcccggcagaaggagatctacatcatggccgccaactacctgcagagcctggactggaggaaggagcctgagatcatgaagaacatcatcggcttctacaccaagggccgggccctggacctgctggccggcttctatgatgcctgtgcccaggtggagattgatgagtaccagaactatgacaaggcccacggggccctgacagaggcctacaagtgcctggccaaggccaaggccaagagccccctggaccaggagacccggctggcccagctgcagagcaggatggccctggtgaagcgcttcatccaggcccggaggacctacacagaggaccccaaggagagcatcaagcagtgtgagctgctgctggaggagccagacctggacagcaccatcagaattggagatgtgtatggcttcctggtggagcactacgtgaggaaggaggagtaccagacagcctaccgcttcctggaggagatgagaagaaggctgcccctggccaacatgagctactacgtgagcccccaggccgtggatgctgtgcaccggggcctgggcctgcccctgcccaggacagtgcctgagcaggtgcgccacaacagcatggaggatgcccgggagctggatgaggaggtggtggaggaggctgatgatgacccctag

SEQ ID NO: 181797 - DNA, 4389 bp, Artificial Sequence
  derived and/or modified sequence
atggccctgtactatgaccaccagatcgaggccccagatgctgctggcagccccagcttcatctcctggcaccctgtgcaccccttcctggccgtggcctacatcagcaccaccagcacaggctctgtggacatctacctggagcagggagaatgtgtgcctgacacccacgtggagcggcccttccgggtggccagcctgtgctggcaccccacccggctggtgctggccgtgggctgggagaccggggaggtgaccgtcttcaacaagcaggacaaggagcagcacaccatgcccctgacccacacagctgacatcaccgtgctgcgctggagccccagcggcaactgcctgctgagcggggaccggctgggcgtgctgctgctgtggaggctggaccagaggggccgggtgcagggcacccccctgctgaagcatgaatatggcaagcacctgacccactgcatcttccggctgcccccacctggagaggacctggtgcagctggccaaggctgctgtgtctggagatgagaaggccctggacatgttcaactggaagaagagcagcagcggcagcctgctgaagatgggcagccatgagggcctgctcttctttgtgtccctgatggatggcaccgtgcactacgtggatgagaagggcaagaccacccaggtggtgtctgctgacagcaccatccagatgctgttctacatggagaagcgggaggccctggtggtggtgacagagaacctgcggctgagcctgtacacagtgcccccagagggcaaggccgaggaggtgatgaaggtgaagctgagcggcaagacaggaagaagagctgacatcgccctgattgagggcagcctgctggtgatggctgtgggggaggccgccctgcgcttctgggacatcgagagaggagagaactacatcctgagcccagatgagaagtttggatttgagaagggggagaacatgaactgtgtgtgctactgcaaggtgaagggcctgctggccgccggcacagaccggggccgggtggccatgtggaggaaggtgcctgacttcctgggcagccctggagctgagggcaaggaccgctgggccctgcagacccccacagagctgcagggcaacatcacccagatccagtggggcagcaggaagaacctgctggccgtgaacagcgtcatctctgtggccatcctgtctgagcgggccatgagcagccacttccaccagcaggtggccgccatgcaggtgagccccagcctgctgaatgtgtgcttcctgagcactggagtggcccacagcctgaggacagacatgcacatctctggagtgtttgccaccaaggatgctgtggccgtgtggaatggccggcaggtggccatctttgagctgagcggggccgccatccgctctgctggcaccttcctgtgtgagacccctgtgctggccatgcatgaggagaatgtgtacacagtggagagcaacagagtgcaggtgaggacctggcagggcaccgtgaagcagctgctgctcttcagcgagacagagggcaacccctgcttcctggacatctgtggcaacttcctggtggtgggcacagacctggcccacttcaagagctttgacctgagccggcgggaggccaaggcccactgcagctgccgcagcctggccgagctggtgcctggggtgggcggcatcgccagcctgcgctgcagcagcagcggcagcaccatcagcatcctgcccagcaaggctgacaacagcccagacagcaagatctgcttctatgatgtggagatggacacagtgacagtgtttgacttcaagacaggccagattgacagaagagagaccctgtccttcaatgagcaggagaccaacaagagccacctgtttgtggatgagggcctgaagaactacgtgcctgtgaaccacttctgggaccagagcgagccccggctgtttgtgtgtgaggccgtgcaggagacccccaggagccagccccagagcgccaacggccagccccaggacggccgggccggccctgctgctgatgtgctgatcctgtccttcttcatcagcgaggagcacggcttcctgctgcacgagagcttccccaggcctgccaccagccacagcctgctgggcatggaggtgccctactactacttcaccaggaagccagaggaggccgaccgggaggatgaggtggagcccggctgccaccacatcccccagatggtgtcccggcggcccctgcgggactttgtgggcctggaggactgtgacaaggccaccagagatgccatgctgcacttctccttctttgtgaccatcggggacatggatgaggccttcaagagcatcaagctgatcaagtctgaggccgtgtgggagaacatggccaggatgtgtgtgaagacccagaggctggatgtggccaaggtgtgcctgggcaacatgggccacgcccggggggcccgggccctgcgggaggccgagcaggagcctgagctggaggcccgggtggccgtgctggccacccagctgggcatgctggaggatgctgagcagctgtacaggaagtgcaagagacatgacctgctgaacaagttctaccaggccgccggccgctggcaggaggccctgcaggtggccgagcaccacgacagagtgcacctgcggagcacctaccacagatatgccggccacctggaggccagcgctgactgcagccgggccctgagctactatgagaagagtgacacccacagatttgaggtgcccaggatgctgtctgaggacctgcccagcctggagctgtatgtgaacaagatgaaggacaagaccctgtggcgctggtgggcccagtacctggagagccagggcgagatggatgctgccctgcactactatgagctggcccgggaccacttcagcctggtgcgcatccactgcttccagggcaatgtgcagaaggccgcccagatcgccaatgaaacaggcaacctggccgccagctaccacctggcccggcagtatgagagccaggaggaggtgggccaggccgtgcacttctacacccgggcccaggccttcaagaatgccatccggctgtgcaaggaaaatggcctggatgaccagctgatgaacctggccctgctgagcagccctgaggacatgattgaggccgcccgctactatgaggagaagggcgtgcagatggacagagctgtgatgctgtaccacaaggccggccacttcagcaaggccctggagctggcctttgccacccagcagtttgtggccctgcagctgattgctgaggacctggatgagaccagtgaccctgccctgctggcccgctgcagcgacttcttcatcgagcacagccagtatgaaagagctgtggagctgctgctggccgccaggaagtaccaggaggccctgcagctgtgcctgggccagaacatgagcatcacagaggagatggccgagaagatgacagtggccaaggacagcagtgacctgcctgaggagagccggcgggagctgctggagcagattgctgactgctgcatgaggcagggcagctaccacctggccaccaagaagtacacccaggccggcaacaagctgaaggccatgagggccctgctgaagagcggggacacagagaagatcaccttctttgcctctgtgtcccggcagaaggagatctacatcatggccgccaactacctgcagagcctggactggaggaaggagcctgagatcatgaagaacatcatcggcttctacaccaagggccgggccctggacctgctggccggcttctatgatgcctgtgcccaggtggagattgatgagtaccagaactatgacaaggcccacggggccctgacagaggcctacaagtgcctggccaaggccaaggccaagagccccctggaccaggagacccggctggcccagctgcagagcaggatggccctggtgaagcgcttcatccaggcccggaggacctacacagaggaccccaaggagagcatcaagcagtgtgagctgctgctggaggagccagacctggacagcaccatcagaattggagatgtgtatggcttcctggtggagcactacgtgaggaaggaggagtaccagacagcctaccgcttcctggaggagatgagaagaaggctgcccctggccaacatgagctactacgtgagcccccaggccgtggatgctgtgcaccggggcctgggcctgcccctgcccaggacagtgcctgagcaggtgcgccacaacagcatggaggatgcccgggagctggatgaggaggtggtggaggaggctgatgatgacccctag

SEQ ID NO: 181798 - DNA, 5131 bp, Artificial Sequence
  derived and/or modified sequence
gcagagcggaataacctggcccccgacgctcgggcctcggagctgcacgtgcgtgcccgatcgccttcggctctttccggccgctcggggcgcttcgggagtcctcggggccgcctcgctcaccttcggctatttccgcgttcctggcgcgccgttgtcccggcaacgcgcggcggctcagcggcctggcagaggtttcagcgctgaggaggcctgagttccgtcatggccctctattatgaccaccagatagaagccccggatgcagcagggtcaccctcatttatcagctggcaccctgtccatccattcttggcagttgcttacatcagcacaacctcaacaggcagcgtggatatttacctggagcaaggggagtgcgtgccagatacacacgtcgagaggccgttccgggttgcttccctgtgctggcacccgacgcggctggtgctggctgtgggctgggagactggagaagtgacggtgtttaacaagcaggacaaggagcagcacacgatgcccctgacacacacagccgacatcaccgtgctccgttggagccccagtggaaactgcctgctgtctggggacaggcttggtgtcttgctcttgtggaggttggaccaaaggggccgagtgcaagggacgcctctgctgaaacacgagtatgggaaacacctcacgcactgcatcttccggctcccccctcctggcgaggacctggttcagttggcaaaggcagctgtgagcggtgatgagaaagccctggacatgtttaactggaagaagagcagttctggaagtttgctgaagatggggtctcacgaggggctgttgttctttgtcagtctgatggacgggacagtgcactatgtggatgagaagggcaagaccactcaggtggtgtccgcagacagcacgattcagatgctgttctacatggagaagagggaggcactggtggtggtcacagagaacctccggctgtccctgtacacggtgcctcctgagggcaaagcagaagaagtgatgaaggtcaagctgagcgggaaaaccggccgccgggcagacatcgctttgattgaaggcagccttctcgtgatggccgtcggggaggctgccctcagattctgggacatagaacgaggagagaattatatactgagtccagatgagaagtttggctttgagaaaggagagaatatgaactgtgtgtgttactgtaaagtcaaaggtcttctggccgctggtaccgacagagggcgagtagccatgtggaggaaagtaccagacttcctgggcagccccggggcagagggcaaggacaggtgggcccttcagacccctaccgagctccaaggaaacatcacgcaaatccagtggggttccaggaagaacctgctggcagtgaacagcgtcatctccgtggccatcctcagcgagcgggccatgtcgtcacacttccaccagcaagtggccgccatgcaggtctccccgagtctgctgaatgtgtgcttcctgtccacgggggtcgcacacagcctgcgcaccgacatgcacatcagtggagtgtttgccaccaaggatgctgtcgcagtctggaacggaaggcaggtggcgatcttcgagctttctggagccgcgatacggagtgcagggaccttcttgtgtgagacgcctgtgttagcaatgcatgaagaaaacgtttacacggtggagtcaaaccgagttcaagttcgaacctggcaggggactgtcaaacaactcctccttttctcggagactgaggggaatccctgcttcttggacatctgtgggaatttcctggttgtagggacagacttggctcactttaaaagctttgatctttcccgaagagaggccaaagcacactgtagctgcaggagcctggcggagctggtccctggggtggggggcatcgcttctctgcggtgcagcagcagcgggagcaccatcagcatcctccccagcaaggctgacaacagccctgattccaaaatctgcttctacgatgttgaaatggacacagtgaccgtctttgacttcaagactggacaaattgatcggagagagacgctgtcctttaatgagcaagagactaataagagccacctctttgtggatgagggactgaaaaattatgttcccgtgaaccacttctgggaccagagtgagccccggctgtttgtatgcgaagccgtgcaggagacgccgcgctcccagcctcagtctgcaaacgggcagccccaagatgggcgcgctggccctgcggcagatgttttgatcctgtccttcttcatttccgaagagcacggcttcctgcttcatgagagcttcccccggcctgccacctcccacagtctcctggggatggaagtgccttattactacttcacaagaaagcccgaagaagcagacagagaagacgaggtggagcctgggtgccaccacatccctcagatggtgtccaggagacccctgcgagactttgtggggctggaggactgcgacaaggccacccgggacgccatgctccacttcagcttctttgtcaccataggagacatggacgaagccttcaaatccatcaagctcatcaaaagtgaggccgtctgggagaacatggcgcgcatgtgcgtgaagacccagcggctggacgtggccaaggtgtgcctggggaacatgggccatgcccgcggggcccgagcgctgcgtgaggcggagcaggagccggagctagaggcccgcgtggccgtgctggccacgcagctgggcatgctggaggacgccgagcagctgtacaggaagtgcaagcgccacgacctcctgaacaagttctaccaggctgcgggccggtggcaggaggccctccaggtagccgagcaccacgatcgcgtgcacctgcgcagcacctaccaccgctatgccgggcacctggaggccagcgccgactgcagccgggccctcagttactacgagaagtcggacacgcaccgcttcgaggtgcccaggatgctgtcggaggacctgccgtccctggagctctacgtgaataaaatgaaggataagaccctgtggcggtggtgggcgcagtacctggagagccagggcgagatggacgccgcgctgcactactacgagctggcccgggaccacttctccctggtccgcatccactgcttccagggcaatgtccagaaggctgcgcaaatagccaacgagacaggaaacctggcggcctcctaccacctcgcccgccagtacgagagccaggaggaggtcgggcaggcggtgcacttctacacccgggcacaggccttcaagaatgccatccgcctgtgcaaggagaacggcctggacgaccagctcatgaacttggccctgctgagctcccccgaggacatgatcgaggcggcccgatactacgaggagaagggcgtgcagatggacagggcggtcatgctgtaccacaaggctggccacttctccaaggccctggagctggcctttgccacccagcagtttgtggccctacagctcatagcagaggacctggatgagacgtcagaccctgcgctcctggcccgctgctccgacttcttcatcgagcacagtcagtacgagagggcggtagagctgctgctggctgccaggaagtatcaggaagccctgcagctgtgcctggggcagaacatgagcatcaccgaggagatggcggaaaagatgaccgtggccaaggactcctcggacctgcctgaggagtcgcggcgggagctgctggagcagatagcagactgctgcatgcgccagggcagctaccacctggccaccaagaagtacacgcaggccggcaacaagctgaaggccatgagggcgctgctcaaatccggagacacggagaaaatcacgttcttcgcgagcgtgtccaggcagaaggaaatctacatcatggctgctaactacctgcagtccctggactggcggaaggagccggagatcatgaagaacatcatcggcttctacaccaaggggcgggccctggacctcctggctggcttttatgacgcttgtgcccaggtggagattgatgaataccagaactacgacaaagcccacggggcgctgaccgaggcctacaagtgcctggccaaggccaaggccaagagccccctggaccaggagaccaggctggcgcagctgcagagcaggatggcactggtgaagaggttcatccaggcccgcaggacgtacacagaggaccccaaggagtccatcaagcagtgtgagctgctcctggaggaaccagacctggacagcaccatccgcatcggggacgtctatggcttcctggtggagcactacgtgcggaaggaggaataccagacggcctacagattcctggaggagatgcggcggcggcttcccttggccaacatgtcctactacgtgagcccgcaggccgtggacgccgtgcaccgggggctgggtctcccactgccacgcaccgtccccgagcaggtccgccacaacagcatggaggacgccagggagctggacgaggaggtggtggaagaggcagatgacgacccctgaggggcctgggccccaggaccagcgtgctgctgcagaaaggcatcttctggaatttttttgtcagctgtggcaaagccagcatttttgctgggaaaaaacatgtctgtgttggaatacgcgacagagctgggcgagaacgcagcggcccgggccggcggagggtgtgacccgtctgcaccttgctctgtcccacctgcctctgggtgcccggcagctccactagatttttggattcattcctttgaagggagtcgggttcacccttccatcgtattctcccaactacacattgtaaagcctgagaaacttctagaacctcaggaagctgcagctggagggctggggcacctgcccccctgctccccacacatcatatcctccccatactcctgcagggcccacggctcctgagcaacagctgggacacccgggccttggcggctgcaccccctgctaggctctgcccaccggccaccaacactcctgtaattccaataaagcagtttattttctgaga

SEQ ID NO: 181799 - DNA, 5265 bp, Artificial Sequence
  derived and/or modified sequence
acagccaataggccagggcccgtgctgtgattggccgcagcagtgttgacggatacgtgagaagaaaacggcgtggtagctcggagtgtggaatcgggcgcgaacctgagttctgagaagtgtggaagcacgtctgaggcaagcggaataacctggcccccgacgctcgggcctcggagctgcacgtgcgtgcccgatcgccttcggctctttccggccgctcggggcgcttcgggagtcctcggggccgcctcgctcaccttcggctatttccgcgttcctggcgcgccgttgtcccggcaacgcgcggcggctcagcggcctggcagaggtttcagcgctgaggaggcctgagttccgtcatggccctctattatgaccaccagatagaagccccggatgcagcagggtcaccctcatttatcagctggcaccctgtccatccattcttggcagttgcttacatcagcacaacctcaacaggcagcgtggatatttacctggagcaaggggagtgcgtgccagatacacacgtcgagaggccgttccgggttgcttccctgtgctggcacccgacgcggctggtgctggctgtgggctgggagactggagaagtgacggtgtttaacaagcaggacaaggagcagcacacgatgcccctgacacacacagccgacatcaccgtgctccgttggagccccagtggaaactgcctgctgtctggggacaggcttggtgtcttgctcttgtggaggttggaccaaaggggccgagtgcaagggacgcctctgctgaaacacgagtatgggaaacacctcacgcactgcatcttccggctcccccctcctggcgaggacctggttcagttggcaaaggcagctgtgagcggtgatgagaaagccctggacatgtttaactggaagaagagcagttctggaagtttgctgaagatggggtctcacgaggggctgttgttctttgtcagtctgatggacgggacagtgcactatgtggatgagaagggcaagaccactcaggtggtgtccgcagacagcacgattcagatgctgttctacatggagaagagggaggcactggtggtggtcacagagaacctccggctgtccctgtacacggtgcctcctgagggcaaagcagaagaagtgatgaaggtcaagctgagcgggaaaaccggccgccgggcagacatcgctttgattgaaggcagccttctcgtgatggccgtcggggaggctgccctcagattctgggacatagaacgaggagagaattatatactgagtccagatgagaagtttggctttgagaaaggagagaatatgaactgtgtgtgttactgtaaagtcaaaggtcttctggccgctggtaccgacagagggcgagtagccatgtggaggaaagtaccagacttcctgggcagccccggggcagagggcaaggacaggtgggcccttcagacccctaccgagctccaaggaaacatcacgcaaatccagtggggttccaggaagaacctgctggcagtgaacagcgtcatctccgtggccatcctcagcgagcgggccatgtcgtcacacttccaccagcaagtggccgccatgcaggtctccccgagtctgctgaatgtgtgcttcctgtccacgggggtcgcacacagcctgcgcaccgacatgcacatcagtggagtgtttgccaccaaggatgctgtcgcagtctggaacggaaggcaggtggcgatcttcgagctttctggagccgcgatacggagtgcagggaccttcttgtgtgagacgcctgtgttagcaatgcatgaagaaaacgtttacacggtggagtcaaaccgagttcaagttcgaacctggcaggggactgtcaaacaactcctccttttctcggagactgaggggaatccctgcttcttggacatctgtgggaatttcctggttgtagggacagacttggctcactttaaaagctttgatctttcccgaagagaggccaaagcacactgtagctgcaggagcctggcggagctggtccctggggtggggggcatcgcttctctgcggtgcagcagcagcgggagcaccatcagcatcctccccagcaaggctgacaacagccctgattccaaaatctgcttctacgatgttgaaatggacacagtgaccgtctttgacttcaagactggacaaattgatcggagagagacgctgtcctttaatgagcaagagactaataagagccacctctttgtggatgagggactgaaaaattatgttcccgtgaaccacttctgggaccagagtgagccccggctgtttgtatgcgaagccgtgcaggagacgccgcgctcccagcctcagtctgcaaacgggcagccccaagatgggcgcgctggccctgcggcagatgttttgatcctgtccttcttcatttccgaagagcacggcttcctgcttcatgagagcttcccccggcctgccacctcccacagtctcctggggatggaagtgccttattactacttcacaagaaagcccgaagaagcagacagagaagacgaggtggagcctgggtgccaccacatccctcagatggtgtccaggagacccctgcgagactttgtggggctggaggactgcgacaaggccacccgggacgccatgctccacttcagcttctttgtcaccataggagacatggacgaagccttcaaatccatcaagctcatcaaaagtgaggccgtctgggagaacatggcgcgcatgtgcgtgaagacccagcggctggacgtggccaaggtgtgcctggggaacatgggccatgcccgcggggcccgagcgctgcgtgaggcggagcaggagccggagctagaggcccgcgtggccgtgctggccacgcagctgggcatgctggaggacgccgagcagctgtacaggaagtgcaagcgccacgacctcctgaacaagttctaccaggctgcgggccggtggcaggaggccctccaggtagccgagcaccacgatcgcgtgcacctgcgcagcacctaccaccgctatgccgggcacctggaggccagcgccgactgcagccgggccctcagttactacgagaagtcggacacgcaccgcttcgaggtgcccaggatgctgtcggaggacctgccgtccctggagctctacgtgaataaaatgaaggataagaccctgtggcggtggtgggcgcagtacctggagagccagggcgagatggacgccgcgctgcactactacgagctggcccgggaccacttctccctggtccgcatccactgcttccagggcaatgtccagaaggctgcgcaaatagccaacgagacaggaaacctggcggcctcctaccacctcgcccgccagtacgagagccaggaggaggtcgggcaggcggtgcacttctacacccgggcacaggccttcaagaatgccatccgcctgtgcaaggagaacggcctggacgaccagctcatgaacttggccctgctgagctcccccgaggacatgatcgaggcggcccgatactacgaggagaagggcgtgcagatggacagggcggtcatgctgtaccacaaggctggccacttctccaaggccctggagctggcctttgccacccagcagtttgtggccctacagctcatagcagaggacctggatgagacgtcagaccctgcgctcctggcccgctgctccgacttcttcatcgagcacagtcagtacgagagggcggtagagctgctgctggctgccaggaagtatcaggaagccctgcagctgtgcctggggcagaacatgagcatcaccgaggagatggcggaaaagatgaccgtggccaaggactcctcggacctgcctgaggagtcgcggcgggagctgctggagcagatagcagactgctgcatgcgccagggcagctaccacctggccaccaagaagtacacgcaggccggcaacaagctgaaggccatgagggcgctgctcaaatccggagacacggagaaaatcacgttcttcgcgagcgtgtccaggcagaaggaaatctacatcatggctgctaactacctgcagtccctggactggcggaaggagccggagatcatgaagaacatcatcggcttctacaccaaggggcgggccctggacctcctggctggcttttatgacgcttgtgcccaggtggagattgatgaataccagaactacgacaaagcccacggggcgctgaccgaggcctacaagtgcctggccaaggccaaggccaagagccccctggaccaggagaccaggctggcgcagctgcagagcaggatggcactggtgaagaggttcatccaggcccgcaggacgtacacagaggaccccaaggagtccatcaagcagtgtgagctgctcctggaggaaccagacctggacagcaccatccgcatcggggacgtctatggcttcctggtggagcactacgtgcggaaggaggaataccagacggcctacagattcctggaggagatgcggcggcggcttcccttggccaacatgtcctactacgtgagcccgcaggccgtggacgccgtgcaccgggggctgggtctcccactgccacgcaccgtccccgagcaggtccgccacaacagcatggaggacgccagggagctggacgaggaggtggtggaagaggcagatgacgacccctgaggggcctgggccccaggaccagcgtgctgctgcagaaaggcatcttctggaatttttttgtcagctgtggcaaagccagcatttttgctgggaaaaaacatgtctgtgttggaatacgcgacagagctgggcgagaacgcagcggcccgggccggcggagggtgtgacccgtctgcaccttgctctgtcccacctgcctctgggtgcccggcagctccactagatttttggattcattcctttgaagggagtcgggttcacccttccatcgtattctcccaactacacattgtaaagcctgagaaacttctagaacctcaggaagctgcagctggagggctggggcacctgcccccctgctccccacacatcatatcctccccatactcctgcagggcccacggctcctgagcaacagctgggacacccgggccttggcggctgcaccccctgctaggctctgcccaccggccaccaacactcctgtaattccaataaagcagtttattttctg

SEQ ID NO: 181800 - DNA, 1971 bp, Artificial Sequence
  derived and/or modified sequence
atggcccggatgtgcgtgaagacccagcggctggacgtggccaaggtatgcctgggaaatatggggcatgctcgaggggcacgtgccctccgagaggcggagcaagaaccagagttggaagctcgtgtagccgtgctagccacacagctcggaatgctcgaggatgccgaacagttgtaccgaaagtgcaaacgacatgatctccttaataagttctatcaggccgccggtcgatggcaggaagccctgcaggtcgcggaacatcatgatagggtacacttaaggagcacatatcatcgatacgccggccatctagaggcttccgccgattgtagccgggccctgtcttactacgaaaaaagcgacacccaccggtttgaggtccctcgaatgctctccgaggatcttccctccctagaactatacgtgaacaaaatgaaggataagaccctctggcggtggtgggcacaatatctcgaatcacaaggtgagatggacgctgcactgcattactacgagctcgcccgggaccacttttcactggtgcgtatccactgctttcaggggaacgttcagaaggctgctcagattgcgaacgaaacaggtaatcttgcggcctcttatcacctggcgcgacagtacgaaagccaagaggaggtaggtcaagccgtccacttttacacgcgggctcaggcctttaaaaacgccattagactatgtaaagagaacggcctggatgaccagctgatgaacctggctcttctctcgagtccggaagacatgattgaagctgctcgctactacgaagaaaagggcgtgcaaatggacagggcagtcatgctctatcacaaagctgggcacttttcaaaagctctggagctcgccttcgccacgcaacagtttgtggccctgcagcttatcgctgaggatctagatgaaacctcagatcccgccttgctcgcacggtgtagcgattttttcattgaacacagccagtacgaacgcgcagtggaactcctccttgcagcccgcaagtatcaagaggccctccaactttgcctgggccagaatatgagcataacagaggagatggctgagaagatgacagtggccaaggactcatccgacctacccgaagagagtagaagagaactcctggagcaaatcgcagattgctgtatgcggcaggggtcataccaccttgcaacgaagaaatatacccaggccggaaataagctgaaggcaatgagagccttgctcaagagcggagatacagagaagatcacttttttcgcgagtgtatcaagacagaaggagatttacattatggctgcaaattacctgcagagtctggactggagaaaggagcctgaaatcatgaaaaatataatcggcttctatacaaaaggacgtgctctggatctattagctggtttttatgatgcctgcgcacaggtggagattgatgagtatcagaactatgacaaggcacatggagccctgaccgaggcctataagtgtctcgcaaaggccaaggccaaatcgccccttgaccaggagacaagacttgcccagctgcaatcccggatggccctagtcaaaaggttcatacaggcccggcgtacatacaccgaagatcccaaagagtcaattaagcaatgtgagctcctcttggaggagccagacttggattccacgatcaggatcggagatgtgtatggctttcttgtcgagcattatgtacggaaggaggaatatcagaccgcgtatagattcctggaggaaatgcggcggaggctgcctctggctaatatgagttactatgtaagccctcaggcagtagatgccgtgcaccgaggcctgggcctgcccctccctcggaccgttccagaacaggtaagacataactcaatggaggacgcacgagaactcgacgaggaggtggttgaggaggccgacgacgacccctag

SEQ ID NO: 181801 - DNA, 4389 bp, Artificial Sequence
  derived and/or modified sequence
atggccctgtactacgaccaccagatcgaggcccccgacgccgccggtagcccaagctttatctcctggcatcctgttcacccgttcctagcagtcgcatacattagcactaccagcaccggatctgtggacatttatcttgaacaaggggaatgtgtcccggatacccacgtagagcgaccattccgggtggccagcctgtgttggcaccctacacgacttgtcctggccgtggggtgggaaaccggcgaagtcactgtcttcaacaagcaagacaaggagcagcatacaatgcctctcacgcataccgccgacattaccgtattgcggtggtccccatcaggcaactgtctattatccggtgatcgacttggcgtgcttctgttgtggcgtctggaccagaggggaagagttcagggtactcccctactcaaacacgagtatgggaagcacctgactcattgtatttttaggctgcccccaccaggcgaggatctcgtgcaattggctaaagccgccgtcagtggagatgagaaagcgttggacatgtttaactggaaaaaatcctcttccggaagcttgctgaagatgggcagtcatgagggcctgcttttctttgtgtccctgatggatggtacagtgcactatgtcgatgaaaaaggtaagacaacacaggtcgtgagcgcagactctacaatccagatgctcttttatatggaaaaaagagaagcactggtggtagtaaccgaaaacctgcgtttgtcgctgtacacagtgccgcctgagggcaaggcggaggaagtaatgaaggtaaaattaagtggcaaaacaggacgccgggctgacattgcattgattgagggcagcctgttggtcatggcagtaggcgaggctgccctgagattttgggacatcgagcggggagaaaattacattctgagtcccgacgagaagtttggcttcgaaaaaggagagaacatgaactgtgtgtgctactgcaaggttaagggtttattggctgccgggaccgatcgaggcagggtcgcgatgtggcggaaggtgcccgatttcctcggcagccccggagctgagggcaaggaccggtgggcgctgcagaccccaaccgagctccaaggaaacattacccaaatccagtggggatcacgcaagaacctgttggcagtcaattcggtcatcagcgtcgccattctgtcagagagagctatgtccagccattttcaccaacaggtagcagctatgcaggtctcaccgagtctgctcaatgtctgctttctttccacaggggttgctcactcactgcggaccgatatgcatatcagtggagtctttgccacaaaggatgcggtcgccgtctggaacggaagacaggtggccatctttgagttatctggcgctgccatccgcagcgctgggacttttctctgcgaaacaccagttttagccatgcatgaggaaaacgtctacacagtggaaagcaacagagtacaagtgaggacttggcagggaacagtcaaacagctgttgttgttcagcgaaacagaaggcaacccatgttttctggacatttgtggtaatttcctggtggtgggcacggatctcgctcacttcaagagttttgatctctcccggagagaggccaaagcgcactgttcgtgccgcagcctcgctgagttggtgcctggcgtcgggggcattgcaagcctccggtgttcatctagcggttctacaatcagcatccttccgtccaaagccgacaactctcccgattcaaaaatatgtttctacgacgtggagatggataccgtaaccgtttttgacttcaagaccggccagattgacaggcgggagactttgagctttaacgaacaggagacgaacaagagccacctttttgtggatgaaggcctcaagaactacgtaccagtaaaccatttttgggaccagtcagagcctcggctgttcgtgtgcgaggccgtgcaagaaacgccccgctcccagccacagagcgctaatgggcagccccaggacggccgcgctggtccagcagcagacgttctgatactgtccttttttatttccgaggagcatgggtttctgcttcatgagtcctttccaagacctgcaacaagtcactccctcctgggcatggaagtgccatattactattttacgcgcaaacctgaagaggcagatagggaggacgaagttgagcctggctgccaccacatacctcagatggtttctagacggccgctgcgcgatttcgtcggacttgaagactgtgacaaagccacacgggatgcaatgctgcacttttcattttttgtgacaattggcgatatggatgaagcttttaagtctatcaaacttattaagagcgaggccgtatgggagaacatggcaagaatgtgtgtcaaaacacaacggttagacgtggccaaggtgtgcctcggcaatatggggcacgcgcgtggcgctcgagcactgcgcgaggcagaacaggaaccagaactcgaggcgagagtggctgtgctggctacccaactgggtatgctcgaggatgcagagcagctctacaggaaatgcaaacgtcatgatctgctcaataaattttatcaggccgccggtagatggcaggaagccctccaagtggcagaacaccacgacagggtgcatttgagaagcacttatcatagatatgcgggccacctggaggcctctgcagactgcagtcgtgctctctcttattacgaaaaatctgacacccataggttcgaggtgccacggatgctatctgaggatctgccgtccctggagctgtacgtgaacaaaatgaaagacaaaaccctctggaggtggtgggctcagtacttggagagtcagggcgagatggatgccgcgctccactactacgagctcgccagagaccactttagtttggtgcgcatccactgtttccagggaaacgtccaaaaggctgcacagattgccaacgagaccgggaatctggctgcgtcttaccatctggcccgccagtacgagtcccaggaggaggtaggccaagcggtgcacttctacactcgcgcccaggcttttaagaatgccataagactatgcaaagagaacggcctggacgatcagctgatgaacctggctctgctgagtagcccggaagacatgatcgaagccgctcggtattacgaggagaagggcgtgcaaatggacagggccgttatgctgtaccataaggcagggcacttctccaaggccttggagctggcctttgcaacgcagcaatttgttgctctacagctcattgccgaagatcttgatgagacatccgaccccgccttgctagccaggtgtagcgatttttttattgaacactcccagtatgagcgagccgttgagctcttgctcgcagccagaaagtaccaggaagcattgcagctgtgtcttggccagaacatgtcgatcaccgaggaaatggcagagaagatgaccgtggccaaagattcttccgacttgccggaggagagccggcgggagctgctcgaacaaatcgccgattgttgtatgaggcaggggtcctatcatctggcaacgaagaagtacacccaggccggcaataagctgaaggcaatgagggccctcctaaagagcggagacaccgaaaaaatcaccttctttgcatccgtgagtcgccagaaagagatttacattatggcggcgaactacttacaaagcctggactggcgaaaggagccagagatcatgaaaaatattattggtttttacactaaaggaagggccctcgatctgctggcggggttctatgacgcctgcgcccaagtggagatagatgaataccagaattacgacaaggcccatggggccctcactgaggcatataagtgtctcgccaaagctaaggccaagtccccactggaccaggagaccagactggcccagctgcagagtcgcatggccctcgtcaaacgatttatacaggcccgacgtacctacacagaagatcctaaggagtcaatcaaacagtgtgagctcctgctggaggaacccgacctcgattccactatcagaatcggggacgtatatggcttcctggtggagcattatgtgcgcaaggaggagtatcagaccgcctatcggtttctggaagagatgagacgcagactgcctcttgctaatatgagctactatgtatctccccaggcggtcgacgccgtccaccgggggctgggtttacccctacctcggacggttccagagcaggtgaggcacaatagcatggaagacgctcgagaattggacgaagaagtggtggaggaggccgatgacgacccatag

SEQ ID NO: 181802 - DNA, 4389 bp, Artificial Sequence
  derived and/or modified sequence
atggccctgtactacgaccaccagatcgaggcccccgacgccgccgggtccccgtcctttatttcatggcatcccgttcatccattcctcgcggttgcttatatcagcaccacctcaacgggttccgtcgatatctacctggagcagggtgagtgcgtgcccgatactcatgtagaaagacccttcagggtggcatctctgtgctggcatcctacccggttggtgctggccgtggggtgggagaccggggaggtgactgtgttcaacaaacaagacaaagagcagcacactatgcccctgacccataccgccgacataactgtgttgcgatggagcccctcaggcaattgtcttctttccggggaccgtcttggagtcctgctcttgtggcggctggatcagcgtgggcgagtgcagggcacccctctccttaagcatgaatacggcaagcacctgacacactgtatcttccggctgccgcccccgggcgaggatctcgtccaattagcaaaggccgccgtgagcggagatgaaaaagcgctcgacatgttcaactggaagaagtcttcttctggatccctcttaaagatgggttctcatgaaggccttttgttcttcgtgtccctgatggatggtaccgtgcactatgtggacgaaaaaggcaagacaacacaggtcgtgtccgcagactccacgattcagatgctcttctacatggaaaagcgagaagctttggtggtggtcaccgagaatctcaggctcagtctatataccgtgcctccagaaggcaaagccgaggaagtgatgaaagtgaagctctctggcaagacaggccgcagggcagacatcgcactgatcgaaggcagtttactggtcatggctgtgggcgaggctgcactgagattctgggacatcgagcgcggtgaaaattacatcctatctccggatgagaaattcgggttcgaaaaaggggagaatatgaattgtgtctgctactgtaaagtgaagggtctgttggctgccgggacagaccggggaagggttgccatgtggcgaaaagtgcctgatttcctggggagcccaggagctgaaggcaaagatcgatgggccctccagacccccactgagctacaaggcaacatcacccaaattcaatggggtagtcgtaagaatttgctggctgttaactccgtcatctccgtggctatcctctcagagagggctatgagtagtcatttccatcagcaagttgccgccatgcaggtttccccatccttgctaaatgtgtgctttctgagcaccggtgtcgctcactcgctgagaactgatatgcacatctccggggtgtttgcgaccaaggacgccgtggccgtgtggaacgggcggcaagtagccatttttgagctttctggagcggcaattcgctctgccggcacattcctgtgcgagacaccagtcctggctatgcatgaagaaaacgtctataccgtcgaaagtaacagagtgcaggtccgaacttggcagggaaccgtgaagcagttgttgctgttcagtgagacggaaggaaatccttgctttctcgacatctgcggcaacttccttgtggtagggaccgatcttgcacactttaagtctttcgatctgtccagaagggaagctaaggcccactgctcatgtaggtctctggccgagctggtgccgggcgttgggggtatcgcctctctgaggtgttcctcatctggtagcacaatatccattcttccctctaaggcagacaactccccagatagtaagatctgcttttacgatgtggaaatggatactgtgactgtgttcgacttcaagactgggcagatcgatcgccgcgaaacgctcagctttaatgaacaagagacgaacaagagtcatctctttgtagatgaaggcctgaaaaactacgtccctgtgaatcatttttgggaccagagtgaaccccggttgttcgtgtgtgaagctgtccaagagacacctagatcccagcctcagagcgcaaacggacagccacaggatgggcgggctggtccggcggccgatgtgctaatactctctttcttcatcagcgaggagcacggattcttgttgcacgagagtttccctagacctgctaccagtcattctctgctggggatggaagtcccttactactactttaccaggaagcccgaggaagccgacagagaggacgaggtcgagcctggctgccatcacatcccgcagatggtctccagacggcctttgcgcgacttcgtcggactagaagattgtgataaagcaaccagagacgcgatgctccacttttctttcttcgtgacgattggagacatggatgaggctttcaagagcattaaactcataaagtcagaagctgtatgggagaatatggcccgcatgtgcgtcaagacgcaaagacttgacgtggctaaagtttgcttagggaacatgggccacgctcgaggcgctcgcgccctgagagaggccgagcaggaaccggaactcgaagccagggtggccgtcttggcaacgcagctgggcatgctggaggacgctgaacagctgtaccgaaagtgtaaaagacacgacctgctcaacaaattttatcaggctgccggccggtggcaagaagccctccaggtggccgaacaccatgaccgtgtacatctgcgctcgacctatcatcgatatgcggggcatctggaagcatcagccgattgttcacgcgccttgagttattacgagaaatccgatacacaccgcttcgaggtgcccaggatgctaagcgaggacttgcccagccttgagctatacgtaaacaagatgaaagacaaaacgttatggcggtggtgggcgcagtacctcgaaagccaaggcgagatggacgcagcccttcactactacgaattagctagggatcatttttcgcttgtcaggatccactgttttcagggaaacgtgcagaaagccgcccagatcgctaacgaaaccggcaatctggctgcgtcatatcatttggccagacagtatgaatcgcaggaggaggtgggacaggcagtgcacttctataccagggcacaagcgtttaagaatgccattcggttgtgcaaggaaaacggcctcgacgatcagctgatgaatttggccttactgtccagcccagaggacatgatcgaggccgcgaggtactacgaggagaagggcgtgcagatggatcgtgccgtaatgctttatcacaaagcggggcactttagtaaggcactggagctggcctttgccacccagcagtttgtagccctccaactgatcgctgaggacctggacgagacaagcgatcccgccctcttggcccgatgctccgattttttcatcgagcacagccagtatgagagagccgtggagctgctcctggccgcgcggaaataccaggaggccctgcagctgtgtctcggtcaaaacatgtcgatcaccgaggagatggctgagaaaatgaccgtcgcgaaggattcaagcgatctgcctgaagaatctcgtcgtgagcttcttgagcagattgccgattgctgcatgcgtcaagggtcataccatttggcaaccaaaaaatatacccaggcgggtaataagctgaaggccatgagagcactgttgaagagtggggacactgaaaaaatcaccttcttcgcttcagtgagtcgacagaaggaaatttatattatggctgctaactatttacaatctttggattggcgaaaagaacctgagattatgaagaacataattgggttttatacgaaggggcgtgccctcgacctccttgccggcttttacgatgcttgtgcccaggtcgaaatcgacgagtatcagaattacgacaaagcccacggtgctcttactgaggcctataaatgtctcgcgaaggctaaagccaagagcccccttgaccaggaaactaggctggctcagttacagagtcggatggctcttgttaagcggtttattcaggctagacgaacttacacagaagaccctaaagagtccattaagcaatgtgagctgttgttggaggagccagatctcgacagtactatccggataggagacgtatacgggtttttggtagaacactacgtgagaaaggaggaataccagactgcttatagatttctggaagagatgaggagaaggctgcccctggctaatatgtcatattatgtgagcccacaggctgttgacgcagtccaccgggggctaggtctccccttgcccagaacggtgcccgagcaggttcggcacaattctatggaggacgccagggagcttgatgaagaagtcgtggaggaagccgacgatgacccctag

SEQ ID NO: 181803 - DNA, 1971 bp, Artificial Sequence
  derived and/or modified sequence
atggccaggatgtgcgtcaagacacagaggctcgacgtggcgaaggtttgtttgggaaatatgggacacgcacgaggagccagggccttgcgggaagctgaacaggagcccgagctggaggctcgagttgcagtgctcgcaacgcagctcggtatgttggaggatgcagaacagttataccggaagtgtaaacgtcatgacctcctgaataagttttatcaggctgcaggacgttggcaggaggcactacaggtggccgagcaccacgacagagtgcatcttcggtcgacctaccatagatacgccggacacctagaagcttccgccgactgctcccgcgctctttcatattacgagaagtccgatacgcaccgctttgaggtgcctcgaatgctgtctgaagacctcccaagtctcgaactgtacgtgaataagatgaaagataaaacgttatggcggtggtgggcccaatatttggaatcccagggagagatggacgcagccctgcactactacgagctggccagagatcacttctccctcgtaagaattcactgctttcaggggaatgtgcagaaagccgctcagatcgccaatgaaactggaaacctggccgcatcgtatcaccttgcaaggcagtacgagagtcaggaggaggtgggccaggccgtccacttttacaccagagcccaggccttcaagaacgccatcaggttatgcaaagaaaacggcctggacgaccagctcatgaatttggccctactcagctccccagaggatatgatcgaagccgcaaggtactatgaggagaaaggcgtccaaatggaccgagctgtgatgctgtatcacaaggccggacacttttcaaaggcgcttgagctcgctttcgcaactcaacagttcgtggctctgcagctcatcgccgaagaccttgatgagacaagcgaccccgctcttctggctcgatgttccgatttcttcattgaacattctcagtatgagcgggctgtggagttgctgctggcagcacgtaaataccaagaagccctgcagctctgcttaggccagaatatgagcattactgaggaaatggcagagaagatgacagtcgcgaaagattcctcggatcttccagaagagtctagacgggaattactggagcagatcgccgattgctgcatgaggcaggggtcttaccacctggcaactaagaagtatactcaggctgggaacaaactcaaggcaatgagggcccttctgaagagcggggacactgagaagattacgttcttcgccagcgtctctcggcaaaaagagatttacattatggctgccaattaccttcagtcattggattggcggaaggagcccgaaatcatgaaaaatattatcggcttctacacgaaaggaagggctctggatctgcttgcgggattctacgacgcctgcgcccaagttgagattgatgagtaccagaattacgataaagcccacggggctctcaccgaagcctacaagtgtcttgccaaggccaaagctaagagcccactcgaccaggagacacgcctggcacagttgcagagcagaatggctttagttaaaaggttcatccaggccaggcgaacatacactgaagatcctaaagagagtattaagcagtgcgaactgctcctcgaggagcctgacctcgactctaccatccgaatcggggacgtgtatggattccttgtcgaacattatgtgagaaaagaggagtaccagacagcctaccgtttcctggaggagatgaggcggcgattgcccctcgcaaacatgagctattatgtgagccctcaagccgtagatgcggttcatcgcggtctcggtttgcctctcccccgaacggtcccggaacaggtgagacataattctatggaagacgctcgagagttggacgaggaagttgtggaagaggcggacgacgatccgtag

SEQ ID NO: 181804 - DNA, 4389 bp, Artificial Sequence
  derived and/or modified sequence
atggctctctattatgatcaccagatcgaggccccagatgctgcaggaagcccttctttcataagctggcaccccgtgcatcctttcctcgccgtggcatatatttcgacaacctcaactgggagcgtcgatatctacctcgagcaaggagagtgcgtgcccgatacccatgtagaaaggccattccgtgtcgccagcctgtgttggcatccgacacgcctggttcttgcggttgggtgggaaacaggggaggttactgtcttcaataagcaggataaagagcaacacacaatgccattaactcacacggcagacatcacggttctaagatggtcaccttcagggaactgtctgctctccggtgaccgcctgggagtgctgctgctctggcgactcgaccagagaggacgtgtacaaggcacacctctgctgaagcacgaatatggcaaacacctgacccactgtatattcagactccctcctccaggtgaggacctggttcagttggcaaaagctgccgtgtcgggcgacgagaaagcactggatatgtttaactggaaaaagtcctcctcaggctccctgttgaaaatggggtctcatgagggcctacttttctttgtgtccctaatggatggaaccgttcactacgtggacgagaaggggaaaaccacacaggtggtcagcgccgacagtacaattcaaatgctgttttacatggaaaagcgggaggccttggtggttgtgacagagaaccttagacttagtctttatacagtcccaccagagggaaaggccgaagaagtgatgaaagttaaattgtccggcaagactggcaggagagcagatatcgctttaatcgaaggctctttgctcgtgatggctgtgggggaagctgctttgcgcttctgggatatcgagcgtggtgaaaactacatcctatctcccgacgaaaagttcggcttcgagaaaggagagaacatgaattgtgtctgttactgcaaagtgaaaggcctgttggcagccggtacagatagaggtcgggttgctatgtggcgtaaggtcccagactttctcggttcacctggtgccgaggggaaagaccggtgggccctacagacaccgaccgagctgcaaggcaacataacacaaattcaatggggatcaaggaaaaatctactggccgttaacagcgttatctctgtcgctatattgagcgaacgagcaatgtcaagccacttccatcagcaggtggcagcaatgcaagtgtctccctcattgctcaatgtctgctttctgagcaccggcgtcgctcactcactaagaaccgatatgcacatttccggggtgtttgccacgaaggatgccgtggcggtttggaatgggagacaggttgctatatttgagctcagtggcgctgcgatccgtagtgctggcacgttcctctgcgagacacccgtgttggcaatgcatgaagaaaacgtgtacactgtcgagtcgaatcgcgtacaggtaagaacatggcaaggcactgttaagcagctcctactgttttctgagaccgagggaaatccctgcttcctggacatttgtggaaatttcctcgtagttgggactgacctagcccactttaagagcttcgatctgtcacgcagggaggcgaaggcccactgtagctgtaggagcctcgccgagctggttcccggagtgggaggcattgcctcgttgcgttgcagctctagcggcagtactatttcaatcctgcccagcaaggctgataattcccctgactcaaagatctgcttctatgacgtggaaatggacacagtcacagtgtttgacttcaaaaccggccagatcgatcgtcgtgagaccctgtcttttaacgagcaagaaacaaataagtctcatctgttcgtagatgaaggactgaaaaattatgtgcctgtcaatcatttctgggaccagagtgagccccgactgtttgtgtgcgaagcagtgcaggaaactcctcggagtcaaccccagtctgccaacggacagcctcaggatggcagggccggtcccgctgctgacgtgctaatactgtcattctttatcagcgaggaacacggctttcttttgcatgaaagctttccacgaccagcaacctcacacagcttgctcggtatggaagttccttactattattttacaaggaaaccagaggaggcagaccgagaggatgaagtggagcctgggtgtcatcatattccccagatggtcagtaggcggccactacgggactttgtgggtcttgaggattgcgacaaggcaactcgggacgccatgctccactttagctttttcgtaacaatcggggatatggatgaggccttcaaatccatcaaactcattaaaagcgaagcagtgtgggaaaacatggctagaatgtgcgtgaagacacagaggttggacgttgctaaggtgtgcttagggaatatggggcacgcaaggggagctcgggcattgcgtgaagcagagcaggagcctgagcttgaagcacgagtagccgtcctcgctacacaacttggcatgctcgaagatgctgaacagctctatcgtaagtgcaagcggcatgaccttctgaataaattttaccaggcagcaggaaggtggcaagaggcactgcaggtcgccgagcatcacgaccgggttcatttgcgatctacttaccacagatatgccggacatcttgaagcctcagctgactgctcccgagctctgagctactacgagaaatcagatacccaccgcttcgaggtaccacgaatgctctcggaggacctccctagtctcgaactctatgtgaacaagatgaaggacaagactttgtggcgatggtgggcccagtatcttgagtcccaaggtgaaatggacgctgcgctgcactattacgaactggcacgggaccatttctctctggtgaggatccattgttttcaaggcaatgtgcagaaggccgctcagattgctaatgagactggcaatctagccgcttcttaccacttggccaggcagtacgaatcgcaggaggaagtaggacaggcagtgcacttttacacccgcgcacaggcattcaaaaatgcaatccggttgtgcaaagagaacgggctcgatgatcagttgatgaatctcgccctgctgtctagcccagaagacatgattgaggctgcaaggtactatgaagaaaagggagtccagatggatagagctgtgatgttgtaccataaggctggtcacttttcgaaagctctggagctggcatttgccacccagcagtttgtcgctttacagcttatcgccgaggatctggacgaaacaagcgacccggctttgctggctagatgttctgatttctttatcgaacatagtcagtacgaaagagcagtcgaattactgctggccgctcgaaaatatcaagaggctctccagttgtgcctcggtcagaacatgagtattacggaggaaatggctgagaagatgacagtcgccaaagacagttcagacttaccagaggagagccggcgagaattgttagaacagatagccgactgttgtatgagacaggggagctaccatcttgctactaaaaaatacacccaggccggtaacaaattgaaggccatgagggcccttctaaagtcaggggacaccgaaaagataacatttttcgcatcagtgtcccggcagaaagaaatctatatcatggccgctaattacctccagtcgctggactggcgaaaggaaccagaaattatgaagaacattattggattttacacaaagggacgtgcattggatctcctcgctggcttttacgacgcctgcgctcaggtggagattgatgaatatcaaaattacgacaaggctcacggggcacttacagaagcgtacaagtgtcttgccaaggctaaggcaaagagccccctggaccaggaaaccaggttggcccaactgcagagccggatggccctggtgaagagattcattcaggccaggagaacttatacagaagatcctaaggaatcaattaaacaatgcgagctcttgctggaggagcctgacctggatagtacgattagaattggggacgtgtatgggttcctcgtggagcattacgtgagaaaagaggaatatcagaccgcgtacaggtttctggaagaaatgaggagaaggcttcccctggctaatatgtcctattacgttagcccgcaagcagtcgatgcagttcacagaggcttgggacttcctctacccaggacagtccctgaacaggtgaggcataattcaatggaggatgccagggagctggacgaagaagtggtggaggaggcagacgacgacccttag

SEQ ID NO: 181805 - DNA, 4389 bp, Artificial Sequence
  derived and/or modified sequence
atggctctgtattacgaccaccagattgaggcgccagatgccgctggttcaccatctttcataagttggcatcctgtgcacccgttcctggcagtagcttatattagcacgacctccacgggcagtgtggatatctatctagagcaaggggagtgcgttccagacacacatgtggaacgaccttttcgggttgcttccctgtgttggcatcctaccagactggtcctggcagttggctgggagacgggggaagtaactgtattcaataaacaggataaagaacagcacacaatgccactgacacacactgctgacataactgtattgaggtggtcaccttcaggcaactgtctgctgtccggggaccgccttggagtcctgctactttggcgccttgaccagagaggtcgcgtgcagggaacgccattgctgaagcatgaatatgggaagcacttgacacattgtatctttcgcctcccacctccaggcgaagacttggtccagttggctaaggccgctgtgagcggggacgaaaaagcactggatatgtttaactggaaaaagagttcttctggcagtctgctaaagatggggagccacgaggggctgctattctttgtgtcacttatggatggtacagtacactacgtggatgagaaaggtaaaactacccaggtcgtgtccgccgatagcactatccaaatgctcttctacatggaaaaacgcgaagcactggtggtcgtgactgaaaaccttaggttgagcctgtacactgtgccacctgagggaaaggccgaggaggtgatgaaagtgaaactttctggaaaaacaggccgaagggccgacatcgctttaatcgagggctcccttctcgtaatggccgtgggtgaagcggcacttaggttctgggatattgagagaggagaaaattatattctgagccccgacgagaaatttggctttgagaagggagagaatatgaactgcgtgtgctattgtaaagtcaaaggcctgctcgcggcaggcaccgatcgcggtcgtgttgctatgtggaggaaggtgcccgactttctaggcagccctggagccgagggaaaagatcggtgggcccttcagactccgaccgagttgcagggcaacattactcagatccagtgggggtctagaaagaatttgctggccgtgaattcggtcatatccgtggctatcctgtcagagcgggcaatgagctctcatttccaccagcaagttgccgctatgcaagtatctccctccctgctcaatgtatgcttcttgtcaactggtgtggctcattcacttcggactgacatgcatatcagtggggtgtttgctacgaaagacgcagttgcagtatggaacggaagacaggttgcaatcttcgaactgtccggcgctgctatccggtctgccggtactttcctctgtgaaacacccgtcctggcaatgcacgaagagaatgtatacaccgtggaaagcaatagggtgcaggtgagaacctggcagggcacggtgaaacagctgttgctgttctcagagacggaaggcaatccttgctttttggatatttgcggtaacttcctcgtcgtgggcacagacctagctcattttaagagcttcgatctatcccgccgagaagcaaaagcccattgctcctgcaggtcattggcggagttggtgcccggtgtcgggggtatcgcgagcctgagatgttcatcttcgggcagcaccattagcatcctgccctcaaaggccgataatagcccggattccaaaatttgtttctatgacgtggagatggacacagtcaccgtctttgactttaagaccggtcaaatagatagaagggagacactgtcctttaacgagcaggagacgaataaaagccaccttttcgttgacgaagggctgaaaaattatgtcccagttaaccatttttgggatcaaagtgagccaagactgttcgtttgcgaggctgtgcaggaaacaccacggtctcagccccagtcagcaaatggacagcctcaggacgggcgagcagggcctgctgctgatgtattgatactgagcttcttcatctctgaagagcacggctttctactccatgagagttttccaaggcctgctacttcccacagtctgctaggcatggaagtgccttactactatttcacccgtaagccggaggaggcagaccgtgaggatgaggtcgagcccggatgccaccatatcccccagatggtatcgcgtaggccgctgagggatttcgttggcctcgaagattgcgacaaagccactcgcgatgccatgctccacttttcttttttcgtgaccatcggcgatatggacgaagcatttaaatcaattaagctcattaaatccgaggctgtatgggagaacatggcaaggatgtgcgttaagactcagagactcgatgtcgctaaagtctgtctgggcaacatgggccatgccagaggtgcaagagcgttgcgagaggctgaacaagaacccgagctggaagcaagggtggccgtgctggccacacaactcggaatgctcgaagacgctgaacaattgtaccggaagtgtaaacggcacgatctgttgaacaagttctaccaggctgccggtcgctggcaggaagcacttcaggttgccgaacaccacgatcgcgtgcatttgagaagcacctatcaccggtacgccggacacctggaagcttcggcagattgttcaagggctctttcctattacgagaaaagcgatacccaccggttcgaagtccccaggatgctgagcgaggatttaccgagcctggagttgtacgtaaataaaatgaaggacaagactctttggcggtggtgggcccagtatctcgaatcccagggtgagatggacgctgcccttcattattatgaactcgcccgtgatcatttcagcctagtgaggatccactgttttcagggaaacgtgcagaaagccgctcaaatcgctaatgaaacaggcaacctcgccgcaagctaccatttggcacgtcagtatgagtcgcaagaagaagtcggacaagctgttcacttttatacaagggcacaggcttttaaaaatgcaatccgattatgcaaagagaatggcctcgacgaccagctgatgaacttagctctgctgtcgtcacctgaagatatgattgaggcggctaggtactacgaagagaaaggcgtacagatggaccgagcagtaatgttgtaccacaaagccggacactttagcaaggccttggagctagcatttgctactcagcagttcgtggcactccagctaattgcagaggatctggacgagacatccgatcccgctctcctggccagatgctctgattttttcatcgagcactcacagtacgagagggctgtggagctcctgttggcagcacgcaaataccaggaggctctccagctctgtctaggccagaacatgagtataaccgaagaaatggccgaaaagatgaccgtagcaaaggactctagtgatcttcccgaggagtctcggagggagcttttggagcagatcgcggattgttgtatgcgacagggctcctaccacctggccaccaagaagtatacacaggccggtaataagctcaaagctatgcgggcattactgaagagtggagacactgagaagatcaccttcttcgcaagcgtctcaagacagaaggagatctatattatggcagctaattacttacaatccctggactggcgcaaggaaccagagatcatgaagaatataataggattttatactaagggccgagccttggatcttttagccggtttctacgacgcgtgcgcccaagtagagatagatgagtaccagaattatgataaagcccacggggcactcacagaggcgtacaagtgcctcgccaaggcgaaagcgaaaagcccacttgatcaggagacaaggttagcacagctccaaagccggatggcacttgtgaagaggtttattcaggctcgcaggacctatactgaagaccccaaagagagcatcaagcagtgtgaactgcttttagaggaaccggacctcgactccactattaggataggcgatgtctatggtttcttagtcgagcactatgtgcgtaaggaggagtatcagaccgcatataggttcctcgaagagatgcggaggcggttaccccttgctaatatgtcctattatgtttcccctcaagctgttgatgctgtccacaggggattgggattgcctttgccaagaacggttcctgagcaggtccgccacaactccatggaggacgctagggagctggacgaagaagtggtcgaggaagcggacgatgacccgtag

SEQ ID NO: 181806 - protein, 1300 aa, Artificial Sequence
  derived and/or modified sequence
MEEASLCLGVSSAEPEAEPHLSGPVLNGQYAMSQKLHQITSQLSHAFPELHPRPNPEEKPPASLEEKAHVPMSGQPMGSQMALLANQLGREVDTSLNGRVDLQQFLNGQNLGIMSQMSDIEDDARKNRKYPCPLCGKRFRFNSILSLHMRTHTGEKPFKCPYCDHRAAQKGNLKIHLRTHKLGNLGKGRGRVREENRLLHELEERAILRDKQLKGSLLQPRPDLKPPPHAQQAPLAACTLALQANHSVPDVAHPVPSPKPASVQEDAVAPAAGFRCTFCKGKFKKREELDRHIRILHKPYKCTLCDFAASQEEELISHVEKAHITAESAQGQGPNGGGEQSANEFRCEVCGQVFSQAWFLKGHMRKHKDSFEHCCQICGRRFKEPWFLKNHMKVHLNKLSVKNKSPSDPEVPVPMGGMSQEAHANLYSRYLSCLQSGFMTPDKAGLSEPSQLYGKGELPMKEKEALGKLLSPISSMAHGVPEGDKHSLLGCLNLVPPLKSSCIERLQAAAKAAEMDPVNSYQAWQLMARGMAMEHGFLSKEHPLQRNHEDTLANAGVLFDKEKREYVLVGADGSKQKMPADLVHSTKVGSQRDLPSKLDPLESSRDFLSHGLNQTLEYNLQGPGNMKEKPTECPDCGRVFRTYHQVVVHSRVHKRDRKGEEDGLHVGLDERRGSGSDQESQSVSRSTTPGSSNVTEESGVGGGLSQTGSAQEDSPHPSSPSSSDIGEEAGRSAGVQQPALLRDRSLGSAMKDCPYCGKTFRTSHHLKVHLRIHTGEKPYKCPHCDYAGTQSASLKYHLERHHRERQNGAGPLSGQPPNQDHKDEMSSKASLFIRPDILRGAFKGLPGIDFRGGPASQQWTSGVLSSGDHSGQATGMSSEVPSDALKGTDLPSKSTHFSEIGRAYQSIVSNGVNFQGSLQAFMDSFVLSSLKKEKDMKDKALADPPSMKVHGVDGGEEKPSGKSSQRKSEKSQYEPLDLSVRPDAASLPGSSVTVQDSIAWHGCLFCAFTTSSMELMALHLQANHLGKAKRKDNTIGVTVNCKDQAREASKMALLPSLQSNKDLGLSNMISSLDSASEKMAQGQLKETLGEQKSGAWTGHVDPAFCNFPSDFYKQFGVYPGMVGSGASSSCPNKEPDGKAHSEEDVPILIPETTSKNTTDDLSDIASSEDMDSSKGENNDEEDVETEPEMMTKPLSALSKDSSSDGGDSLQPTGTSQPVQGLVSPLSQAPEKQWHSQGLLQAQDPLAGLPKPERGPQSLDKPMNMLSVLRAYSSDGLAAFNGLASSTANSGCIKRPDLCGK

SEQ ID NO: 181807 - DNA, 3903 bp, Artificial Sequence
  derived and/or modified sequence
atggaggaggccagcctgtgcctgggcgtgagcagcgccgagcccgaggccgagccccacctgagcggccccgtgctgaacggccagtacgccatgagccagaagctgcaccagatcaccagccagctgagccacgccttccccgagctgcaccccagacccaaccccgaggagaagccccccgccagcctggaggagaaggcccacgtgcccatgagcggccagcccatgggcagccagatggccctgctggccaaccagctgggcagagaggtggacaccagcctgaacggcagagtggacctgcagcagttcctgaacggccagaacctgggcatcatgagccagatgagcgacatcgaggacgacgccagaaagaacagaaagtacccctgccccctgtgcggcaagagattcagattcaacagcatcctgagcctgcacatgagaacccacaccggcgagaagcccttcaagtgcccctactgcgaccacagagccgcccagaagggcaacctgaagatccacctgagaacccacaagctgggcaacctgggcaagggcagaggcagagtgagagaggagaacagactgctgcacgagctggaggagagagccatcctgagagacaagcagctgaagggcagcctgctgcagcccagacccgacctgaagccccccccccacgcccagcaggcccccctggccgcctgcaccctggccctgcaggccaaccacagcgtgcccgacgtggcccaccccgtgcccagccccaagcccgccagcgtgcaggaggacgccgtggcccccgccgccggcttcagatgcaccttctgcaagggcaagttcaagaagagagaggagctggacagacacatcagaatcctgcacaagccctacaagtgcaccctgtgcgacttcgccgccagccaggaggaggagctgatcagccacgtggagaaggcccacatcaccgccgagagcgcccagggccagggccccaacggcggcggcgagcagagcgccaacgagttcagatgcgaggtgtgcggccaggtgttcagccaggcctggttcctgaagggccacatgagaaagcacaaggacagcttcgagcactgctgccagatctgcggcagaagattcaaggagccctggttcctgaagaaccacatgaaggtgcacctgaacaagctgagcgtgaagaacaagagccccagcgaccccgaggtgcccgtgcccatgggcggcatgagccaggaggcccacgccaacctgtacagcagatacctgagctgcctgcagagcggcttcatgacccccgacaaggccggcctgagcgagcccagccagctgtacggcaagggcgagctgcccatgaaggagaaggaggccctgggcaagctgctgagccccatcagcagcatggcccacggcgtgcccgagggcgacaagcacagcctgctgggctgcctgaacctggtgccccccctgaagagcagctgcatcgagagactgcaggccgccgccaaggccgccgagatggaccccgtgaacagctaccaggcctggcagctgatggccagaggcatggccatggagcacggcttcctgagcaaggagcaccccctgcagagaaaccacgaggacaccctggccaacgccggcgtgctgttcgacaaggagaagagagagtacgtgctggtgggcgccgacggcagcaagcagaagatgcccgccgacctggtgcacagcaccaaggtgggcagccagagagacctgcccagcaagctggaccccctggagagcagcagagacttcctgagccacggcctgaaccagaccctggagtacaacctgcagggccccggcaacatgaaggagaagcccaccgagtgccccgactgcggcagagtgttcagaacctaccaccaggtggtggtgcacagcagagtgcacaagagagacagaaagggcgaggaggacggcctgcacgtgggcctggacgagagaagaggcagcggcagcgaccaggagagccagagcgtgagcagaagcaccacccccggcagcagcaacgtgaccgaggagagcggcgtgggcggcggcctgagccagaccggcagcgcccaggaggacagcccccaccccagcagccccagcagcagcgacatcggcgaggaggccggcagaagcgccggcgtgcagcagcccgccctgctgagagacagaagcctgggcagcgccatgaaggactgcccctactgcggcaagaccttcagaaccagccaccacctgaaggtgcacctgagaatccacaccggcgagaagccctacaagtgcccccactgcgactacgccggcacccagagcgccagcctgaagtaccacctggagagacaccacagagagagacagaacggcgccggccccctgagcggccagccccccaaccaggaccacaaggacgagatgagcagcaaggccagcctgttcatcagacccgacatcctgagaggcgccttcaagggcctgcccggcatcgacttcagaggcggccccgccagccagcagtggaccagcggcgtgctgagcagcggcgaccacagcggccaggccaccggcatgagcagcgaggtgcccagcgacgccctgaagggcaccgacctgcccagcaagagcacccacttcagcgagatcggcagagcctaccagagcatcgtgagcaacggcgtgaacttccagggcagcctgcaggccttcatggacagcttcgtgctgagcagcctgaagaaggagaaggacatgaaggacaaggccctggccgacccccccagcatgaaggtgcacggcgtggacggcggcgaggagaagcccagcggcaagagcagccagagaaagagcgagaagagccagtacgagcccctggacctgagcgtgagacccgacgccgccagcctgcccggcagcagcgtgaccgtgcaggacagcatcgcctggcacggctgcctgttctgcgccttcaccaccagcagcatggagctgatggccctgcacctgcaggccaaccacctgggcaaggccaagagaaaggacaacaccatcggcgtgaccgtgaactgcaaggaccaggccagagaggccagcaagatggccctgctgcccagcctgcagagcaacaaggacctgggcctgagcaacatgatcagcagcctggacagcgccagcgagaagatggcccagggccagctgaaggagaccctgggcgagcagaagagcggcgcctggaccggccacgtggaccccgccttctgcaacttccccagcgacttctacaagcagttcggcgtgtaccccggcatggtgggcagcggcgccagcagcagctgccccaacaaggagcccgacggcaaggcccacagcgaggaggacgtgcccatcctgatccccgagaccaccagcaagaacaccaccgacgacctgagcgacatcgccagcagcgaggacatggacagcagcaagggcgagaacaacgacgaggaggacgtggagaccgagcccgagatgatgaccaagcccctgagcgccctgagcaaggacagcagcagcgacggcggcgacagcctgcagcccaccggcaccagccagcccgtgcagggcctggtgagccccctgagccaggcccccgagaagcagtggcacagccagggcctgctgcaggcccaggaccccctggccggcctgcccaagcccgagagaggcccccagagcctggacaagcccatgaacatgctgagcgtgctgagagcctacagcagcgacggcctggccgccttcaacggcctggccagcagcaccgccaacagcggctgcatcaagagacccgacctgtgcggcaagtag

SEQ ID NO: 181808 - DNA, 3903 bp, Artificial Sequence
  derived and/or modified sequence
atggaggaggctagtttgtgccttggggtgagctctgccgagcccgaagccgaaccgcacctgtccggaccagtgctcaatggacagtatgctatgagccaaaaactccaccaaatcacctcccagctctcgcatgccttccccgaactccatcctcgaccaaatccagaggaaaagcctcccgcctcgcttgaagaaaaagcccatgtccctatgtctggacagcctatgggatctcagatggctctactggccaatcagctcggcagggaggtggacaccagcctgaacggtcgcgtggacctccagcagtttctaaacgggcagaaccttggaatcatgtcccagatgagcgacatcgaagacgatgccagaaagaacaggaagtacccttgccctctttgtggaaagcggttcaggtttaactctattctgagcttacatatgagaacacacaccggcgaaaaaccattcaagtgtccatactgcgaccatcgcgctgcacaaaaagggaacttaaaaatccacctgcggacacacaagctgggcaacttgggcaaaggtcggggacgggtgcgggaggagaaccggctgcttcacgaactagaagaaagggcaattctacgcgataaacaactgaagggttcccttcttcagccaagaccagatctgaaacccccgcctcatgcgcaacaggcaccactggccgcatgcacattggctttgcaagcaaatcactccgtgccagatgtggcacatcctgtgcctagccctaaacctgccagtgtccaggaggacgccgtggcgccggcggcgggatttagatgtacattctgcaagggaaagtttaaaaagagagaagagctggaccgtcacataagaattttacacaagccttacaagtgtacactgtgcgatttcgccgctagtcaggaggaggagttgatcagtcacgttgagaaagctcacatcacggcagaatctgctcaaggccagggacccaacggaggcggagaacaatcagcgaatgagttccgttgtgaagtgtgcggtcaggtgtttagtcaggcctggttcttgaaaggacacatgcggaaacacaaagattccttcgaacactgttgccagatctgcggccggcgctttaaagaaccctggttcctgaaaaaccacatgaaagtccatctgaataaactttctgtgaagaataagtctccgtccgatccggaagtgccagtccccatgggcgggatgagccaggaggcgcatgctaacctttactcacggtacctaagttgtctccagtctgggtttatgacacctgataaggcgggattgagcgaacccagccagttatacggcaagggcgagttaccgatgaaggaaaaagaggccttgggtaagttgctgtctcccatctcctctatggctcatggcgttccagagggggacaagcatagtttactcgggtgtctgaatctggtgccaccactgaagtccagctgtatcgaaaggcttcaggccgctgcgaaagccgcggagatggaccccgtcaatagttaccaggcgtggcagctgatggcccgtggcatggcgatggagcacggttttttgtcaaaagagcaccctctccagcggaaccacgaagatacgctagccaatgctggagtgctattcgataaggagaagagggagtacgtgctcgtcggggctgacgggtcaaaacaaaaaatgcctgccgatcttgttcactctacaaaagtaggaagccagcgcgatctgccatcaaagctggatcctctcgagtcttctcgggattttctgagccacggcctcaaccagaccctagagtacaacttgcagggacccgggaacatgaaagaaaaacctaccgaatgtccagactgtggcagggtttttcggacctaccatcaggtggtggtacatagcagagtgcacaagagggaccgaaagggcgaagaagatgggctgcacgtgggcctcgacgagcgacgtggtagtggttctgaccaggaatcccaatctgtgtcccgtagtaccactccaggctcttctaatgttaccgaggagagcggggtgggcggcggactgagccagactgggtccgctcaggaggactcacctcatccttcaagcccatcttcttcggatatcggtgaagaagcgggtcgttcagccggggtgcagcagccggccctgctcagagacaggtccctgggctctgccatgaaggactgtccctactgcggaaagacttttcggacatcgcatcatctcaaggtgcacttgaggatacataccggggagaagccctacaaatgcccccattgtgactacgctggtacccagagcgcctctttgaaatatcacctagaacgccatcatcgtgagcgtcagaacggagccgggcctctgtctgggcagccccctaaccaagatcacaaggatgagatgtcctctaaagcatcacttttcatccggccagatattctcaggggagcttttaagggactgcccggcattgacttccgaggcggcccggcctcccagcagtggacatccggagtgctaagctccggggatcactctggccaggccacaggcatgagttcagaggtaccctccgacgcgctcaaaggaaccgaccttccgtcaaagtccacccatttcagcgagattggacgtgcctaccagagcatcgtgagcaacggcgtgaacttccaaggatcattacaggcattcatggattccttcgtgctgagttcactgaagaaagaaaaagatatgaaggacaaggccctggccgatcccccatctatgaaggtccatggtgtggatgggggagaggagaaaccatcaggcaagagcagtcagcgcaagtccgagaaatcccaatacgagcctttggatttaagcgtcaggcctgatgccgccagccttcccgggtcgtctgtcacggtgcaggactcaattgcctggcatggatgtcttttctgcgcgtttaccacctcttcaatggaacttatggcactccacttgcaggctaaccatctggggaaggctaagcgcaaagacaatacaatcggagtgaccgtgaactgtaaggatcaggctagagaagcgtctaaaatggccctcctgccatctctgcaatccaataaagacttaggcctgtctaatatgatatcctctctggatagtgccagtgaaaaaatggcccagggtcagctcaaagagacactgggagagcagaagtctggcgcttggacaggccacgtggacccagcattctgtaatttcccgagcgatttctataaacagttcggcgtctaccccggaatggtggggtccggcgcctcatcaagctgccctaacaaggagccagacggaaaggcacattcagaggaagacgttccgattctgatccccgagaccaccagcaagaacacaaccgatgacctttctgacattgctagttccgaagatatggactcaagtaaaggcgaaaacaacgacgaggaagatgtggagactgaaccagaaatgatgaccaagcccctctctgcactgtccaaagactcatcaagcgatggaggagacagtctgcagcctacaggcacctctcagcctgtccaggggctcgtctctccactgtctcaggctccagagaagcagtggcattcccagggtctcctgcaggcccaggatccgttggcaggcctgccaaagcctgagcgggggcctcagtccctggataagccgatgaacatgctctctgtcttaagagcttattccagcgatggattagccgcattcaatggtcttgcttcatcaactgcaaatagcggatgtatcaagcgacctgacctttgcgggaagtag

SEQ ID NO: 181809 - DNA, 3903 bp, Artificial Sequence
  derived and/or modified sequence
atggaggaggccagcctgtgcctgggcgtgagcagcgctgagcctgaggccgagccccacctgagcggccctgtgctgaatggccagtatgccatgagccagaagctgcaccagatcaccagccagctgagccacgccttccctgagctgcacccccggcccaaccctgaggagaagcccccagccagcctggaggagaaggcccacgtgcccatgagcggccagcccatgggcagccagatggccctgctggccaaccagctgggccgggaggtggacaccagcctgaatggccgggtggacctgcagcagttcctgaatggccagaacctgggcatcatgagccagatgtctgacattgaagatgatgccaggaagaacaggaagtacccctgccccctgtgtgggaagcgcttccgcttcaacagcatcctgagcctgcacatgaggacccacactggagagaagcccttcaagtgcccctactgtgaccacagagctgcccagaagggcaacctgaagatccacctgcggacccacaagctgggcaacctgggcaagggccggggccgggtgcgggaggagaaccggctgctgcacgagctggaggagcgggccatcctgcgggacaagcagctgaagggcagcctgctgcagcccaggccagacctgaagcccccacctcatgcccagcaggcccccctggccgcctgcaccctggccctgcaggccaaccacagcgtgcctgatgtggcccaccctgtgcccagccccaagccagcctctgtgcaggaggatgctgtggccccagctgctggcttccgctgcaccttctgcaagggcaagttcaagaagcgggaggagctggacagacacatccgcatcctgcacaagccctacaagtgcaccctgtgtgactttgctgccagccaggaggaggagctgatcagccacgtggagaaggcccacatcacagctgagagcgcccagggccagggccccaatggaggaggagagcagagcgccaatgagttccgctgtgaggtgtgtggccaggtgttcagccaggcctggttcctgaagggccacatgaggaagcacaaggacagctttgagcactgctgccagatctgtggccgccgcttcaaggagccctggttcctgaagaaccacatgaaggtgcacctgaacaagctgtctgtgaagaacaagagccccagcgaccctgaggtgcctgtgcccatgggcggcatgagccaggaggcccacgccaacctgtacagccgctacctgagctgcctgcagagcggcttcatgaccccagacaaggccggcctgtctgagcccagccagctgtatggaaaaggagagctgcccatgaaggagaaggaggccctgggcaagctgctgagccccatcagctccatggcccacggcgtgcctgagggggacaagcacagcctgctgggctgcctgaacctggtgccccccctgaagagcagctgcatcgagcggctgcaggccgccgccaaggctgctgagatggaccctgtgaacagctaccaggcctggcagctgatggcccggggcatggccatggagcacggcttcctgagcaaggagcaccccctgcagaggaaccacgaggacaccctggccaatgccggcgtgctgtttgacaaggagaagcgggagtatgtgctggtgggcgcagatggcagcaagcagaagatgcctgctgacctggtgcacagcaccaaggtgggcagccagagggacctgcccagcaagctggaccccctggagagcagccgggacttcctgagccacggcctgaaccagaccctggagtacaacctgcagggccctggcaacatgaaggagaagcccacagagtgcccagactgtggccgggtcttccgcacctaccaccaggtggtggtgcacagccgggtgcacaagagggacaggaagggggaggaggatggcctgcacgtgggcctggatgaaagaagaggcagcggcagtgaccaggagagccagagcgtgagccgcagcaccaccccaggcagcagcaatgtgacagaggagagcggcgtgggcggcggcctgagccagacaggcagcgcccaggaggacagcccccaccccagcagccccagcagcagtgacattggagaggaggccggccgctctgctggggtgcagcagcctgccctgctgcgggacaggagcctgggcagcgccatgaaggactgcccctactgtgggaagaccttccgcaccagccaccacctgaaggtgcacctgcgcatccacactggagagaagccctacaagtgcccccactgtgactatgccggcacccagagcgccagcctgaagtaccacctggagcggcaccaccgggagcggcagaatggagctggccccctgagcggccagccccccaaccaggaccacaaggatgagatgagcagcaaggccagcctcttcatccggccagacatcctgcggggggccttcaagggcctgcccggcatcgacttccggggcggccctgccagccagcagtggaccagcggcgtgctgagcagcggggaccacagcggccaggccaccggcatgagcagcgaggtgcccagtgatgccctgaagggcacagacctgcccagcaagagcacccacttcagcgagatcggccgggcctaccagagcatcgtgtccaatggagtgaacttccagggcagcctgcaggccttcatggacagctttgtgctgagcagcctgaagaaggagaaggacatgaaggacaaggccctggccgacccccccagcatgaaggtgcacggcgtggatggaggagaggagaagcccagcggcaagagcagccagaggaagtctgagaagagccagtatgagcccctggacctgtctgtgcggccagatgctgccagcctgcccggcagctctgtgacagtgcaggacagcatcgcctggcacggctgcctcttctgtgccttcaccaccagctccatggagctgatggccctgcacctgcaggccaaccacctgggcaaggccaagaggaaggacaacaccatcggcgtgacagtgaactgcaaggaccaggcccgggaggccagcaagatggccctgctgcccagcctgcagagcaacaaggacctgggcctgagcaacatgatcagcagcctggacagcgccagcgagaagatggcccagggccagctgaaggagaccctgggggagcagaagagcggggcctggacaggccacgtggaccctgccttctgcaacttccccagcgacttctacaagcagtttggagtgtacccaggcatggtgggcagcggggccagcagcagctgccccaacaaggagccagatggcaaggcccacagtgaagaagatgtgcccatcctgatccctgagaccaccagcaagaacaccacagatgacctgagtgacatcgccagcagcgaggacatggacagcagcaagggggagaacaatgatgaagaagatgtggagacagagcctgagatgatgaccaagcccctgagcgccctgagcaaggacagcagcagtgatggaggagacagcctgcagcccaccggcaccagccagcctgtgcagggcctggtgagccccctgagccaggcccctgagaagcagtggcacagccagggcctgctgcaggcccaggaccccctggccggcctgcccaagccagagcggggcccccagagcctggacaagcccatgaacatgctgtctgtgctgcgggcctacagcagtgatggcctggccgccttcaacggcctggccagcagcacagccaacagcggctgcatcaagaggccagacctgtgtgggaagtag

SEQ ID NO: 181810 - DNA, 3903 bp, Artificial Sequence
  derived and/or modified sequence
atggaggaggccagcctgtgcctgggcgtgagcagcgccgagcccgaggcggaaccccacctcagcggccccgttctgaacgggcaatacgcaatgtcacagaagctgcaccaaatcacctcccagctgtctcacgcgttccccgaactgcaccccaggcctaatcccgaagaaaagcccccagccagcctggaagaaaaggcacacgtgcctatgagcgggcagccaatgggctctcagatggccttactcgccaatcagctgggaagggaagtggacacttcattaaatggtagagtcgacctccagcagttcctgaatggccagaatctgggtatcatgtcacagatgagcgatattgaggacgacgctcgtaagaatagaaagtacccatgccctttatgcggaaaacggttcagattcaattcaattctctcactgcatatgcggacacatacaggagaaaagccatttaagtgcccctattgtgaccacagggccgctcagaagggtaacctcaagatacacctgcgcacgcataagctaggcaatctcggaaaagggaggggaagggtgcgggaggaaaaccgcctgctgcatgaactggaggagagagccatactgagggacaagcaactcaaaggatccctcctccaaccccgacctgacctcaagccgcctccacacgcccagcaagcccctttagccgcctgcactctcgcactacaggcaaaccattctgtacctgacgttgcccacccagtcccatcacctaaaccagcctccgtgcaagaggatgctgtggcacccgctgcggggttcagatgtactttttgcaaggggaaattcaaaaaacgtgaggagctggaccggcatatccgaatcttgcacaagccttataaatgtacgctctgtgatttcgctgccagtcaggaggaagagctgatctcccatgtggagaaggcacacattacagctgagagtgctcagggtcaggggccgaatggtggcggcgaacaaagcgctaatgagtttcggtgtgaagtgtgtggacaagtcttcagtcaggcctggttcttgaaaggtcacatgagaaagcacaaagatagtttcgagcattgttgccagatttgcgggcgacgctttaaagagccatggtttctgaagaaccatatgaaggtccacctgaataagctgtcagttaaaaataaatcacccagcgatccagaagtgcccgtgccgatggggggtatgtcacaggaggcccatgcaaatctatattctaggtacctcagctgtctccaaagtggatttatgacacccgataaggcagggctttccgagccctcccagctttatggcaaaggagagctgcctatgaaggagaaagaagctctgggaaaactccttagtccaatctcaagcatggcccacggcgttcccgaaggcgataaacacagcctgttgggttgcctcaacctcgtcccccctctgaagtcttcatgtatcgagcgtctccaggctgccgccaaagccgctgaaatggacccagtgaattcttatcaagcctggcagctcatggcccgtggaatggccatggaacacgggtttctgtcaaaggagcatcccctccaaaggaatcatgaggacaccctggcgaacgccggcgtactattcgacaaggagaagagggagtacgtgctggtcggtgctgacggtagcaaacagaagatgcctgccgacctcgtacatagtaccaaggtgggaagtcagagggacctcccaagcaagcttgacccactggagagcagtagagacttcttaagtcacgggctgaaccagaccctggaatacaatctccaaggcccaggcaacatgaaagagaaaccaaccgagtgccctgactgcggcagggtgttccggacataccatcaggtcgtagtgcattccagagtgcacaagagggaccgtaaaggcgaggaagacggcctgcatgttggtttggacgaaaggagaggctcgggttctgatcaggagagccagtccgtgtccagatccactacccctggctcttcaaacgttaccgaagaatcaggcgttggtggtgggctgtctcagaccggttccgctcaggaggatagcccccatccctctagccccagctcttccgacataggggaggaggcaggccgatccgccggggtccagcaaccggcccttctcagggataggagtttaggctccgctatgaaagattgcccttactgtggcaaaacattcaggacgagtcatcacttgaaggtgcacctaagaattcacaccggggagaagccctacaaatgcccccactgtgattatgcaggtacccagtcggctagccttaagtatcatttagagaggcatcatagggagaggcagaacggagctggacccctaagtggacagccacccaatcaagaccacaaagatgaaatgtcatctaaggcctccctttttataaggcccgacattctacgcggcgccttcaagggcctgccgggcattgatttcagaggcggacctgcatctcagcagtggacgagtggagtgctgtcaagtggcgatcacagcggccaggctactgggatgtcgagcgaggtgccctctgacgcactgaagggtaccgatctccccagcaagtccacacacttcagcgaaatcggccgtgcataccagtcaattgtctccaacggcgtcaatttccaaggttctctccaagccttcatggatagcttcgtgctctcgtctttgaagaaagagaaagatatgaaggacaaggcgctggcggacccacccagcatgaaagttcatggggtggacgggggcgaggagaaaccctccggcaaatcatcccagcgcaagtctgagaaatctcagtacgaacctcttgacctctccgtccgtccggacgccgcatcgctgccaggcagttctgtgaccgttcaggactccatcgcttggcacggttgcctgttctgcgccttcaccacatcctcaatggagcttatggcactgcatctccaagctaatcacctaggaaaggcaaagcggaaagacaataccattggtgtcacggtcaattgcaaggatcaggcacgcgaggcctcgaaaatggccctcctaccgtcactgcagtccaacaaggatctgggacttagcaatatgatctcctctcttgattcagcatccgaaaagatggcccaaggccagctgaaagagactctgggggagcaaaaatcaggtgcttggaccgggcacgtggatccagcattttgcaacttcccgtccgacttctataagcagttcggggtgtacccaggcatggttggatcgggggccagctcatcttgtccgaataaggaacctgatggaaaagctcattccgaggaggacgtcccaatccttatccccgaaaccacctctaagaatacaactgatgacttgtcagacattgcatcttccgaggacatggattcatcgaagggcgagaacaatgatgaagaagatgtggagactgagcccgagatgatgaccaagcctctctctgccctttccaaagactctagctccgatgggggcgatagcctgcagcccactggcacctcccagcccgtgcaagggctggtctcgcccttgagccaggctcctgaaaagcagtggcattctcaggggttgctccaggcacaagacccactggcggggttgccaaagccagaaaggggtccccagtcactggataaaccaatgaatatgctgtcagtgctcagagcttactcctcagacgggttagcggcattcaacggcctggcttcatcaacggcgaatagcggctgcattaagaggccggacctctgtgggaaatag

SEQ ID NO: 181811 - DNA, 3903 bp, Artificial Sequence
  derived and/or modified sequence
atggaggaggctagtctgtgcttaggagtatcttctgccgagccagaggccgagcctcacctctctggacctgttttgaatggacagtacgcgatgtcgcagaagttgcaccagatcacatcacaactctctcacgcattcccagagttgcatcccagacctaatcccgaagagaaaccacctgcttcactggaggagaaggcacatgtacccatgagcgggcagccaatgggatcccagatggccctgctcgcgaaccagctgggcagagaggtagatacaagcctcaacggtagggtggacctccagcaattcctgaacggccaaaacctgggcatcatgagccaaatgtccgacattgaggacgacgccagaaaaaatcggaaatacccttgccctctgtgtgggaagagatttagattcaatagtatattaagtcttcatatgaggacccatactggggaaaaaccattcaaatgcccttattgcgatcatagagcagcacagaaaggcaacctaaagatccaccttagaacccacaaactggggaacctgggcaaagggcgtggacgggtacgggaggaaaataggctgttacatgagcttgaagaacgcgcaatcctccgcgacaaacaactgaagggctccctgcttcagccgcgtccagatttgaagcctcctccccatgcccagcaagcccctctggctgcctgtacactggccctgcaagcgaatcatagcgtgcctgacgtcgcccaccctgtgccgtcaccaaaacccgcaagcgtgcaggaggacgccgtcgcacccgcagcaggctttcgatgcaccttttgcaaggggaaattcaagaaacgcgaggaactagatcggcacatcagaatcctgcataaaccgtacaaatgcacactgtgtgacttcgccgctagccaggaagaggaacttatctcacacgtcgagaaagcccatatcaccgctgaatccgcacagggacaggggcctaatgggggaggggagcagagcgcgaatgaatttcggtgtgaagtgtgcggccaggttttttctcaggcttggttcctcaagggccatatgcgcaagcataaagacagcttcgaacactgctgtcaaatttgcggcagaaggttcaaggagccttggttcctcaaaaaccacatgaaggtccacctgaataagctgtcggtgaagaacaagagcccttccgatcccgaggtccctgttcccatgggtggtatgtctcaagaagcccacgcaaatctgtattctcggtacttgtcttgtctgcagtcaggtttcatgacgccagataaagccggactgtcagaaccatcccagttatacggaaaaggagagttaccaatgaaagagaaggaagcgctggggaagctacttagccctatttcaagtatggcccatggtgtgcctgaaggcgataaacactccctgctgggctgcctgaacttagtgcctcctctgaagagtagttgtatcgagaggctgcaagccgcagcaaaggccgctgaaatggacccagtcaattcttaccaggcctggcagcttatggccaggggcatggccatggaacatgggtttctgtcaaaagagcatcccctccagaggaaccatgaggacactctggctaacgcaggagtgcttttcgacaaggaaaagcgggagtatgttctcgtgggagcggacggctccaaacagaagatgccagccgacctcgttcacagtacaaaggtgggaagccagcgggatttgccctcaaaactcgacccactggagtcatctagagatttcctttcccacgggctaaatcagacactggaatacaatctgcaaggacccggaaatatgaaggagaagcccacagagtgtcctgactgcggccgtgtgtttagaacctaccatcaagtggtggttcatagtcgggtccataagcgcgatcggaaaggcgaggaagatggcttgcacgtcggactggatgagaggaggggcagcggcagcgatcaggaaagccaatctgtgagccgctcgacaacgccagggtcctccaacgttacagaagaaagcggcgtgggagggggtttaagtcaaaccggttctgcacaggaggatagcccccaccctagctcaccgagctccagtgacatcggcgaagaggccggtagatctgctggcgtccagcagccagcacttctccgagaccgaagcctgggttcagctatgaaggactgtccttattgcggaaaaacatttagaacatctcatcatcttaaagttcacctgaggatccacacgggagaaaagccgtacaagtgcccacattgcgattatgccggaactcaatccgcttctctgaaatatcatttagaacgccatcacagggaacgccagaacggagccggtcccttgtccgggcagccccctaatcaggaccacaaggacgagatgtcctctaaggcgagcctgtttatccgccctgatattctaaggggagcctttaagggccttccaggcatagattttcgcggtggccctgcttctcaacagtggacaagtggcgtgctatcctctggcgaccactcaggccaggcgactggaatgtcatccgaggttccctcagacgccttgaagggtactgaccttccgtccaaatccacccacttctcagaaatagggagagcgtatcaatctattgtgtccaatggagttaactttcaggggtccctccaggctttcatggactcttttgtgctgtccagcctgaagaaggagaaggacatgaaagataaggccctagccgatccgcctagtatgaaggtccacggtgtggacggcggagaggaaaagccaagtggaaaatctagccagcgcaagagcgagaagagccagtacgagccgcttgatctgagcgtccgccctgacgcagcgagtttgcccggaagcagtgtgactgtacaggattctatcgcttggcatggatgccttttctgcgcttttacgacatcatctatggagctcatggcactgcacctacaggccaatcatctgggaaaagcaaagcgaaaagataacaccattggagtgaccgtaaattgcaaggatcaagccagggaggcttctaaaatggcattgctccccagtctccagagcaacaaagatcttggactgagcaatatgatctccagtcttgactcagccagcgagaaaatggcccaggggcagctcaaggaaacactcggggagcagaagagcggagcctggactggccatgtggacccagctttctgtaacttcccaagcgatttctacaaacagttcggggtctacccaggcatggtcggctccggtgctagttcctcctgccctaacaaggaacccgatggtaaagcgcatagtgaagaagatgtgccaatactcattccagaaaccacctcgaagaacacgaccgatgacctgtccgatatcgcttcaagtgaagacatggacagctccaagggcgaaaacaatgatgaggaagatgtggagactgagcctgagatgatgactaaaccattatcagcgctttctaaagactccagcagtgacggtggagacagtctgcagcctacaggcaccagccaaccagtgcagggcctggtgtcccccctgagtcaggccccagagaaacagtggcactcgcaaggactcttacaggcccaggatcctctagccggtttgcctaagccggaacgtggtccgcaaagtctggataaacccatgaatatgctgtcggtgctgcgggcatatagctctgatggccttgccgcttttaacggcctcgcatcgagcactgctaacagcggttgtatcaagcgaccagatctttgcggaaagtag

SEQ ID NO: 181812 - protein, 1235 aa, Artificial Sequence
  derived and/or modified sequence
MSFFNFRKIFKLGSEKKKKQYEHVKRDLNPEDFWEIIGELGDGAFGKVYKAQNKETSVLAAAKVIDTKSEEELEDYMVEIDILASCDHPNIVKLLDAFYYENNLWILIEFCAGGAVDAVMLELERPLTESQIQVVCKQTLDALNYLHDNKIIHRDLKAGNILFTLDGDIKLADFGVSAKNTRTIQRRDSFIGTPYWMAPEVVMCETSKDRPYDYKADVWSLGITLIEMAEIEPPHHELNPMRVLLKIAKSEPPTLAQPSRWSSNFKDFLKKCLEKNVDARWTTSQLLQHPFVTVDSNKPIRELIAEAKAEVTEEVEDGKEEDEEEETENSLPIPASKRASSDLSIASSEEDKLSQNACILESVSEKTERSNSEDKLNSKILNEKPTTDEPEKAVEDINEHITDAQLEAMTELHDRTAVIKENEREKRPKLENLPDTEDQETVDINSVSEGKENNIMITLETNIEHNLKSEEEKDQEKQQMFENKLIKSEEIKDTILQTVDLVSQETGEKEANIQAVDSEVGLTKEDTQEKLGEDDKTQKDVISNTSDVIGTCEAADVAQKVDEDSAEDTQSNDGKEVVEVGQKLINKPMVGPEAGGTKEVPIKEIVEMNEIEEGKNKEQAINSSENIMDINEEPGTTEGEEITESSSTEEMEVRSVVADTDQKALGSEVQDASKVTTQIDKEKKEIPVSIKKEPEVTVVSQPTEPQPVLIPSININSDSGENKEEIGSLSKTETILPPESENPKENDNDSGTGSTADTSSIDLNLSISSFLSKTKDSGSISLQETRRQKKTLKKTRKFIVDGVEVSVTTSKIVTDSDSKTEELRFLRRQELRELRFLQKEEQRAQQQLNSKLQQQREQIFRRFEQEMMSKKRQYDQEIENLEKQQKQTIERLEQEHTNRLRDEAKRIKGEQEKELSKFQNMLKNRKKEVINEVEKAPKELRKELMKRRKEELAQSQHAQEQEFVQKQQQELDGSLKKIIQQQKAELANIERECLNNKQQLMRAREAAIWELEERHLQEKHQLLKQQLKDQYFMQRHQLLKRHEKETEQMQRYNQRLIEELKNRQTQERARLPKIQRSEAKTRMAMFKKSLRINSTATPDQDRDKIKQFAAQEEKRQKNERMAQHQKHENQMRDLQLQCEANVRELHQLQNEKCHLLVEHETQKLKELDEEHSQELKEWREKLRPRKKTLEEEFARKLQEQEVFFKMTGESECLNPSTQSRISKFYPIPSLHSTGS

SEQ ID NO: 181813 - DNA, 3708 bp, Artificial Sequence
  derived and/or modified sequence
atgagcttcttcaacttcagaaagatcttcaagctgggcagcgagaagaagaagaagcagtacgagcacgtgaagagagacctgaaccccgaggacttctgggagatcatcggcgagctgggcgacggcgccttcggcaaggtgtacaaggcccagaacaaggagaccagcgtgctggccgccgccaaggtgatcgacaccaagagcgaggaggagctggaggactacatggtggagatcgacatcctggccagctgcgaccaccccaacatcgtgaagctgctggacgccttctactacgagaacaacctgtggatcctgatcgagttctgcgccggcggcgccgtggacgccgtgatgctggagctggagagacccctgaccgagagccagatccaggtggtgtgcaagcagaccctggacgccctgaactacctgcacgacaacaagatcatccacagagacctgaaggccggcaacatcctgttcaccctggacggcgacatcaagctggccgacttcggcgtgagcgccaagaacaccagaaccatccagagaagagacagcttcatcggcaccccctactggatggcccccgaggtggtgatgtgcgagaccagcaaggacagaccctacgactacaaggccgacgtgtggagcctgggcatcaccctgatcgagatggccgagatcgagcccccccaccacgagctgaaccccatgagagtgctgctgaagatcgccaagagcgagccccccaccctggcccagcccagcagatggagcagcaacttcaaggacttcctgaagaagtgcctggagaagaacgtggacgccagatggaccaccagccagctgctgcagcaccccttcgtgaccgtggacagcaacaagcccatcagagagctgatcgccgaggccaaggccgaggtgaccgaggaggtggaggacggcaaggaggaggacgaggaggaggagaccgagaacagcctgcccatccccgccagcaagagagccagcagcgacctgagcatcgccagcagcgaggaggacaagctgagccagaacgcctgcatcctggagagcgtgagcgagaagaccgagagaagcaacagcgaggacaagctgaacagcaagatcctgaacgagaagcccaccaccgacgagcccgagaaggccgtggaggacatcaacgagcacatcaccgacgcccagctggaggccatgaccgagctgcacgacagaaccgccgtgatcaaggagaacgagagagagaagagacccaagctggagaacctgcccgacaccgaggaccaggagaccgtggacatcaacagcgtgagcgagggcaaggagaacaacatcatgatcaccctggagaccaacatcgagcacaacctgaagagcgaggaggagaaggaccaggagaagcagcagatgttcgagaacaagctgatcaagagcgaggagatcaaggacaccatcctgcagaccgtggacctggtgagccaggagaccggcgagaaggaggccaacatccaggccgtggacagcgaggtgggcctgaccaaggaggacacccaggagaagctgggcgaggacgacaagacccagaaggacgtgatcagcaacaccagcgacgtgatcggcacctgcgaggccgccgacgtggcccagaaggtggacgaggacagcgccgaggacacccagagcaacgacggcaaggaggtggtggaggtgggccagaagctgatcaacaagcccatggtgggccccgaggccggcggcaccaaggaggtgcccatcaaggagatcgtggagatgaacgagatcgaggagggcaagaacaaggagcaggccatcaacagcagcgagaacatcatggacatcaacgaggagcccggcaccaccgagggcgaggagatcaccgagagcagcagcaccgaggagatggaggtgagaagcgtggtggccgacaccgaccagaaggccctgggcagcgaggtgcaggacgccagcaaggtgaccacccagatcgacaaggagaagaaggagatccccgtgagcatcaagaaggagcccgaggtgaccgtggtgagccagcccaccgagccccagcccgtgctgatccccagcatcaacatcaacagcgacagcggcgagaacaaggaggagatcggcagcctgagcaagaccgagaccatcctgccccccgagagcgagaaccccaaggagaacgacaacgacagcggcaccggcagcaccgccgacaccagcagcatcgacctgaacctgagcatcagcagcttcctgagcaagaccaaggacagcggcagcatcagcctgcaggagaccagaagacagaagaagaccctgaagaagaccagaaagttcatcgtggacggcgtggaggtgagcgtgaccaccagcaagatcgtgaccgacagcgacagcaagaccgaggagctgagattcctgagaagacaggagctgagagagctgagattcctgcagaaggaggagcagagagcccagcagcagctgaacagcaagctgcagcagcagagagagcagatcttcagaagattcgagcaggagatgatgagcaagaagagacagtacgaccaggagatcgagaacctggagaagcagcagaagcagaccatcgagagactggagcaggagcacaccaacagactgagagacgaggccaagagaatcaagggcgagcaggagaaggagctgagcaagttccagaacatgctgaagaacagaaagaaggaggtgatcaacgaggtggagaaggcccccaaggagctgagaaaggagctgatgaagagaagaaaggaggagctggcccagagccagcacgcccaggagcaggagttcgtgcagaagcagcagcaggagctggacggcagcctgaagaagatcatccagcagcagaaggccgagctggccaacatcgagagagagtgcctgaacaacaagcagcagctgatgagagccagagaggccgccatctgggagctggaggagagacacctgcaggagaagcaccagctgctgaagcagcagctgaaggaccagtacttcatgcagagacaccagctgctgaagagacacgagaaggagaccgagcagatgcagagatacaaccagagactgatcgaggagctgaagaacagacagacccaggagagagccagactgcccaagatccagagaagcgaggccaagaccagaatggccatgttcaagaagagcctgagaatcaacagcaccgccacccccgaccaggacagagacaagatcaagcagttcgccgcccaggaggagaagagacagaagaacgagagaatggcccagcaccagaagcacgagaaccagatgagagacctgcagctgcagtgcgaggccaacgtgagagagctgcaccagctgcagaacgagaagtgccacctgctggtggagcacgagacccagaagctgaaggagctggacgaggagcacagccaggagctgaaggagtggagagagaagctgagacccagaaagaagaccctggaggaggagttcgccagaaagctgcaggagcaggaggtgttcttcaagatgaccggcgagagcgagtgcctgaaccccagcacccagagcagaatcagcaagttctaccccatccccagcctgcacagcaccggcagctag

SEQ ID NO: 181814 - DNA, 3708 bp, Artificial Sequence
  derived and/or modified sequence
atgtctttctttaatttcagaaaaatcttcaagctgggctccgagaagaagaagaagcaatatgaacatgtcaagagagatcttaaccctgaggacttttgggagataatcggcgaactgggcgatggggcctttggcaaagtttataaggcgcagaataaggagacatccgtgcttgctgccgccaaggtaatagacactaagtccgaggaggagttggaggactatatggttgagatcgatatccttgcctcttgtgatcatccaaatatagtgaagctgctggacgcattctattatgaaaataatctttggatcctgattgagttttgcgctggcggagctgtcgacgcggtcatgctcgaacttgagcgcccgctgacagaatcacaaattcaggtggtctgcaaacagacgctcgacgcgctgaattacctgcatgacaataaaattattcaccgcgacctgaaagccgggaacatactgtttaccctcgacggcgacatcaagctcgccgacttcggcgtgtctgctaagaatactagaaccattcagcgtagggattctttcattgggaccccctactggatggcccccgaggtcgtcatgtgtgagacttccaaggatcggccttatgattacaaagcggatgtttggtcgctggggattaccctgattgagatggccgagatcgagcctccccaccacgagttgaatcccatgcgcgtcctgctcaaaatcgcaaagagtgagcctccaacactcgcccaacccagccggtggtcgagtaacttcaaggactttcttaagaagtgtttggagaaaaatgtggatgcccgctggacaacaagtcaattgttacagcatccctttgttactgtggattctaacaagcctataagagaactcattgcagaggccaaagctgaggtgaccgaggaagtggaggacggtaaggaggaagacgaggaggaagaaacagaaaactctctgcccattcctgcctctaagagagcatccagtgatttatctatcgccagttctgaggaagacaaactgtcccaaaacgcctgcatcttggagagtgtctccgagaagactgagcgctctaactccgaggacaagttgaattctaaaatcctcaatgaaaaaccaactactgatgagcccgagaaggcagtcgaagacatcaatgagcatataacggatgcccagttggaggccatgactgaactgcatgatcggaccgccgtaataaaagagaatgaaagagagaagcgcccaaaattggagaacctccccgacactgaagaccaggaaacagtggacatcaatagcgtgtctgagggaaaggagaataacattatgataaccctggaaactaatatcgaacacaatctgaagagtgaagaagaaaaagaccaggagaaacagcagatgtttgagaacaagctgataaaatccgaagagatcaaggataccatcctgcagaccgtggatctggtctctcaggagaccggagaaaaggaggcaaacattcaggccgtggactccgaggtagggttgacgaaggaagacactcaggagaagctgggcgaagacgataagacccaaaaagatgtgatttccaatacaagtgacgtgatagggacatgtgaggcggcggacgtcgcccaaaaagtggacgaggattctgccgaggacacccagtccaatgacggcaaggaggtggtggaagtcgggcagaagctgataaataaacccatggtcgggccagaggctggaggcacaaaggaagtgccgatcaaagagatcgtagagatgaacgagatagaggaaggcaaaaacaaagagcaggccattaacagcagcgagaacatcatggacatcaacgaggaaccggggacaacagaaggtgaagagatcactgagagctcgtctacagaggagatggaagtccgaagcgtcgtagcggacacagatcagaaggcactcgggtcagaggtgcaggatgcatccaaggtgactactcagatagataaagaaaagaaggagattccagtgagcataaagaaggaaccggaagttacagtggtgtcacagcccaccgagccccagccggtgctaattccatcgatcaatattaactctgacagcggggaaaataaagaggagatcgggtccttgagcaagaccgagactattctaccacccgagtccgagaatcccaaagaaaatgataacgactctggtactggctcaaccgctgacacctcatctatcgatctaaacttaagtatctcatccttcctaagcaaaacaaaagattcaggtagcattagtctccaggagacgcgtaggcagaagaagaccctaaaaaagacccgaaagttcattgtcgacggcgtcgaagtttcggtaacaaccagtaaaatcgtaaccgactctgattccaaaacagaagagctaaggtttcttagacggcaagaacttagggagctgcggttccttcagaaggaggagcaacgcgcccagcagcagcttaattctaagttacagcagcagcgggaacagatcttccggcgttttgaacaggagatgatgtcaaagaagagacagtacgaccaggagatcgaaaatctggaaaagcagcagaagcaaaccatcgagcggctggagcaggagcacaccaatagattgcgcgacgaggccaaaaggatcaagggagagcaggagaaagaactgagtaaatttcaaaatatgctcaaaaaccgcaaaaaggaggtaattaatgaggtggagaaggcgcccaaggagcttaggaaagagttaatgaaacggcgaaaagaagaactggcccagagccagcacgctcaagagcaggagtttgttcagaagcagcagcaggaacttgatggaagcctgaagaaaatcatacaacaacagaaggccgagttagctaatatagagagagaatgtcttaataacaaacagcaactcatgagggcacgggaagctgctatctgggagctcgaagagaggcatttgcaggaaaaacatcagcttctgaagcagcaactgaaggaccagtacttcatgcaaaggcaccaattgctgaagcgccatgaaaaagagacagaacagatgcagaggtacaatcaacgactcatcgaagagttgaagaatcgccagacgcaagaacgggctcggttgcccaaaatccagcgatctgaggctaaaactcgcatggccatgttcaagaaaagcctcaggataaactccaccgcaaccccggaccaggacagagacaagatcaagcagttcgcggcccaggaagaaaagcggcagaaaaatgaacggatggcacagcaccagaagcacgagaaccaaatgcgggatctgcaattacagtgcgaggctaacgtgcgggagcttcaccaattacaaaatgaaaaatgccatctgctcgtcgagcatgagacccagaagcttaaggaattggatgaggagcactcgcaggaacttaaggaatggagagagaaactccgtccccggaagaagacgctcgaggaagagttcgccaggaaactgcaggagcaagaggttttctttaaaatgacaggagagtccgagtgcctgaacccctccacgcaatcccgaatctcgaagttttatccaatcccctcactccactccaccggatcctag

SEQ ID NO: 181815 - DNA, 3708 bp, Artificial Sequence
  derived and/or modified sequence
atgtccttcttcaacttcaggaagatcttcaagctgggcagcgagaagaagaagaagcagtatgaacatgtgaagagggacctgaaccctgaggacttctgggagatcattggagagctgggagatggagccttcggcaaggtgtacaaggcccagaacaaggagacctctgtgctggccgccgccaaggtgattgacaccaagtctgaggaggagctggaggactacatggtggagattgacatcctggccagctgtgaccaccccaacatcgtgaagctgctggatgccttctactatgagaacaacctgtggatcctgattgagttctgtgccggcggcgctgtggatgctgtgatgctggagctggagcggcccctgacagagagccagatccaggtggtgtgcaagcagaccctggatgccctgaactacctgcatgacaacaagatcatccaccgggacctgaaggccggcaacatcctcttcaccctggatggagacatcaagctggccgactttggagtgtctgccaagaacaccaggaccatccagaggcgggacagcttcatcggcaccccctactggatggcccctgaggtggtgatgtgtgagaccagcaaggaccggccctatgactacaaggcagatgtgtggagcctgggcatcaccctcatcgagatggccgagattgagcccccccaccacgagctgaaccccatgagggtgctgctgaagatcgccaagtctgagccccccaccctggcccagcccagccgctggagcagcaacttcaaggacttcctgaagaagtgcctggagaagaatgtggatgcccgctggaccaccagccagctgctgcagcacccctttgtgacagtggacagcaacaagcccatccgggagctgattgctgaggccaaggccgaggtgacagaggaggtggaggatggcaaggaggaggatgaggaggaggagacagagaacagcctgcccatcccagccagcaagagggccagcagtgacctgagcatcgccagcagcgaggaggacaagctgagccagaatgcctgcatcctggagagcgtgtctgagaagacagagaggagcaacagcgaggacaagctgaacagcaagatcctgaatgagaagcccaccacagatgagcctgagaaggctgtggaggacatcaatgagcacatcacagatgcccagctggaggccatgacagagctgcatgacagaacagctgtgatcaaggaaaatgaaagagagaagaggcccaagctggagaacctgcctgacacagaggaccaggagaccgtggacatcaacagcgtgtctgagggcaaggagaacaacatcatgatcaccctggagaccaacatcgagcacaacctgaagtctgaggaggagaaggaccaggagaagcagcagatgtttgagaacaagctgatcaagtctgaggagatcaaggacaccatcctgcagacagtggacctggtgtcccaggagaccggggagaaggaggccaacatccaggccgtggacagcgaggtgggcctgaccaaggaggacacccaggagaagctgggagaagatgacaagacccagaaggatgtgatcagcaacaccagtgatgtgattggcacctgtgaggccgcagatgtggcccagaaggtggatgaagattctgctgaggacacccagagcaatgatggcaaggaggtggtggaggtgggccagaagctgatcaacaagcccatggtgggccctgaggccggcggcaccaaggaggtgcccatcaaggagatcgtggagatgaatgaaattgaggagggcaagaacaaggagcaggccatcaacagcagcgagaacatcatggacatcaatgaggagcccggcaccacagaaggagaggagatcacagagagcagcagcacagaggagatggaggtgcgctctgtggtggccgacacagaccagaaggccctgggcagcgaggtgcaggatgccagcaaggtgaccacccagattgacaaggagaagaaggagatccctgtgtccatcaagaaggagcctgaggtgacagtggtgtcccagcccacagagccccagcctgtgctgatccccagcatcaacatcaacagcgacagcggggagaacaaggaggagatcggcagcctgagcaagacagagaccatcctgcccccagagagcgagaaccccaaggaaaatgacaatgacagcggcaccggcagcacagctgacaccagcagcattgacctgaacctgagcatcagcagcttcctgagcaagaccaaggacagcggcagcatcagcctgcaggagacccggcggcagaagaagaccctgaagaagaccaggaagttcatcgtggatggagtggaggtgtctgtgaccaccagcaagatcgtgacagacagcgacagcaagacagaggagctgcgcttcctgcggcggcaggagctgcgggagctgcgcttcctgcagaaggaggagcagagggcccagcagcagctgaacagcaagctgcagcagcagcgggagcagatcttcagaagatttgagcaggagatgatgagcaagaagaggcagtatgaccaggagattgagaacctggagaagcagcagaagcagaccatcgagcggctggagcaggagcacaccaaccggctgagagatgaggccaagaggatcaagggggagcaggagaaggagctgagcaagttccagaacatgctgaagaacaggaagaaggaggtgatcaatgaggtggagaaggcccccaaggagctgaggaaggagctgatgaagaggaggaaggaggagctggcccagagccagcacgcccaggagcaggagtttgtgcagaagcagcagcaggagctggatggcagcctgaagaagatcatccagcagcagaaggccgagctggccaacatcgagcgggagtgcctgaacaacaagcagcagctgatgagggcccgggaggccgccatctgggagctggaggagcggcacctgcaggagaagcaccagctgctgaagcagcagctgaaggaccagtacttcatgcagaggcaccagctgctgaagagacatgagaaggagacagagcagatgcagcgctacaaccagaggctgattgaggagctgaagaaccggcagacccaggagcgggcccggctgcccaagatccagaggtctgaggccaagaccaggatggccatgttcaagaagagcctgcgcatcaacagcacagccaccccagaccaggaccgggacaagatcaagcagtttgctgcccaggaggagaagaggcagaagaatgaaagaatggcccagcaccagaagcatgagaaccagatgagggacctgcagctgcagtgtgaggccaacgtgcgggagctgcaccagctgcagaatgagaagtgccacctgctggtggagcacgagacccagaagctgaaggagctggatgaggagcacagccaggagctgaaggagtggagggagaagctgcggcccaggaagaagaccctggaggaggagtttgccaggaagctgcaggagcaggaggtgttcttcaagatgactggagagagtgaatgtctgaaccccagcacccagagccgcatcagcaagttctaccccatccccagcctgcacagcacaggcagctag

SEQ ID NO: 181816 - DNA, 3708 bp, Artificial Sequence
  derived and/or modified sequence
atgagcttcttcaacttccggaagatcttcaagctgggcagcgagaaaaagaaaaagcaatacgagcacgtgaaaagggacttgaaccccgaggacttctgggagatcatcggtgaactgggggatggcgccttcgggaaggtctacaaggctcagaataaagaaacctcagtcctggcggctgcgaaagtgatagacactaagagtgaagaagagcttgaggattatatggttgagatagacattttagcctcctgtgaccacccaaatatcgtgaaactgctggacgccttctactatgagaacaatctgtggattctcattgaattctgcgccggcggggctgtggacgcagtaatgctagagctcgagcgtcctctaactgaatcacagatacaggtagtttgcaaacagaccctcgacgctctgaactatttgcatgataacaagataatacacagagatctgaaggccggcaacattcttttcaccctagacggggatatcaagctcgccgatttcggcgtgtccgctaaaaatacacgaaccatccagcgtagagatagcttcataggcacgccatactggatggcaccggaagtggtcatgtgtgaaaccagtaaagaccggccttacgactacaaggccgatgtctggagcttaggaataaccctgatcgagatggccgagattgagcccccccaccatgaactgaaccctatgcgggttctgctgaagatagctaagtcggaaccccccaccttagcccaacctagtcggtggtcctccaacttcaaggattttttgaagaagtgtcttgaaaagaatgtggatgccaggtggacaacctcccagctcttacagcacccattcgtgaccgtagatagcaacaagccaattagagagcttatcgccgaggccaaggctgaagtcaccgaagaagtggaggacggcaaggaagaagatgaggaagaagagacagagaatagtctgcctatccccgcctccaagcgcgcgtcaagtgacctctcaattgcctcctcggaggaggataaactcagtcagaatgcctgtattttagagtccgtttccgagaaaacagagaggagtaactccgaggataaacttaacagcaaaattctgaacgaaaaacccacaacagacgagcctgaaaaagccgtagaagatatcaacgagcatatcactgatgctcagttggaagcgatgactgagctacacgaccgcacagccgtgatcaaggaaaacgaacgggagaaacgccccaagcttgaaaatttaccagacaccgaggaccaggagactgtcgatattaatagtgtcagcgagggcaaggagaataatatcatgatcaccctcgaaactaacatagaacacaatttgaagagtgaggaggaaaaagaccaggaaaagcagcagatgttcgagaacaagctgattaaaagtgaggagattaaggatactattctacaaactgtagatctcgtcagtcaggagacaggggagaaggaggccaatatccaagccgtggattccgaggtgggcctgactaaggaagatacccaagaaaagctgggtgaagacgataagactcagaaagacgtcatcagtaacacctcggacgtgatcggaacctgcgaagctgctgatgtcgcgcagaaagtggatgaagactccgctgaagacacgcagtccaacgacggcaaggaagtcgtcgaagtgggccagaagttaataaataaacccatggtcggaccagaggcagggggaaccaaagaagtccccatcaaagaaatagtcgagatgaacgagattgaggaagggaaaaacaaagaacaggccattaattcctctgagaacatcatggacataaacgaagagcctggaaccaccgaaggagaagagatcaccgaaagttccagtacagaagaaatggaagtgcgttccgttgtggccgacaccgaccagaaagccctgggctcggaagtacaggacgcctcgaaggtgacaacacagattgacaaagagaaaaaagagataccggttagcattaaaaaagaacccgaggttaccgtggtgtctcaacctactgaacctcagcctgtcttgatcccgtcgatcaacatcaattctgatagcggtgaaaacaaagaggaaattgggagtctgtctaagacagagacaatcctgccccccgaatcagaaaaccctaaggagaatgataacgatagtgggactggcagcaccgccgacacctcttctatcgatttgaacctgtcaatttcatcatttttaagtaaaacaaaggactcagggtccattagtctgcaggagaccagacggcaaaaaaaaaccctgaaaaagacgaggaaatttatcgtggatggagttgaggtcagtgtgacgacttcgaagattgtgaccgattctgattccaagaccgaggagttgcgcttcctaaggagacaagagttacgagagcttcgctttcttcaaaaagaggagcagcgcgcacaacagcagctgaacagcaaattgcagcagcagcgcgaacaaatctttcgccgtttcgaacaggaaatgatgtccaagaaacgtcagtatgatcaggaaatagaaaacctggagaaacagcagaagcagacaattgaacgtctggagcaggagcataccaatagactgcgagatgaggccaagcggatcaagggtgagcaggaaaaagagctgagcaaattccagaacatgctaaagaataggaaaaaggaggtcataaacgaggtcgagaaggcccccaaggaattaagaaaagagctaatgaagcgccgcaaggaagagctggcccagtctcagcatgcccaggagcaagagttcgtgcaaaagcagcagcaagaactcgatggatccttgaagaagataatacagcagcaaaaggccgaactggcaaacatagaacgagagtgcctcaacaacaagcaacagctgatgcgggccagggaagcagccatttgggagctcgaagagcgacacctgcaagagaaacatcagttgttgaaacagcagcttaaagaccagtacttcatgcagaggcaccagctgcttaagcgccatgagaaggagacagagcagatgcagcgctataaccagagacttatagaggaactgaaaaatcgccaaactcaggagcgagcacgtcttcccaagatacagcgttctgaagccaaaaccaggatggcgatgttcaaaaaatccctgcgtattaactccactgcaaccccagaccaggatagggacaagatcaagcaattcgctgcccaggaggagaagagacagaaaaacgaacgcatggcccagcatcagaaacacgagaatcagatgagggatctgcaattacagtgcgaggctaacgtcagagagctgcaccaactgcagaacgaaaaatgtcatttactggtcgaacacgagacacagaaactcaaggagctcgacgaagagcattcacaggagttgaaggagtggcgagaaaaattgaggccacgcaagaagaccctcgaagaagaattcgctaggaaactccaggagcaagaggtttttttcaaaatgaccggggagagtgagtgtcttaatccatctacccaatcgcggattagcaagttctatccgatcccctcgcttcattcaacaggtagttag

SEQ ID NO: 181817 - DNA, 3708 bp, Artificial Sequence
  derived and/or modified sequence
atgagcttttttaactttcgcaaaatcttcaaactggggtctgagaaaaagaagaagcagtacgagcatgtgaaacgggacctcaatcctgaggatttctgggagatcatcggcgaactgggcgatggagcgtttggcaaggtatacaaggcccagaacaaggaaacaagcgtgctcgccgcagccaaagtgatcgataccaaaagcgaggaggaactcgaggattatatggttgagatagatatcctagcctcctgcgaccacccaaacatcgtgaagctgctggatgctttctactacgaaaataacctctggatattaatcgagttctgcgccggaggcgctgttgacgctgtgatgctggagctcgaaaggcccctcacggagagtcagatccaagtggtgtgcaagcagacccttgacgctcttaattatctgcatgataacaaaatcattcatcgcgacctgaaggccggaaacattctctttaccctggacggcgatatcaaactggccgactttggggtgtccgctaaaaatacccggaccattcagcgcagggacagttttatagggaccccgtattggatggctcccgaggttgtgatgtgcgaaacatcaaaagaccgcccttacgactacaaggccgatgtgtggtctctgggaattacactcatcgaaatggccgaaattgagccgccacatcatgaacttaatcctatgcgcgttctactcaagatcgccaagagcgaaccccctacccttgcacagcccagccgctggagctccaatttcaaggactttctcaaaaaatgtctcgaaaagaacgtggacgctcgctggaccacgtctcagctgctccaacacccctttgtaacagtggactccaataagcctattagagagttaattgccgaggctaaggctgaggtcaccgaggaagtggaggatggcaaggaggaggacgaggaggaggagaccgaaaattcactgccaatccctgcttctaaaagagcctcttccgatctgtctatcgcctccagcgaagaagataagttgtcccagaacgcctgtatcctggagtcggtgtctgagaaaactgagcggagtaattctgaggataaacttaatagcaagattctcaatgaaaaacccacgacagatgagcccgaaaaagcagtcgaggacattaatgaacacattactgatgctcagctcgaggctatgacagagctgcacgacagaaccgcagtgatcaaagaaaatgaaagggagaaacgcccaaaattggaaaatttgccggacacggaggaccaggagaccgtagacatcaacagtgtcagcgagggcaaggaaaacaacattatgatcactttggaaaccaatatcgaacataacctcaagtctgaggaggagaaggaccaggagaaacagcagatgttcgaaaataagctcatcaagtccgaggagattaaagacaccatcctacagactgtcgaccttgtgtctcaggagacaggcgaaaaggaagctaacatccaagccgtcgactctgaggtcgggcttacaaaagaggacacacaggaaaagctcggtgaggacgataagacccagaaggatgtgataagtaacacctctgacgtgattggaacttgcgaagcagcagacgttgctcagaaggtagatgaagacagcgccgaagacacccagagcaacgatggcaaggaggtagtggaggtcggccaaaagctgatcaacaagccaatggtgggccctgaggcagggggaactaaagaggttcctattaaggagattgttgaaatgaacgagatcgaggagggtaagaataaagagcaggcaatcaattcgtccgaaaacatcatggatatcaacgaggaacccggtacaactgagggcgaagaaatcacggagagttcatctaccgaggaaatggaggttagatcggtggtggccgacactgatcagaaagccctgggttccgaggtgcaagatgcctctaaagttacaactcagatcgacaaggaaaaaaaagagatccccgtctcgataaagaaggaacccgaggtcacagtggtttcccagccaaccgaaccacagcccgtgcttattcccagcattaacataaacagtgattcaggcgagaacaaggaggagattggaagcctgtccaaaaccgagactattctgccacccgaatctgagaaccccaaggagaacgataacgactcagggactggatctaccgctgacacatccagtattgatctaaatctcagcatttccagcttcctatcaaagaccaaagacagcgggtctatttccctgcaagagacccgaaggcagaaaaagaccctcaagaaaacacggaaattcattgttgacggagtcgaggtgagcgttaccacatccaagatcgttaccgatagtgactcaaaaaccgaggagctcagattcctccgtaggcaggaattgcgcgaactccggtttttgcagaaagaggagcaaagggcccagcagcagctaaactcaaagctgcagcagcagcgcgaacagattttccggcgtttcgagcaggagatgatgagtaaaaaacgccagtacgaccaggaaatcgaaaacctcgaaaagcagcaaaagcaaactatcgaaagattggaacaggaacacactaatcgcctccgggacgaggctaagagaatcaagggcgaacaggaaaaggagctgagcaaattccaaaatatgctgaaaaaccgtaaaaaggaggtgattaatgaagtggaaaaggcccctaaagaacttcgcaaggagcttatgaaaaggaggaaggaggagctggcacagagccagcacgcccaggaacaggagtttgttcaaaagcagcagcaggagcttgacggtagcctgaagaaaatcatccagcagcagaaggcggagctggcgaatatcgaacgtgaatgtttgaataacaagcagcagctcatgcgagcccgtgaagctgctatttgggaactcgaagaacgacacttgcaggaaaagcaccagttgctcaaacaacagttgaaagaccagtacttcatgcagagacaccaactattgaagaggcatgagaaggaaacagagcagatgcaaaggtacaaccaacgtctgattgaggagcttaagaacaggcagacacaggagagagcccgtctgcctaaaatccagaggtcggaagcaaagactagaatggccatgtttaaaaagtcactacgcatcaatagcactgccacgcctgatcaggatcgggataagatcaaacagtttgccgctcaggaagaaaaaagacagaagaatgagagaatggcgcagcatcaaaagcatgagaaccagatgagggatctgcagttacagtgtgaggccaacgttcgagagctgcatcaactgcagaatgagaaatgccatctgctcgttgagcacgagacacagaagctgaaagaactggatgaagagcactctcaggagctcaaagagtggcgtgaaaagcttcgtcctcggaaaaaaacgctggaagaggaatttgctaggaagctgcaagagcaggaagttttctttaagatgaccggcgagtctgagtgcctcaatccatcaacacagtcacgcattagtaaattttaccccattcctagcctgcattccacagggtcctag

SEQ ID NO: 181818 - DNA, 7766 bp, Artificial Sequence
  derived and/or modified sequence
gcggcggcggcgccccagacccgaggggacgcgcgggccttgcgccgcgggagcggacggcggcggaggagaccctaggctcgcggcccgaggcgggagggctcggcttctcgactgcccgcctccgaggccgccggccgcttctctctcccagagtggccgccgcccctggagactcgccgtgacacgggcctaagccgccgccgcgggagtcctgaccgctcggacccgtcggatcaggccgggtgggagcgagcttgcgggcaggtgccgctcccggagggtgggccggaggcgaggcgcccaccgcgcggctcgcgggccgggctcggcggaggggccgctcgcgcagcacccccaccgcgggccggagcccgggtcgccgccccgccttctcccgggaccgcccggccggagctgcgggggccgagggacgccgcgcccgccgccgccagccgggctcgcgcgggagagcagggaagagaaactttgccttttattgtttttagtccttaagtgcaaggaactctgtgttgggaggaaaaatgtccttcttcaatttccgtaagatcttcaagttggggagcgagaagaagaagaagcagtacgaacacgtgaagagggacctgaaccccgaagacttttgggagattataggagaactgggcgacggagcctttgggaaagtgtacaaggcccagaataaagagaccagtgttttagctgctgcaaaagtgattgacactaaatctgaagaagaacttgaagattacatggtagagattgacatattagcatcttgtgatcacccaaatatagtcaagcttctagatgccttctattatgagaacaatctttggatcctcattgaattttgtgcaggtggagcagtagatgctgtgatgcttgaacttgagagaccattaactgagtcccaaatacaagtagtttgcaagcagactttagatgcattgaactacttacatgataataagatcatccacagagatctgaaggctggcaacattctctttaccttagatggagatatcaaattggcggattttggagtatcagctaaaaacacgaggacaattcaaagaagagattcctttattggtacaccatattggatggctcctgaagtagtcatgtgtgaaacatctaaggacagaccctatgactacaaagctgatgtttggtccctgggtatcactttaatagaaatggctgagatagaaccacctcatcatgaattaaatccaatgcgagtgctgctaaaaatagcaaaatctgagccacctacattagcacagccatccagatggtcttcaaattttaaggactttctaaagaaatgcttagaaaagaatgtggatgccaggtggactacatctcagctgctgcagcatccctttgttactgttgattccaacaaacccatccgagaattgattgcagaggcgaaggctgaagtaacagaagaagttgaagatggcaaagaggaagatgaagaggaggaaacagaaaattctctgccaatacctgcaagtaagcgtgcatcttctgaccttagtatcgccagctctgaagaagataaactttcacaaaatgcttgtattttggagtctgtctcagaaaaaacagaacgtagtaactctgaagataaactcaacagcaaaattcttaatgaaaaacccaccactgatgaacctgaaaaggctgtggaggatattaatgaacatattaccgatgctcagttagaagcaatgactgaactccatgacagaacagcagtaatcaaggagaatgaaagagagaagaggcccaagcttgaaaatctgcctgacacagaagaccaagaaactgtggacattaattcagtcagtgaaggaaaagagaataatataatgataaccttagaaacaaatattgaacataatctaaaatctgaggaagaaaaggatcaggaaaagcaacagatgtttgaaaataagcttataaaatctgaagaaattaaagatactattttgcaaacagtagatttagtttctcaagagactggagaaaaagaggcaaatattcaggcagttgatagtgaagttgggcttacaaaggaagacacccaagagaaattgggggaagacgacaaaactcaaaaagatgtgatcagcaatacaagtgatgtgataggaacatgtgaggcagcagatgtggctcagaaagtggatgaagacagtgctgaggatacgcagagtaatgatgggaaagaagtggtcgaagtaggccagaaattaattaataagcccatggtgggtcctgaggctggtggtactaaggaagttcctattaaagaaatagttgaaatgaatgaaatagaagaaggtaaaaataaggaacaagcaataaacagttcagagaacataatggacatcaatgaggaaccaggaacaactgaaggtgaagaaatcactgagtcaagtagcactgaagaaatggaggtcagaagtgtggtggctgatactgaccaaaaggctttaggaagtgaagttcaggatgcttctaaagtcactactcagatagataaagagaaaaaagaaattccagtgtcaattaaaaaagagcctgaagttactgtagtttcacagcccactgaacctcagcctgttctaatacccagtattaatatcaactctgacagtggagaaaataaagaagaaataggttctttatcaaaaactgaaactattctgccaccagaatctgagaatccaaaggaaaatgataatgattcaggcactggttccactgctgatactagcagtattgacttgaatttatccatctctagctttctaagtaaaactaaagacagtggatcgatatctttacaagaaacaagaagacaaaagaaaacattgaagaaaacacgcaaatttattgttgatggtgtagaagtgagtgtaacaacatcaaagatagttacagatagtgattccaaaactgaagaattgcggtttcttagacgtcaggaacttcgggaattaagatttcttcagaaagaagagcaaagagcccaacaacagctcaatagcaaactacagcaacaacgagaacaaattttccggcgctttgagcaggaaatgatgagtaaaaagcgacaatatgaccaggaaattgagaatctagaaaaacagcagaaacagactatcgaacgcctggaacaagagcacacaaatcgcttgcgagatgaagccaaacgcatcaaaggagaacaagagaaagagttgtccaaatttcagaatatgctgaagaaccgaaagaaggaggttataaatgaagtggagaaagcacccaaagagctgagaaaagagctcatgaaacgcaggaaagaggagcttgcacaaagccagcatgctcaggaacaagagtttgttcagaaacaacagcaagaattagatggctctctgaaaaagatcatccagcagcagaaggcagagttagctaatattgagagagagtgcctgaataacaagcaacagctcatgagagctcgagaagctgcaatttgggagctcgaagaacgacacttacaagaaaaacaccagctgctcaaacagcagcttaaagatcagtatttcatgcaaagacatcagctacttaagcgccacgagaaggaaacagagcaaatgcagcgttacaatcaaagacttattgaggaattgaaaaacagacagactcaagaaagagcaagactgcccaagattcagcgcagtgaagccaagactcgaatggccatgtttaagaagagtttgagaattaactcaacagccacaccagatcaggaccgtgataaaattaaacagtttgctgcacaagaagaaaagaggcagaaaaatgagagaatggctcagcatcagaaacatgagaatcaaatgcgagatcttcagttgcagtgtgaagccaatgtccgcgaactgcatcagctgcagaatgaaaaatgccacttgttggttgagcatgagactcagaaactgaaggagttagatgaggaacatagccaagaattaaaggagtggagagagaaattgagacctaggaaaaagacactggaagaagagtttgccaggaaactacaggaacaggaagtattctttaaaatgactggggagtctgaatgccttaacccatcaacacagagccggatttccaaattttatcctattcccagcttgcattccaccggatcataacaaagggaagcattctgtgcgtgggtttggctctttcagtatgtcattctgttctcatcttctgccacagtctctcagatagctcatgaagacaatcacctgcctcaccttctaggtgttttccttttttgttttttttgttttgttttgtttttaagcaaagatgaagggaaaacgaactaagacagacgctaggccatgttggcaaagtagcatcttggtgactaaggtgactttgtatattcatcttaaaaattatgttctttagacactgctacctgaaaactgttggagaaataatgtttaaagttatttaagaaaaactgttacatcactaagtattaataaattcttcttacctgacgtaacttctcaatgcctaaattctgtagttgaagctctgctgcagagagttgggataattttcttttggtggatcagctctcataaaaaagctatgatttgctcaaatatgctgttgactcagtaaatgaatatatttttttctttaaataggaacaacctcttttaaaagagaaaaattatttcagtgatttgtcaaaacgaattacctcttttggcatgagctaataattgagggtgctaattttcttaagatagtgcctaaaacactaaatttcagtcaagtcgtaagtaggattttctttttgatcaacagggacaaaaacatctttagaattaaaaacatggttgttttggaatttttgcttctcttaccgtttgatagaaattttcatcctaaaatacatgtacaaagtttggaaagatgaaaaaaagaggtagcttttagattgcaaactggaaatgtaaaactcatgaaatttaagcaatataggtttagctatctgtgtttattttctaaaataatacctgagctggttaaatgatttctctccatcttagctaattctgtttaaaactctgtcagaggcctgcaggctgtgagttatatttataaatatatcttcagaaattaatcttaaaagaggcattagttcagaatacttttttaaaagtttaaattaaatatttaggcacgtcaggaattacttttccttattttgaaatgaggctacttatgtcttggttttattttgttccatgtttaaatcattcactttgatttgagtgggaaaagcctgaagcctttatcatgtggttgctggtgtgtgtaattattaatgaaatgttcactcctagtcccttatgaggcttagaatttcaaccacgtgtcaggtcagacagtattataaactgtactttgctgtctgagacagcacatttgtgaatgatgcttgctgcctgccattttcaacctattctctcttaagagtgctaggtaccaaattgtgaaagtttgttttcagttatattacttttgaggctggtgaaaaatttaaatgtaactttgtgggaacactgattcatatttagaaaatgtaaatgtctgtagcactttcttgcagttaatttgaaaactttggatgctgaaccttgtttgtcagtgatttagatgatttaaaaatgcatgtgtgatttgaattttataattgttttgacaagcataatttacttggacaacttcgtaggtagccttaacttctggccaagtttgttttttatataaatatatatacatatatacatattatgtatggttgtaaattcatacacttatcacatgaatgtgttactgtatacaaaactcttaatgctttattctcaaatgctgggttgaaaaatgttttgaaagccttttaaaatatatatctttataaagtaatattcaggatgatgataaaaattgtttatattgttatgataaaaatgacagtataatgttgcccagtgtatttaatgatttatttgaagagggattgggaaggaacgtcttcataccactttctcctttgaaattttcagtttattgacttttaaaaaatgaatacctcaggcagtagacattttttttctagtatcatttaattgataccctgtgcgctaaatagtgtgtggtgcctgattaatttggtctgaatatttgattctttctgttcctttcaacttgacattcagattattgactcaaggagagaggctcagagtggaatggttggcgctgtgggtaaggttggatctcccttaaaactgccttttggattcagtgtttgtgcttgagttcgctttcaaatatgaccataatcgtgtgggtgcaagactgtacagtgatacatatgtagaggtaaagcattcattttaatacttaaagttatataaatcttttcaaaaagtgttttgttataaaatacgctgtttgtacccataccagcccacctcttctgaggccctgtattcaaatagatgatagtgatctatctttcctgcatgaagtgtaggtggcgagtgggcgaggggcgcagacttctttgaaatcgaagggtacagtcaaatctactgctgatttggttgttttgttgctgtggcagaatatgccatgaaacacatacagacttctccgaacgtgcaccctcatcagccacctcctcccctctttccctgagtgctgtgaacacagcagacctgcacacttctgcagatccagctcctacagcttggggcactaggctgcctttcctagtcctgtcaacaaccatacagtgcgaattgctgaattagctgctattctatgtggagtcacattaagctttttcttatctttttctatggggaagctatagggtgggtaaggaaaaaatgttgaatgcttttactttgctgaaaatattagaactctcttgtgacaggatacagcaaattataattaaatataaattaccagaaccagagctacctctaagtcatacttcctcaagcacaaagctctcaggcatatgagacccaccttaatgaagggtctctgatttcttgagcatcagcgagtttcagaagtgactatttttttgtactcttctagtttccttgtaactatacactttttcccattccacactgtgcttaaatgacaaagactcttctgagaagccaaattctgtccaagtattaactagagatattgttgattaaagaaaatctagaactgaagtgaaagaagagagttccagttctaatagtcttttgattaacaattcttttctgagaaatgatttttataagaaatggggtgattctttaaatgcttttcttaagttgaaggcacaacagttaatggctgtattgttgctattccgttgctgacatgtttttgataaagctttaacattcctgctactaattttggcggagagtgtttgccaggtttcaatgtgggctgcagctttttgtgctccttctctggtttgcagtgtaatgagttcataagctaaattttcagaaagaattttgtttaagattatgcctcttatctacttgagagcaacatgtcttttcaatcatgggattgacacatgaaaaataaagttatttcttaatcaa

SEQ ID NO: 181819 - protein, 634 aa, Artificial Sequence
  derived and/or modified sequence
MDNAVDGLDKASIANSDGPTAGSQTPPFKRKGKLSTIGKIFKPWKWRKKKTSDKFRETSAVLERKISTRQSREELIRRGVLKELPDQDGDVTVNFENSNGHMIPIGEESTREENVVKSEEGNGSVSEKTPPLEEQAEDKKENTENHSETPAAPALPPSAPPKPRPKPKPKKSPVPPKGATAGASHKGDEVPPIKKNTKAPGKQAPVPPPKPASRNTTREAAGSSHSKKTTGSKASASPSTSSTSSRPKASKETVSSKAGTVGTTKGKRKTDKQPITSHLSSDTTTSGTSDLKGEPAETRVESFKLEQTVPGAEEQNTGKFKSMVPPPPVAPAPSPLAPPLPLEDQCITASDTPVVLVSVGADLPVSALDPSQLLWAEEPTNRTTLYSGTGLSVNRENAKCFTTKEELGKTVPQLLTPGLMGESSESFSASEDEGHREYQANDSDSDGPILYTDDEDEDEDEDGSGESALASKIRRRDTLAIKLGNRPSKKELEDKNILQRTSEEERQEIRQQIGTKLVRRLSQRPTTEELEQRNILKQKNEEEEQEAKMELKRRLSRKLSLRPTVAELQARRILRFNEYVEVTDSPDYDRRADKPWARLTPADKAAIRKELNEFKSTEMEVHEESRQFTRFHRP

SEQ ID NO: 181820 - DNA, 1905 bp, Artificial Sequence
  derived and/or modified sequence
atggacaacgccgtggacggcctggacaaggccagcatcgccaacagcgacggccccaccgccggcagccagaccccccccttcaagagaaagggcaagctgagcaccatcggcaagatcttcaagccctggaagtggagaaagaagaagaccagcgacaagttcagagagaccagcgccgtgctggagagaaagatcagcaccagacagagcagagaggagctgatcagaagaggcgtgctgaaggagctgcccgaccaggacggcgacgtgaccgtgaacttcgagaacagcaacggccacatgatccccatcggcgaggagagcaccagagaggagaacgtggtgaagagcgaggagggcaacggcagcgtgagcgagaagaccccccccctggaggagcaggccgaggacaagaaggagaacaccgagaaccacagcgagacccccgccgcccccgccctgccccccagcgccccccccaagcccagacccaagcccaagcccaagaagagccccgtgccccccaagggcgccaccgccggcgccagccacaagggcgacgaggtgccccccatcaagaagaacaccaaggcccccggcaagcaggcccccgtgcccccccccaagcccgccagcagaaacaccaccagagaggccgccggcagcagccacagcaagaagaccaccggcagcaaggccagcgccagccccagcaccagcagcaccagcagcagacccaaggccagcaaggagaccgtgagcagcaaggccggcaccgtgggcaccaccaagggcaagagaaagaccgacaagcagcccatcaccagccacctgagcagcgacaccaccaccagcggcaccagcgacctgaagggcgagcccgccgagaccagagtggagagcttcaagctggagcagaccgtgcccggcgccgaggagcagaacaccggcaagttcaagagcatggtgccccccccccccgtggcccccgcccccagccccctggccccccccctgcccctggaggaccagtgcatcaccgccagcgacacccccgtggtgctggtgagcgtgggcgccgacctgcccgtgagcgccctggaccccagccagctgctgtgggccgaggagcccaccaacagaaccaccctgtacagcggcaccggcctgagcgtgaacagagagaacgccaagtgcttcaccaccaaggaggagctgggcaagaccgtgccccagctgctgacccccggcctgatgggcgagagcagcgagagcttcagcgccagcgaggacgagggccacagagagtaccaggccaacgacagcgacagcgacggccccatcctgtacaccgacgacgaggacgaggacgaggacgaggacggcagcggcgagagcgccctggccagcaagatcagaagaagagacaccctggccatcaagctgggcaacagacccagcaagaaggagctggaggacaagaacatcctgcagagaaccagcgaggaggagagacaggagatcagacagcagatcggcaccaagctggtgagaagactgagccagagacccaccaccgaggagctggagcagagaaacatcctgaagcagaagaacgaggaggaggagcaggaggccaagatggagctgaagagaagactgagcagaaagctgagcctgagacccaccgtggccgagctgcaggccagaagaatcctgagattcaacgagtacgtggaggtgaccgacagccccgactacgacagaagagccgacaagccctgggccagactgacccccgccgacaaggccgccatcagaaaggagctgaacgagttcaagagcaccgagatggaggtgcacgaggagagcagacagttcaccagattccacagaccctag

SEQ ID NO: 181821 - DNA, 1905 bp, Artificial Sequence
  derived and/or modified sequence
atggacaatgccgtcgatggcttagacaaggccagcatagcaaactccgacggacctacggccggatcccagacccccccctttaagagaaagggaaagctcagtacaattggaaaaatcttcaaaccatggaaatggaggaagaagaagacttcagacaaattccgagagacgagcgcagtgctagaacgcaaaatcagtacgcgtcagagcagagaagagctaatccgcaggggagttctgaaggagttacccgaccaggatggtgacgttactgttaatttcgaaaattcaaatggccacatgattccaatcggtgaagagtcgacccgcgaagaaaatgtggtgaagtctgaggaaggaaacggctctgttagcgaaaaaacgccacctctggaggagcaagcagaagataaaaaggaaaacacagagaatcactctgagacccccgctgcacctgccctgcccccttccgccccacctaaacctcggcctaaacctaaaccaaagaaatccccggtcccacccaagggagctaccgctggggcatctcataaaggggacgaagtaccacccataaagaagaacactaaagccccaggaaaacaggcccctgtgccacccccaaaaccagcttcccggaacactactcgtgaagccgcaggaagttcccactctaaaaagacaacggggtcaaaagcctccgccagcccttctaccagcagcacctcctcgcggcctaaggcctcaaaggagactgtatcatctaaagcgggcaccgtgggcacaactaagggaaagcgaaagactgataaacagcctattacttcccatctctcaagcgacactacgacatctggcacctccgatcttaagggagaacccgccgaaactcgggtggaatcattcaagttggagcagactgtacctggagccgaagagcagaataccggcaaattcaagtcaatggtgcctccccctccggtagcaccagccccctcacctctcgcacctcctctcccactggaggatcagtgcatcacagcatcagacactcctgtggttctggtctcagtcggcgccgatctgccggtgagtgccctcgacccatcccaattgctttgggccgaggagccgaccaaccgcacaacactctatagtggcaccggcttgtcagtaaacagggagaacgcaaagtgttttactacaaaggaagaacttggcaagaccgtgccacagctgctgacacccgggttaatgggcgagtcaagcgagtcattctccgcctctgaagatgagggccatcgggaatatcaagcgaatgattcagattcggatgggccaatcctgtatacggatgatgaagatgaagacgaggacgaagacgggagcggagagtcagccctggcgagcaagatcaggcgtcgcgatacgctagccattaaactgggtaacaggccctctaaaaaagaattagaagataaaaacatactacagcgtaccagcgaggaggagagacaggaaatcagacagcagattggtacaaaacttgtgcgccgcctgagtcaacgcccaactacagaggaactcgagcagcggaacatactaaagcaaaaaaacgaagaggaggagcaggaggccaagatggaactgaagcgtaggctgagtcggaaactgagtctaagacccacagtagcggaactgcaggcccgcagaattttgcgattcaatgagtacgtagaggtgaccgattctcccgattacgacaggcgagccgataaaccatgggcccggttgaccccggcagacaaggccgctatccgaaaagagctgaacgaattcaagagcaccgagatggaagttcacgaagaatcaaggcaatttacccgtttccacagaccctag

SEQ ID NO: 181822 - DNA, 1905 bp, Artificial Sequence
  derived and/or modified sequence
atggacaatgctgtggatggcctggacaaggccagcatcgccaacagtgatggccccacagctggcagccagaccccacccttcaagaggaagggcaagctgagcaccatcggcaagatcttcaagccctggaagtggaggaagaagaagaccagtgacaagttccgggagaccagcgctgtgctggagaggaagatcagcacccggcagagccgggaggagctgatcagaagaggagtgctgaaggagctgcctgaccaggatggagatgtgacagtgaactttgagaacagcaatggccacatgatccccatcggggaggagagcacccgggaggagaatgtggtgaagtctgaggagggcaatggatctgtgtctgagaagaccccacccctggaggagcaggccgaggacaagaaggaaaatacagagaaccacagcgagaccccagctgccccagccctgccccccagcgccccacccaagccccggcccaagcccaagcccaagaagagccctgtgccccccaagggggccacagctggggccagccacaagggagatgaggtgccccccatcaagaagaacaccaaggcccctgggaagcaggcccctgtgcccccacccaagccagccagcaggaacaccacccgggaggccgccggcagcagccacagcaagaagaccaccggcagcaaggccagcgccagccccagcaccagcagcaccagcagccggcccaaggccagcaaggagaccgtgagcagcaaggccggcaccgtgggcaccaccaagggcaagaggaagacagacaagcagcccatcaccagccacctgagcagtgacaccaccaccagcggcaccagtgacctgaagggggagcctgctgagaccagggtggagagcttcaagctggagcagacagtgcctggagctgaggagcagaacacaggcaagttcaagtccatggtgcccccacctcctgtggccccagcccccagccccctggccccacccctgcccctggaggaccagtgcatcacagccagtgacacccctgtggtgctggtgtctgtgggcgctgacctgcctgtgtctgccctggaccccagccagctgctgtgggccgaggagcccaccaacagaaccaccctgtacagcggcaccggcctgtctgtgaaccgggagaatgccaagtgcttcaccaccaaggaggagctgggcaagacagtgccccagctgctgaccccaggcctgatgggagagagcagcgagagcttcagcgcctctgaagatgagggccaccgggagtaccaggccaatgacagcgacagtgatggccccatcctgtacacagatgatgaagatgaagatgaagatgaagatggcagcggggagagcgccctggccagcaagatcagaagaagagacaccctggccatcaagctgggcaaccggcccagcaagaaggagctggaggacaagaacatcctgcagaggaccagcgaggaggagcggcaggagatccggcagcagatcggcaccaagctggtgcggcggctgagccagaggcccaccacagaggagctggagcagaggaacatcctgaagcagaagaatgaggaggaggagcaggaggccaagatggagctgaagaggcggctgagcaggaagctgagcctgcggcccaccgtggccgagctgcaggcccggcgcatcctgcgcttcaatgaatatgtggaggtgacagacagcccagactatgaccggcgggctgacaagccctgggcccggctgaccccagctgacaaggccgccatcaggaaggagctgaatgagttcaagagcacagagatggaggtgcatgaggagagccggcagttcacccgcttccaccggccctag

SEQ ID NO: 181823 - DNA, 1905 bp, Artificial Sequence
  derived and/or modified sequence
atggacaacgccgtggacggcctggacaaggccagcatcgccaacagcgatggtcccaccgcaggctcgcagaccccaccatttaaacgaaaagggaagcttagcactattggaaagatatttaagccatggaagtggcggaagaaaaaaacgtcagacaaattccgcgaaaccagcgccgtgttagaaagaaagataagcacccgtcaaagccgcgaagaactcatacggcggggagtgttaaaagagctccccgatcaagacggtgatgttaccgtgaattttgagaacagtaacgggcacatgatacccatcggtgaggaaagcactcgagaagaaaacgtagtaaaatcggaggaagggaatggttccgtctctgaaaaaactcctcccctggaggaacaagcagaagacaagaaagaaaacaccgaaaaccattcggagacccctgccgcgcccgccttgccaccttccgcaccaccaaagccaagacctaaaccaaaaccgaagaagagccccgttcctcccaaaggagcgacagcaggcgccagtcataaaggagacgaagtcccaccaatcaaaaaaaatacgaaggctcctgggaaacaggcccccgttcctccgccaaagcctgcatctaggaacactacacgggaagcagccggtagctcccacagcaaaaaaacgacaggatcgaaggcttcagcgagtccatcaactagttccacttcctcgagaccaaaggcctcaaaggagaccgtttccagcaaagcgggaacggtggggacaacgaagggcaagagaaaaactgataaacagcccatcacgtcccacctgtccagcgatacaactacctccggcacgagtgacctgaaaggcgagcccgctgagactagagtggagtcatttaagcttgaacagaccgttccaggggcggaggagcaaaacacaggtaagtttaagtctatggtccctccaccccccgtggcccctgctccatctcctttggcaccccccctgcctctggaagatcaatgtattaccgcctccgatactcccgtggtgcttgtaagcgtgggcgccgacctgcctgtttccgcactagatccctcgcaactattgtgggcggaagagccaaccaataggaccacactttactctggcacaggcttgagtgtgaatcgcgagaacgctaagtgtttcacaaccaaggaagaattaggaaagactgtaccgcaactcctcacccccggtctgatgggcgagagctcagagagcttcagcgcaagcgaagatgaggggcacagggagtaccaagctaacgactcagactctgacgggccaatcttgtacaccgatgatgaagacgaggacgaggacgaagacgggagtggagagagtgcgctggccagcaaaattcgccggagagacactcttgcaatcaaattagggaatcgcccgagtaagaaggagttggaagacaagaatattctccagcggacgtctgaggaagagcgacaggaaattcggcagcagattgggactaagcttgtgaggaggttgtcacagcggcccacaactgaggaacttgaacagagaaatattcttaagcagaagaacgaggaagaggagcaagaggctaaaatggagctgaagaggcggctgtccaggaaactcagtttaagaccaacagtggccgagttgcaggccagaagaattctgagattcaacgaatatgtagaagtgacagattctcctgactacgacaggcgggccgataaaccctgggctagactgaccccggccgacaaagctgcgattaggaaagaacttaacgagttcaagagcaccgaaatggaggtgcacgaggaatctcgtcaattcacgcgcttccaccgaccatag

SEQ ID NO: 181824 - DNA, 9531 bp, Artificial Sequence
  derived and/or modified sequence
agtgcatgaagtatgctcagtgtgccagcaagggctgataatcagcagaaggacagggtgcttcgttagtcagaagagccagggcttcccggctgccaggctacagaactcgcctcgccactcctgagacatggacaacgccgttgacggactggacaaagcttctatagcaaactcagatggccccacagcaggttcccaaacacctcccttcaaaagaaaggggaaactatccaccattggtaaaatctttaagccttggaaatggaggaaaaagaagaccagcgacaaatttagagaaacctcggcagtattagaaaggaagatatccacacgacaaagtagagaggagctgataagaaggggagtgcttaaggaattgcctgatcaagatggagatgtaacagttaactttgaaaattcaaacgggcacatgatacccatcggagaggaatctacccgagaggaaaatgtagtaaagtctgaagaaggtaatggctctgtatctgaaaaaacaccacctctggaggaacaggcagaagataagaaagagaacactgaaaaccactctgaaacaccggcagctcctgctctacctccttctgctcctcctaagcctagacccaaacctaaacccaaaaaatcacctgtgcctccgaaaggggccactgctggggccagccacaaaggtgatgaagtgcctcccattaaaaaaaataccaaggctcctggtaagcaggcccccgtccctccacccaagccagcaagccgaaacacgacccgagaggctgctggctcctctcattcaaaaaaaacaactggctctaaagcatcagcttcgccatccacttcatccacctcatctcgtcccaaagcttcaaaggagacagtttctagcaaagcagggacagtggggaccaccaagggcaagagaaaaactgacaagcagccaataacttctcacctgtcctcagacacaacaacttctggcacatccgacctgaaaggagagcctgcagagaccagagtggagagtttcaaactcgaacagactgtccctggagctgaggagcagaacacaggcaaattcaagtccatggtccctccaccccctgtggctccagcaccttctcctctggccccccctctccctcttgaggatcagtgcattactgcctcagacactccagttgtcctcgtcagcgttggagctgacctgcccgtctctgccttagacccaagtcagcttctttgggctgaagagccgacgaacagaaccactctctactcaggcactggcttaagtgttaacagagaaaatgcaaaatgtttcacaaccaaagaggagctggggaagacagtgcctcagctactgactcctgggctgatgggcgaatcttcagaatcctttagtgcctcagaagatgaaggccacagggaataccaagccaatgactctgactcggacgggcctatcttgtacaccgatgatgaggacgaagacgaagatgaggatggcagtggagaaagtgctttggcaagtaaaatacgccggagggatactcttgctatcaaacttggcaacagaccatctaagaaagaactagaggacaaaaacatcttgcagcgtacatctgaagaagagaggcaggaaatccgacaacaaattggaaccaagttagtcaggaggctgagccagaggcccacaactgaagaattagagcaaagaaacatcctaaaacaaaagaatgaagaagaggaacaagaagcaaaaatggaacttaaacgcagactcagcagaaagctcagcctgagacccacagtggcagagctacaagctcgaaggatcctgcgatttaacgagtatgtagaagtcacggattctcctgactatgaccgccgagcagacaagccctgggccaggttaacacctgcagacaaggcagcaataaggaaagaactaaatgaatttaaaagcacagaaatggaagttcatgaagagagtcgacagtttacaaggtttcatcgtccataacgaagagtgagactatttggaaacagagactgatcatctttgggggaagccctgcttcctgaaaacctgatattgcactgggatttgaatgtgtgtgtttccgtttaacttgtggtgaaggaagtgtgtgactcagcttggctgggaagtgctcctcacctgtgtggcccagatggctccaacaagcaaaaggaaggatgcagtgactcttgctgcccagaatgcacagcgatggtaagagacaccgtggatattcttcatcagaagctttaatcaaagaagatgagcagaagacaatcactggctccctgttaccagaaagccaaattttataatgcgggtgaaagaaaaatatagattaaaattgctgggcactgaaaaggggtgggagttggaaatcagaaagaaagagaaatatttcattatgttaatgaagaaaagagaaaattgaagcataaatgtatttttgaagtagttattcggtagctgagaacttattaagggatttaggaatttaacctcctgatgtggattcctcaaagacttgatcggagaatactcttgtttcaccattatgttggtacagtatagtaccattattttatgttgtgccagtgaatccagttgccagaaataagtctgaatgttttcatgcatctttttcttaaatgcaagagcttctactgactcttaacaagcatgcttacccaaattttgttgcatgcttttaagtagcattagctatgcacacttgacatttttaaatatccctttcctagtgtaccagccttcacaggataagaggactgggaataaagtcagatgtaatgtgaccctagaaaactgtagcaagcttcagaaataaatcttttgatctttccctatcttgattagatccaaagtcaaagcaaccatacttcacctagagaagacagtattggcaatcatgacacctgtaataaaaacttgaatccaaagtcaaaacttaagcaagatacaaatgtgctgcctgcagttagtcctgcatgggaataaggactagttatttttttagtgctgcatttttttaaagttggattgctgctatttaaaaaaaaaaaaaggacacagatcaaaaaaacacccaaaggcttaacagaacatggaaagttcccactaagttgtgtgtgaggaaatcctcatcttgtattttaagaatctgcagatggcatccatagatacagtacagtatttactgtcaatgcaaaagaatcagtgaggttaaagtagtggaagttttccctatgagcctacagtctgtattgtttacattaagaaactctctattattgtgttgctattttccatggagtcacaggcacactatgacttctgctcccaaatacatatgaccatatgtaaataccaccttgcatttcattgttcttcacaagtgctttgtgcccctttaattaaaaacacatgaaatgaataacaaaacaagacccaaatagagtttattttattctcagagtttggactacaattttctaagatgtttctggttcaagactgtcattttctatttcaaccgaaaagtaagcatttaacccggtgaataaatgtagatcctgccattcattggtattttaaagaaccacttgaaatcggatcattttatttaaaaataaaaaatgttaatgccagttggcctactataaaaagccaggaccatgttagaattaggaaaagtaaccagcattactgcacctcttgttagactctgtgcattaataaaacacacctagagtctgttgtcatttcactaataggataagacaaattttttgctttgaaaaaatttttctgcatgcccaggtgtctgtctctggctgaggttttgtctattttacagtgtttcaatccagccataaaaattaacttgtgattttttttttcccaaagtcatgcttttccttaattatatttttattttattattttagtgtcttgagaaaaataccaagagatataatgtttcttttaattgtctatgcttaatcatctttaaacactttttaaatttctaaccacaagacctctctataatggtaaatgtaagacatcaccattttatcactcaaagtatgttattgaaagtttctatttggttgataaaaggaacaattttttcccacttttgatgcctgtgatgcaattttttattgcctacaatgagatacacttagtacaaaaaatgaaaatctggtatttcaaaattgcatttcttgtataataggtcagatttattaactactcatactttttctttacactaatcgatacatttagaaaaaattttctaagttagagacaagtttaaaagtaaaaaaaaaaaaaaattagccactgctagtctactgtttaggtaatcggaatcaccaattattttattagaatgatggcttgagtaaaaagctgtggaaagaattaaaggattatgagctaagctgtattttgcagaatatggttctattttagtagagcagagatgagacatatccccaccggccacccagccagaggtctcctacctgggggccctaaagggatgcagaggtctggcccaccctccgtgcataggcacctctgtccaccaccagcgtttcagcaatccaaccagtaagcatatgctgtataggaaaaataaaagtgtgtgggaattggatttcttttgttgtaacacaattccaggtttttggctatttaaagtttgacattaggctgacatcgaggaagtaagtgggttttcctgagttcccaagatatgattaaggaagaaaacaaacccatctccaggaagatcccaggcaggaaagaactagacagatgtagaaaccaaagtgaccattttagtttttttattggagaataaaacattaatattagggtattaagaagatgctcagcaagcttgatcagaatcttcatggtcattaccaatcagtctgacaaaatagttctctggtagtcagcattcatttaaggcagcttgcctgataatttcctgtgttatgtgaagtgtcttgcactttcacatgttagctataattccttaaattacttaactgaaatctgtaatagagaaccattttggcatttgaacagctattttacatggagaaaaagcaaacacatctgtttgctttacccagaaaaactgactttctggtttcatcttcatattgtttagtagcataatgagagtagtcctttatctttctctaatgttagtaaatatattctgttagtaggaagttctgaaattgaagggaaaatatatttaaggaaataaaggaattcaatacacccttcaaaagtcaccaaatactgaaaataagagatgagtccttaaaacctgagtcaaaaaaggtccagttttacagcctgcaattaattcagggctgcgttggcattaaaaaagaaaatatatatatatatatatatatatatatatatatatatatatatgtatattatatatacagtagcttacacttaaaagaggaaaaatttgcattaacattgcatattctgatatgtaccatattaacacataacaggcattttatttatgcttcatagaatcagacagacacaactttcaaaaatcttactgtattcacaatagaaaagggtagtcttgtctaccacagaggagtatgtccacacttaataatgaaaactttcttcctttcctgcccaaaaatttcttcagtctgttattatttttaagtgccccttgctgcaaatttcaaacagagcaagaaatcttcctcagagtaggtggtatgaaattaaactagtacaatatatatgaattcatgtcatttacccctgagtatggtagaattgttaaagcattcttaaattccaattatatgaagcctatcattactaggaaaagtatattctttgggataagaattaatttcttcacactattagagcatgttgtgagtagtaaggaactacttagatgcaatttatttacagaattgtcccttgacctcttgaaatggctagatctttcactactgtgtaggtagtctctacttactggtaggatagattacattgctttactggacaaagcagaatgaacttatataactaaaatatgtcctatattggctgggtgcggtggcttacacctgtaataccagcactttgggaggccaaggtgggtggatcagttgaggtcaggagttcgagaccagcctggccaacatggtgaaaccctgtctctactgaaaatacaaaaaaaaaaaagtatctgggcatggtggcttgtgcctgtaatcccagctacttgggaggctgaggcagggaaatcgcttaaacccgggaggtggaggttgcagtgggcccagatcgtgccactccactccagcctgggagacagagcaagactccatctcaaaataataataatagtaataatgaataaaataaaataaaatatgtcctccagggaaaagcaatgacagagtaatcaccaaattaataggaacatctttctagagaaagtacatgcccagttagttcaaacccaggtttcaaagaagtagcactgggctctactgtaaaggcaggcagtgaccaagaggtggtggggagagaggtagagtaccctcaaatcattcccattttcacttccaatttcccttttgtaatcattaagcttaagctatgtatggaaatgcaaagcaccattagcatttctagaaagcagctggaaccttacccaccaatgcttttttgaagacagtatcatcccaaatttaaaaatcctattgtatatgttgtaaaatttctggcaaagaaatggaggatcctgtggcagctattcccacctaaagccaaccctataaggatgggtcattttttagccatgctaggatttactgcacacacaaaaaatgtcatttagcttgtcacattgctagcacagctgcacatatgagcaaagcactgttggtctgtgtttctcagtgggggtactcttggcatttggagctggataggtctttgctgtacagaatcatcccatgcattgccagatgtttaatatcccaggcccctgctgactaaatgtcagtagcattctcagtcattgtaaacaccaagaataaaaagcattcccccaggttcaaatgccctccctgggaggttggtatcacctcccctgaatgccactgtctactgcattttgaggacacagggagaaaaagtgcctatcctcaaacattgtctctgctgccttgcatttctttgggccctgaatggtttttctcccttcatttttcgagcctttctctcagtgcagctgttcttcagggaggaggttactgggcagccttggccattcagtgggcatggggacttggcctagtccctatatatatatacttaaagtccctatatatacttaaaggagagatcatacatgaagaaagcttttttttttttttttttttttgccttacaacttttctttagaaccacattattggtcataatccttgttactgtcatgaggattgttgcatgggttaaacacaaacacagactagcaatgcacttgaacaaacctggtggtctttggaaataaatcaccattagatttcacctggttatgctgcatcccataagttccaaatgaatcacctgcttatcctattaacgaagcatttaattcacacacaaatgcttgaatttcccctgtataaatgtagtcatgcgattcaacttttctaataagatttgtgaatgctgcatcatgatgaaaatgtggattaactgtgggttgcatgcctgttgttcatacttcagtgatggtcacacacaaaacaagatgagttttacttaggtgaaacattattaaactgtactaacaatacagaaacatattctctttgtcgctttttatcaccaaaactgaatggcaaatatgtcttgacattacttggatgaactgtggctagcaaaatggaattaacttagccactataattttttaaaacattaaagtttctaaattgtttttggggccgagtaacgcagagtcaataaaggtggttatattgtaagcttttagatggtgcttaagaattcttatctttttaaatagcagtattttttttttaagaataaattgtaaggagcaaataaggcagaatgccactctaccctcaggtcaattttatggtatatgaaaatgccagtaatatttgtgccacttgccaactcgggggaggaggggcttttcccttactggatacttttgttatagtttgactatgtcattatgttgtttagagagcctccacaatgagaagttgccactgcagggctaactcgccttcagaaataatcagaatgattcaagggtcaaaccactttcatcccttaaaatatagggactaatatttctttttcttttttttaaaaaaaacatttcttctgtggcttagaaatgtgccagtgtgttcaaaacatttacaccaatttcaccagatttaggacctattaaaaattcaaacaagtttcttttttttttttttttttctgtgtaacagggatttttaaataacggactatatgcattcttttgttatttcacacttcagttaaagtgataacaatggtaaactgtgatcattatcagactgactgaatgctttctgatttccagtgagtgatctagttctacgtattacacaggtgtaatatctgtgagtgtaaataactggaactgtacactgattaacatgacagtttctcttttgttgttcttatctgtactgtattatagtatgtgggtataaatatctacaagtatacacacatatgtacttgtattccactattgtaacctgaaagaaagactatgtattcccttttttaattccgtactggtatttgtgttatttaaaaagcaaaattctgctctatttagttgtataatattagaggatactttgctgtgcacaattccaagtgccttagaacattgtttagctttcctaagtatatataaatgcatatatgtataaaattgggaaaagttacctcaataaaatcattgggaaatccccagttttagtttgttccagtttctcttatatttggatagtgctcagcctttttaaatgaaaaaagaaaaaagagtaagacaacttccctaattgcctgttatttcagcttcacctaagtttttaacacctctttgtatgtaaggtcttgagacatgtaaggcctggtactttttatttaaaatgtctgtctaaagaattactgctcttaaaagaaacttccagtattttttttaacttgctatctttttatgtctgaggtatttgatattgatgtttttattgccattattatatgtaaacataaaagatagtccatttagagtttataatatagaaaataaacagacttcctcatta

SEQ ID NO: 181825 - DNA, 1905 bp, Artificial Sequence
  derived and/or modified sequence
atggacaacgcagttgatggattggacaaagccagtatcgcaaatagcgatggccctacggcgggaagccagaccccgcctttcaaaagaaaaggtaaactcagcactattggcaagatcttcaagccatggaaatggaggaagaaaaaaacttcagataaatttcgcgaaactagcgctgtgctcgaacgcaaaatcagcactcgccaatccagagaagagcttatcagaaggggagtgctgaaagagctgccagaccaggacggcgacgtgactgtgaattttgaaaatagtaatggccatatgatcccaatcggggaggagtctacccgggaagagaatgtggtgaaaagcgaggagggtaatggaagtgttagtgagaaaacaccacctctggaagaacaggccgaggataagaaagaaaataccgaaaaccatagcgagacccctgccgcaccagccctgccaccaagtgcaccacccaagcctaggcccaaacctaagcccaaaaaaagtcccgtccctcctaagggcgctacagccggtgcaagtcacaaaggagacgaggtgcccccaattaaaaagaataccaaagcccctggaaaacaagctcctgtacccccaccaaaaccagcgtcacggaacactacacgggaggctgctggctcttctcactccaaaaagaccacgggatccaaagcgtctgccagcccgagcacctcatcgacctcttcccgcccaaaagctagcaaagagacagtgagctctaaagctggcaccgtgggaaccactaagggcaaacgcaaaactgataaacagcctatcacttcacacctgagtagtgataccaccacttcagggacctcagacctgaagggtgaacccgctgagactcgagtagagagttttaagctggaacagacagtgccaggtgcagaagaacagaacactggcaaattcaaatcaatggttccaccgccacctgtggccccagctccctcgccactggctccccctctgccgctggaggaccagtgcatcaccgccagcgacacgcctgtggtcctagtgagtgtcggtgccgatcttccagtgtctgctctggaccctagccagctgctgtgggccgaggagccaacgaacaggactactctctacagtgggacgggtctgtctgtgaacagggagaatgccaagtgttttacaacaaaagaagagctgggcaaaaccgtgccccagctcctcacaccagggcttatgggagagagttccgaatcattttcagcctccgaggatgagggtcaccgggagtaccaggctaatgatagcgatagcgacggccctattctgtatacagacgatgaggacgaggatgaggatgaggacggctcaggcgaatcggcccttgcatcaaaaatcagaagacgcgacacacttgctatcaagcttggtaaccgaccctctaaaaaggaattagaagacaagaacattctgcaacgcacatccgaagaggagcgacaagaaattaggcaacagatagggacgaaactcgtcagacggttaagccagcggcctacgacagaggaacttgaacagcgaaacatcctgaagcagaagaacgaggaagaggaacaggaagctaaaatggaactgaaaaggcgcctatcgcgaaaactcagcttaagacccaccgtagcagaattgcaggccagacgcattttgcggttcaatgaatacgttgaggtgaccgatagccccgactatgaccgccgagctgataaaccttgggccaggttgacacccgctgacaaggcagctatccgaaaggagctcaatgagttcaaatcaacagagatggaggtgcacgaggagtctcggcagttcacacgtttccataggccttag

SEQ ID NO: 181826 - protein, 1068 aa, Artificial Sequence
  derived and/or modified sequence
MLVGSQSFSPGGPNGIIRSQSFAGFSGLQERRSRCNSFIENSSALKKPQAKLKKMHNLGHKNNNPPKEPQPKRVEEVYRALKNGLDEYLEVHQTELDKLTAQLKDMKRNSRLGVLYDLDKQIKTIERYMRRLEFHISKVDELYEAYCIQRRLQDGASKMKQAFATSPASKAARESLTEINRSFKEYTENMCTIEVELENLLGEFSIKMKGLAGFARLCPGDQYEIFMKYGRQRWKLKGKIEVNGKQSWDGEETVFLPLIVGFISIKVTELKGLATHILVGSVTCETKELFAARPQVVAVDINDLGTIKLNLEITWYPFDVEDMTASSGAGNKAAALQRRMSMYSQGTPETPTFKDHSFFRWLHPSPDKPRRLSVLSALQDTFFAKLHRSRSFSDLPSLRPSPKAVLELYSNLPDDIFENGKAAEEKMPLSLSFSDLPNGDCALTSHSTGSPSNSTNPEITITPAEFNLSSLASQNEGMDDTSSASSRNSLGEGQEPKSHLKEEDPEEPRKPASAPSEACRRQSSGAGAEHLFLENDVAEALLQESEEASELKPVELDTSEGNITKQLVKRLTSAEVPMATDRLLSEGSVGGESEGCRSFLDGSLEDAFNGLLLALEPHKEQYKEFQDLNQEVMNLDDILKCKPAVSRSRSSSLSLTVESALESFDFLNTSDFDEEEDGDEVCNVGGGADSVFSDTETEKHSYRSVHPEARGHLSEALTEDTGVGTSVAGSPLPLTTGNESLDITIVRHLQYCTQLVQQIVFSSKTPFVARSLLEKLSRQIQVMEKLAAVSDENIGNISSVVEAIPEFHKKLSLLSFWTKCCSPVGVYHSPADRVMKQLEASFARTVNKEYPGLADPVFRTLVSQILDRAEPLLSSSLSSEVVTVFQYYSYFTSHGVSDLESYLSQLARQVSMVQTLQSLRDEKLLQTMSDLAPSNLLAQQEVLRTLALLLTREDNEVSEAVTLYLAAASKNQHFREKALLYYCEALTKTNLQLQKAACLALKILEATESIKMLVTLCQSDTEEIRNVASETLLSLGEDGRLAYEQLDKFPRDCVKVGGRHGTEVATAF

SEQ ID NO: 181827 - DNA, 3207 bp, Artificial Sequence
  derived and/or modified sequence
atgttggttggttcacaatcattcagccctgggggccccaatggcattatcaggtctcagagcttcgcgggatttagcggtttgcaggaacgacgctctcgctgcaactcattcatcgagaactcgagtgcccttaaaaaaccacaggccaagctgaaaaaaatgcacaatcttggccacaaaaacaacaatccccctaaagagcctcagcctaagagggtcgaggaggtgtaccgtgctctgaagaatggcctggacgagtatttggaggtgcaccagaccgaactggacaaacttacagctcaactaaaggatatgaaaagaaattctcgtttgggagtgctttacgacttggacaaacagattaagactatagagcggtatatgagacggctggagtttcatatctccaaagttgatgagctctatgaggcttactgcattcagcgcaggctgcaggatggggcatccaaaatgaagcaggcttttgcaacatccccggccagcaaagctgctagagaaagcctcacagagatcaaccggagcttcaaggaatacacagaaaacatgtgtacgatagaggtggaactggagaatctgcttggagagttcagcatcaagatgaaaggcctagcagggttcgccagactgtgtcctggagatcagtatgaaatctttatgaagtatggacggcaaaggtggaagcttaaggggaaaatcgaggtgaacggcaagcaatcctgggacggcgaagagacagtcttcttacccctgattgtgggcttcatctcaatcaaagtgaccgagttaaagggactggctacccatattctcgtggggagtgtgacttgtgagacgaaagagctgttcgcggcaagaccacaggtcgtggctgtggatattaatgaccttgggacaattaagctcaacctggaaattacgtggtacccatttgatgtggaggacatgaccgcgtcttctggcgcaggcaataaggctgcggcgctgcaacgacgaatgagtatgtattcccaaggcacgccagagacaccaacatttaaggatcacagcttctttcgctggttacacccctcccccgacaagcctcgccggctgtctgtgctatctgctctccaggacacattcttcgccaagctccaccgcagcagatcattttctgatctgccatccttaagacctagccccaaggccgtcctggaactgtatagtaacctgccagacgatatttttgagaatggaaaggccgctgaggaaaaaatgccattgtccctctcgttcagcgacctgccaaatggagactgtgccctaacgagccacagtactgggtctcctagcaattctactaacccggagattacaattacacccgccgagtttaatctgagttccttagcctcccagaacgagggcatggacgatacatccagcgcctctagcagaaacagcttaggcgagggtcaggaaccgaagtcacaccttaaggaggaggacccagaagagcctaggaagccagccagcgccccctccgaagcctgtcgacgccagagtagtggcgcgggcgctgagcacctcttcttggagaacgatgtagcagaagccttgctgcaggaatccgaagaagcgagtgagcttaaaccggtcgaactggatacgtctgagggtaacattacaaaacagctggtcaaaagattaactagcgcagaggtgccaatggctacagaccgacttctttctgaaggttcagttggtggggagtcagaggggtgtaggagttttctcgacggtagccttgaagacgcattcaacgggcttctgctggcactggaacctcacaaagaacagtacaaggaatttcaggatctcaaccaagaggtcatgaacttagacgatatcttgaagtgcaaacctgctgtctccagaagccggtcgtcctctctaagtctaactgtcgaaagcgcgcttgagtcttttgacttcctgaatacaagtgactttgacgaggaggaggatggcgacgaagtgtgtaacgttggtggaggagcggacagcgtcttcagcgatactgagaccgaaaagcattcctaccgctccgtccaccctgaggctagaggacatctgagcgaggccctgacagaagataccggtgtgggtactagcgttgccgggtcgcctttaccgttaaccaccggtaacgagagcctggacattaccatcgtgagacacctgcagtattgtacacaattggtacagcaaatcgtttttagctccaaaacccccttcgttgccaggtccctactggagaaactgagcagacagatacaggtcatggagaagttagcagccgtgagtgatgagaatatcggcaatatttcctcagtcgttgaagcaattccagaattccacaagaaactttcactcctgtcgttctggaccaagtgctgttcacccgtgggggtctatcattcaccagctgacagggtgatgaaacagctggaagcaagttttgcaagaactgttaacaaagagtaccctggcctcgccgaccccgtgttcaggactctggtgagtcaaatcctggatagagctgagcctttactgtctagcagtctctcaagtgaagtggtcactgtgtttcagtactactcgtacttcacatcccacggggtgtccgaccttgaatcctatctgtcacagttagcccgccaagtgtcaatggtgcagactctgcagagcctccgcgatgagaaacttttacaaaccatgtcagacctcgctccctcaaatcttcttgctcagcaggaggtcctcaggaccctggctttactcctgactagagaggacaacgaggtgagtgaggcggttacactgtatcttgccgccgcttccaagaaccagcactttagggagaaggcactgctgtattattgtgaagctcttacgaagactaatctccagctgcagaaggccgcttgtcttgctttgaaaattctcgaggccaccgagtcaatcaaaatgctagtgaccctgtgccagtctgatacagaggagattcggaatgtggccagtgaaactctcctgtccctaggagaagatggccgcctagcatacgaacagttggataagtttccgagagattgtgttaaagtgggcggaaggcacggaacggaagtggcaaccgctttttag

SEQ ID NO: 181828 - DNA, 3207 bp, Artificial Sequence
  derived and/or modified sequence
atgctggtgggcagccagagcttcagccctgggggccccaacggcatcatccgcagccagagctttgctggcttcagcggcctgcaggagaggaggagccgctgcaacagcttcatcgagaacagcagcgccctgaagaagccccaggccaagctgaagaagatgcacaacctgggccacaagaacaacaacccccccaaggagccccagcccaagagggtggaggaggtgtaccgggccctgaagaatggcctggatgagtacctggaggtgcaccagacagagctggacaagctgacagcccagctgaaggacatgaagaggaacagccggctgggcgtgctgtatgacctggacaagcagatcaagaccatcgagcgctacatgaggcggctggagttccacatcagcaaggtggatgagctgtatgaggcctactgcatccagaggcggctgcaggatggagccagcaagatgaagcaggcctttgccaccagccctgccagcaaggccgcccgggagagcctgacagagatcaacagaagcttcaaggagtacacagagaacatgtgcaccatcgaggtggagctggagaacctgctgggggagttcagcatcaagatgaagggcctggccggctttgcccggctgtgccctggggaccagtatgagatcttcatgaagtatggccggcagcgctggaagctgaagggcaagattgaggtgaatggcaagcagagctgggatggagaggagaccgtcttcctgcccctgattgtgggcttcatcagcatcaaggtgacagagctgaagggcctggccacccacatcctggtgggctctgtgacctgtgagaccaaggagctgtttgctgcccggccccaggtggtggccgtggacatcaatgacctgggcaccatcaagctgaacctggagatcacctggtacccctttgatgtggaggacatgacagccagcagtggagctggcaacaaggccgccgccctgcagaggaggatgtccatgtacagccagggcaccccagagacccccaccttcaaggaccacagcttcttccgctggctgcaccccagcccagacaagccccggcggctgtctgtgctgagcgccctgcaggacaccttctttgccaagctgcacaggagccgctccttcagtgacctgcccagcctgcggcccagccccaaggctgtgctggagctgtacagcaacctgcctgatgacatctttgaaaatggcaaggctgctgaggagaagatgcccctgagcctgtccttcagtgacctgcccaacggggactgtgccctgaccagccacagcacaggcagccccagcaacagcaccaaccctgagatcaccatcaccccagctgagttcaacctgagcagcctggccagccagaatgaaggcatggatgacaccagcagcgccagcagcaggaacagcctgggggagggccaggagcccaagagccacctgaaggaggaggaccctgaggagcccaggaagccagccagcgcccccagcgaggcctgccggcggcagagcagcggggccggggctgagcacctgttcctggagaatgatgtggccgaggccctgctgcaggagagcgaggaggccagcgagctgaagcctgtggagctggacaccagcgagggcaacatcaccaagcagctggtgaagaggctgaccagcgctgaggtgcccatggccacagaccggctgctgtctgagggctctgtgggcggggagagcgagggctgccgctccttcctggatggcagcctggaggatgccttcaacggcctgctgctggccctggagccccacaaggagcagtacaaggagttccaggacctgaaccaggaggtgatgaacctggatgacatcctgaagtgcaagccagctgtgagccgcagccgcagcagcagcctgagcctgactgtggagagcgccctggagagctttgacttcctgaacaccagtgactttgatgaggaggaggatggagatgaggtgtgcaatgtgggcggcggcgctgacagcgtcttcagtgacacagaaacagagaagcacagctacagatctgtgcaccctgaggcccggggccacctgtctgaggccctgacagaagatactggagtgggcacctctgtggccggcagccccctgcccctgaccactggaaatgaaagcctggacatcaccatcgtgcgccacctgcagtactgcacccagctggtgcagcagatcgtgttcagcagcaagaccccatttgtggcccggagcctgctggagaagctgagccggcagatccaggtgatggagaagctggccgctgtgtctgatgagaacatcggcaacatcagctctgtggtggaggccatccctgagttccacaagaagctgagcctgctgtccttctggaccaagtgctgcagccctgtgggcgtgtaccacagccctgctgacagagtgatgaagcagctggaggccagctttgccaggacagtgaacaaggagtacccaggcctggccgaccccgtcttccgcaccctggtgtcccagatcctggacagagctgagcccctgctgagcagcagcctgagcagcgaggtggtgacagtgttccagtactacagctacttcaccagccacggcgtgtctgacctggagagctacctgagccagctggcccggcaggtgtccatggtgcagaccctgcagagcctgagagatgagaagctgctgcagaccatgtctgacctggcccccagcaacctgctggcccagcaggaggtgctgcggaccctggccctgctgctgaccagagaagataatgaggtgtctgaggccgtgaccctgtacctggccgccgccagcaagaaccagcacttccgggagaaggccctgctgtactactgtgaggccctgaccaagaccaacctgcagctgcagaaggccgcctgcctggccctgaagatcctggaggccacagagagcatcaagatgctggtgaccctgtgccagagcgacacagaggagatcagaaatgtggccagcgagaccctgctgagcctgggagaagatggccgcctggcctatgagcagctggacaagttcccccgggactgtgtgaaggtgggcggccgccacggcacagaggtggccacagccttctag

SEQ ID NO: 181829 - DNA, 3207 bp, Artificial Sequence
  derived and/or modified sequence
atgctggtgggcagccagagcttcagccccggcggccccaacggcataatacgttcccagtcgtttgcaggttttagtggtttacaggagagaaggagcaggtgtaactcttttattgaaaacagttccgccctgaaaaagcctcaggccaaactcaaaaagatgcataacttaggtcacaagaataacaatccacctaaggagcctcaacccaaacgtgtggaggaagtctacagggcccttaagaatggacttgatgaatatctagaggtgcaccagactgaacttgacaagctgacggcacagctgaaggatatgaaacgaaatagccgcttgggggtactatacgacttggacaagcagattaagacgatcgagcggtatatgaggaggttggaattccacatcagcaaggtggatgagctgtacgaagcgtactgtatacagcggaggctacaggatggagcatccaagatgaaacaggccttcgccacatcccctgctagcaaagccgcccgcgagtctctcacagagatcaatcgttccttcaaagagtacacagagaacatgtgcacaattgaagtggagcttgagaacttactgggagagttctccatcaagatgaaaggcctggccggatttgcaaggctgtgccctggagaccaatacgagatttttatgaaatatggccgccaacgttggaagctgaaggggaagatcgaagttaacggaaaacaaagttgggacggcgaagagactgtctttctgcccctcatcgtgggattcatctctatcaaggtgaccgaactgaagggattggctactcacatcctggtggggagcgttacctgcgagaccaaggaactctttgccgcccggccacaggtggtcgccgtggatattaatgacctcggtactattaaactgaatttagagatcacctggtacccgttcgacgtggaagatatgacagcttcttcaggggccgggaacaaggccgcagcacttcaaagaagaatgagcatgtactctcagggaacccctgagacgcccactttcaaagatcatagtttctttcggtggctccaccctagccccgacaaaccaaggaggctgtccgtgctatcagcgctgcaggacactttcttcgcaaagctacatagatcaaggtcattttccgacctgcccagcttacgtccaagtcccaaggccgttttagaactctactcaaaccttcctgacgacatttttgagaacggcaaggcagctgaagagaagatgccactaagtctatctttctcagatctacccaatggtgattgcgccctcacatcccattctaccggctctccttctaactcaactaaccccgagatcactatcactccagctgagttcaatttatcctccctggcgtcacagaatgaaggcatggacgatacatcatcagcgtctagcaggaactccctcggtgaaggacaagaacctaagtctcacttgaaggaggaagaccccgaagagccacgtaagcctgcatccgcccccagtgaggcttgccggcgacagtccagcggggcaggagctgagcatttgttcctcgagaacgatgtggcggaggcattgcttcaggaatctgaggaggcatccgaattaaagcccgtcgaactagacaccagcgaggggaacattacaaagcagctagtaaaaaggctgacaagcgctgaggtacctatggcaaccgatcgcttgctgagcgaaggctccgtgggcggggagtcagagggctgccgctcatttctcgacggaagtctggaagacgcattcaatggtcttctgcttgctctggaaccacacaaagaacaatataaagaattccaagatctgaatcaggaggtgatgaatctggatgatatcctcaagtgtaagcctgctgtcagccgcagccggtcttcgtcattgtcgttgaccgtggagtcagcgctggaatccttcgacttcctcaacacctccgacttcgatgaggaggaggacggtgacgaggtctgtaatgttggagggggagcggactctgtgttttcagacaccgagactgagaagcatagctaccgtagcgtccaccccgaggctcgcggccacctgagtgaagctctcaccgaagatacaggtgtcggaacttctgttgcaggcagccccctgcccctgaccaccgggaacgaatctcttgacattacaatcgtaaggcacttgcagtactgcactcagttagtccagcaaatcgtcttcagctcaaagacccccttcgttgcccgctctctgctcgagaaactttcccggcaaattcaggtcatggagaagctcgctgccgtctctgatgaaaatattgggaacattagctctgtcgtggaggcgatacccgagttccataagaagctgtcactgctctccttctggaccaaatgttgttcccccgtcggcgtctaccacagcccagccgaccgggtaatgaagcaactagaggcaagttttgctagaacggtaaacaaagagtaccccggactcgccgacccggtgtttaggacgctggtctcacagattctggatcgcgctgagcctctattgtcatcttcactgagcagtgaagtggtaactgtgtttcagtactatagttatttcaccagtcacggggtgtcagatttggagtcatatctcagtcagctcgccaggcaagtgtcaatggtccaaacactacagagcctcagagatgaaaagctgttacagactatgagtgacctcgcacctagtaacttgctagcccagcaagaagtgctcaggaccttggccctgctgctgactagagaggacaacgaggtgagcgaggcggtgacattatacctggcagccgcatccaagaaccaacattttagggaaaaggcgctcctgtactattgcgaggccctgacaaaaactaatttacagctccagaaagctgcttgccttgcgctgaagattctagaagctacggaatctatcaaaatgctagtcaccttgtgtcagtcagatacagaagaaatccggaacgttgcatccgaaactcttctgtctcttggagaagacggaaggctggcctacgagcagctggataagttccctcgtgattgtgtcaaagtgggaggccggcatggcaccgaggtagcaaccgcgttctag

SEQ ID NO: 181830 - DNA, 3207 bp, Artificial Sequence
  derived and/or modified sequence
atgttagtcggctcacagagctttagccccggtgggccaaacggtattatcaggtctcagagtttcgcaggtttttcagggcttcaggaacggcgtagcagatgtaactcatttatcgagaactcaagtgcactcaagaaaccgcaggctaagctgaagaagatgcacaacttgggtcataaaaacaataatcctcccaaggagccccagcccaagcgtgtggaggaagtgtatagagccctgaagaatggtctagacgagtatctggaagtgcatcagactgaattagataagctcactgcccagctcaaggatatgaaaaggaattccagactgggggtgctgtacgacctggacaaacagatcaaaacgatagagcggtacatgcgtcgactcgagttccacatctccaaggttgacgagctgtacgaggcatactgcattcagcgcagactccaggacggtgcctcaaaaatgaagcaggcatttgcgacctctcctgcctctaaggccgcacgtgaatctctaactgagatcaatagatccttcaaggagtacaccgaaaacatgtgcaccatcgaagtcgagctcgagaacctactaggggaattctcgatcaagatgaaagggctggctggatttgcccgtctgtgtccgggagatcagtatgagattttcatgaagtatggtcggcagaggtggaaactcaaggggaagatagaggtgaacggcaagcagtcatgggacggcgaggaaactgtgttccttccccttatcgtgggattcatttcaattaaagtgaccgaactaaaaggcctcgcaactcacatcctcgtaggcagcgttacctgtgagaccaaagagttgttcgccgcaagaccgcaagttgttgccgttgacatcaacgacctcggtacaattaaacttaacttggagattacatggtatccctttgatgtggaagatatgacagcctcgagcggcgcaggaaacaaggccgctgcccttcagcggagaatgtctatgtacagccaggggacaccggaaactccaacatttaaggatcactccttctttcgctggctgcacccttctcccgataagccgagaagactgtccgtgctcagcgcacttcaagatacattctttgcgaaactgcatcggtctcgctccttcagtgacctgccttccctacgtccatcgcccaaggcggtacttgaactgtactccaatctaccagacgatattttcgagaatggaaaggcagccgaagagaaaatgcctctcagcctgtcattttcagacctccccaacggggactgtgccctcaccagccattccacaggaagtccttcaaacagcacaaatcctgagatcactatcacacctgcggaattcaatctgtcatccttagctagccagaatgagggaatggacgataccagttctgcctcttccaggaatagtctgggggaggggcaggaaccgaaaagtcatctgaaggaggaggaccccgaagaaccaagaaagccagccagcgcaccaagcgaagcttgccgaagacaaagttcaggcgctggcgcagagcacctgttccttgaaaacgatgtcgccgaagcccttctccaggagtctgaggaggcatctgagctcaagcccgtggagcttgacacgtcagagggcaatatcactaaacagctcgtaaagagactgaccagcgccgaagtgccaatggcaacagatcgtctcttgagcgagggctctgtgggaggggaatctgagggatgccggtcctttctcgacggctccctggaggatgcttttaacggactgctgcttgctctagaaccccacaaggagcaatacaaagagtttcaggatctgaaccaagaggtgatgaacctggacgacattctgaagtgtaagcccgcagtttccaggtcacgatccagctcactgagcttgactgtggagagcgccttggagtcatttgattttttgaacaccagtgatttcgatgaagaagaagatggggacgaggtctgtaatgtgggaggcggtgcagacagcgtgttttctgatacagaaaccgagaagcattcttaccgcagcgtgcatcctgaggcacggggacatctttccgaagcattgacggaggataccggagtaggaacgagcgttgccggatccccgctgcccctcaccactggaaacgagtcgctggatataacaattgtgagacacctgcagtattgtacccagttggtacagcaaatagtattctcctccaagactccctttgtggccagaagccttttggaaaaacttagtcggcagattcaagtgatggagaagctggctgctgtgagtgatgagaatatcgggaatatcagctctgtcgtcgaggccatacctgagtttcacaagaagctgagtctgcttagcttctggaccaaatgttgtagtcccgtgggagtatatcacagccccgcagatagggtgatgaagcagttggaagctagctttgccagaactgtaaacaaggagtatcccggtcttgcagatccggtgttccgcacactagtctctcagattttagatcgcgctgaacccctgttgtccagcagcctgtcttccgaggtggtaacggttttccaatattactcatactttacatcacacggtgtgagcgatctcgagtcctatttgagtcagcttgccaggcaggtgtccatggtgcagacccttcaatctctgcgcgacgaaaaactcctccagactatgtctgacctcgccccttccaacttactagcgcagcaggaagttcttagaacactagctctgttattgacacgcgaggacaacgaagtgagtgaggcggttaccctatatctggctgctgccagcaagaaccagcactttcgagagaaagccctcctctactactgcgaggccctgaccaagacaaatctgcagttacagaaagccgcatgcctcgctctgaaaattttagaggccacagagagtatcaagatgctcgtcaccctatgtcagagcgatactgaagagatcaggaacgtagccagcgagaccctgctgtctctcggtgaagacggccgactagcttatgagcagctggacaagttccccagggactgtgttaaagttggcggacggcatggaaccgaagtcgccacagccttctag

SEQ ID NO: 181831 - DNA, 3207 bp, Artificial Sequence
  derived and/or modified sequence
atgctggtgggcagccagagcttcagccccggcggccccaacggcatcatcagaagccagagcttcgccggcttcagcggcctgcaggagagaagaagcagatgcaacagcttcatcgagaacagcagcgccctgaagaagccccaggccaagctgaagaagatgcacaacctgggccacaagaacaacaacccccccaaggagccccagcccaagagagtggaggaggtgtacagagccctgaagaacggcctggacgagtacctggaggtgcaccagaccgagctggacaagctgaccgcccagctgaaggacatgaagagaaacagcagactgggcgtgctgtacgacctggacaagcagatcaagaccatcgagagatacatgagaagactggagttccacatcagcaaggtggacgagctgtacgaggcctactgcatccagagaagactgcaggacggcgccagcaagatgaagcaggccttcgccaccagccccgccagcaaggccgccagagagagcctgaccgagatcaacagaagcttcaaggagtacaccgagaacatgtgcaccatcgaggtggagctggagaacctgctgggcgagttcagcatcaagatgaagggcctggccggcttcgccagactgtgccccggcgaccagtacgagatcttcatgaagtacggcagacagagatggaagctgaagggcaagatcgaggtgaacggcaagcagagctgggacggcgaggagaccgtgttcctgcccctgatcgtgggcttcatcagcatcaaggtgaccgagctgaagggcctggccacccacatcctggtgggcagcgtgacctgcgagaccaaggagctgttcgccgccagaccccaggtggtggccgtggacatcaacgacctgggcaccatcaagctgaacctggagatcacctggtaccccttcgacgtggaggacatgaccgccagcagcggcgccggcaacaaggccgccgccctgcagagaagaatgagcatgtacagccagggcacccccgagacccccaccttcaaggaccacagcttcttcagatggctgcaccccagccccgacaagcccagaagactgagcgtgctgagcgccctgcaggacaccttcttcgccaagctgcacagaagcagaagcttcagcgacctgcccagcctgagacccagccccaaggccgtgctggagctgtacagcaacctgcccgacgacatcttcgagaacggcaaggccgccgaggagaagatgcccctgagcctgagcttcagcgacctgcccaacggcgactgcgccctgaccagccacagcaccggcagccccagcaacagcaccaaccccgagatcaccatcacccccgccgagttcaacctgagcagcctggccagccagaacgagggcatggacgacaccagcagcgccagcagcagaaacagcctgggcgagggccaggagcccaagagccacctgaaggaggaggaccccgaggagcccagaaagcccgccagcgcccccagcgaggcctgcagaagacagagcagcggcgccggcgccgagcacctgttcctggagaacgacgtggccgaggccctgctgcaggagagcgaggaggccagcgagctgaagcccgtggagctggacaccagcgagggcaacatcaccaagcagctggtgaagagactgaccagcgccgaggtgcccatggccaccgacagactgctgagcgagggcagcgtgggcggcgagagcgagggctgcagaagcttcctggacggcagcctggaggacgccttcaacggcctgctgctggccctggagccccacaaggagcagtacaaggagttccaggacctgaaccaggaggtgatgaacctggacgacatcctgaagtgcaagcccgccgtgagcagaagcagaagcagcagcctgagcctgaccgtggagagcgccctggagagcttcgacttcctgaacaccagcgacttcgacgaggaggaggacggcgacgaggtgtgcaacgtgggcggcggcgccgacagcgtgttcagcgacaccgagaccgagaagcacagctacagaagcgtgcaccccgaggccagaggccacctgagcgaggccctgaccgaggacaccggcgtgggcaccagcgtggccggcagccccctgcccctgaccaccggcaacgagagcctggacatcaccatcgtgagacacctgcagtactgcacccagctggtgcagcagatcgtgttcagcagcaagacccccttcgtggccagaagcctgctggagaagctgagcagacagatccaggtgatggagaagctggccgccgtgagcgacgagaacatcggcaacatcagcagcgtggtggaggccatccccgagttccacaagaagctgagcctgctgagcttctggaccaagtgctgcagccccgtgggcgtgtaccacagccccgccgacagagtgatgaagcagctggaggccagcttcgccagaaccgtgaacaaggagtaccccggcctggccgaccccgtgttcagaaccctggtgagccagatcctggacagagccgagcccctgctgagcagcagcctgagcagcgaggtggtgaccgtgttccagtactacagctacttcaccagccacggcgtgagcgacctggagagctacctgagccagctggccagacaggtgagcatggtgcagaccctgcagagcctgagagacgagaagctgctgcagaccatgagcgacctggcccccagcaacctgctggcccagcaggaggtgctgagaaccctggccctgctgctgaccagagaggacaacgaggtgagcgaggccgtgaccctgtacctggccgccgccagcaagaaccagcacttcagagagaaggccctgctgtactactgcgaggccctgaccaagaccaacctgcagctgcagaaggccgcctgcctggccctgaagatcctggaggccaccgagagcatcaagatgctggtgaccctgtgccagagcgacaccgaggagatcagaaacgtggccagcgagaccctgctgagcctgggcgaggacggcagactggcctacgagcagctggacaagttccccagagactgcgtgaaggtgggcggcagacacggcaccgaggtggccaccgccttctag

SEQ ID NO: 181832 - protein, 1023 aa, Artificial Sequence
  derived and/or modified sequence
MTLNNCASMKLEVHFQSKQNEDSEEEEQCTISSHWAFQQESKCWSPMGSSDLLAPPSPGLPATSSCESVLTELSATSLPVITVSLPPEPADLPLPGRAPSSSDRPLLSPTQGQEGPQDKAKKRHRNRSFLKHLESLRRKEKSGSQQAEPKHSPATSEKVSKASSFRSCRGFLSAGFYRAKNWAATSAGGSGANTRKAWEAWPVASFRHPQWTHRGDCLVHVPGDHKPGTFPRSLSIESLCPEDGHRLADWQPGRRWGCEGRRGSCGSTGSHASTYDNLPELYPAEPVMVGAEAEDEDDEESGGSYAHLDDILQHVWGLQQRVELWSRAMYPDLGPGDEEEEEATSSVEIATVEVKCQAEALSQMEVPAHGESPAWAQAEVQPAVLAPAQAPAEAEPVAQEEAEAPAPAPAPAPAQDSEQEAHSGGEPTFASSLSVEEGHSISDTVASSSELDSSGNSMNEAEAAGPLAGLQASMPRERRDSGVGASLTRPCRKLRWHSFQNSHRPSLNSESLEINRQFAGQINLLHKGSLLRLTAFMEKYTVPHKQGWVWSMPKFMRRNKTPDYRGQHVFGVPPLIHVQRTGQPLPQSIQQAMRYLRSQCLDQVGIFRKSGVKSRIQNLRQMNETSPDNVCYEGQSAYDVADLLKQYFRDLPEPIFTSKLTTTFLQIYQLLPKDQWLAAAQAATLLLPDENREVLQTLLYFLSDIASAEENQMTAGNLAVCLAPSIFHLNVSKKDSPSPRIKSKRSLIGRPGPRDLSDNMAATQGLSHMISDCKKLFQVPQDMVLQLCSSYSAAELSPPGPALAELRQAQAAGVSLSLYMEENIQDLLRDAAERFKGWMSVPGPQHTELACRKAPDGHPLRLWKASTEVAAPPAVVLHRVLRERALWDEDLLRAQVLEALMPGVELYHYVTDSMAPHPCRDFVVLRMWRSDLPRGGCLLVSQSLDPEQPVPESGVRALMLTSQYLMEPCGLGRSRLTHICRADLRGRSPDWYNKVFGHLCAMEVAKIRDSFPTLQAAGPETKL

SEQ ID NO: 181833 - protein, 615 aa, Artificial Sequence
  derived and/or modified sequence
MESMFEDDISILTQEALGPSEVWLDSPGDPSLGGDMCSASHFALITAYGDIKERLGGLERENATLRRRLKVYEIKYPLISDFGEEHGFSLYEIKDGSLLEVEKVSLQQRLNQFQHELQKNKEQEEQLGEMIQAYEKLCVEKSDLETELREMRALVETHLRQICGLEQQLRQQQGLQDAAFSNLSPPPAPAPPCTDLDLHYLALRGGSGLSHAGWPGSTPSVSDLERRRLEEALEAAQGEARGAQLREEQLQAECERLQGELKQLQETRAQDLASNQSERDMAWVKRVGDDQVNLALAYTELTEELGRLRELSSLQGRILRTLLQEQARSGGQRHSPLSQRHSPAPQCPSPSPPARAAPPCPPCQSPVPQRRSPVPPCPSPQQRRSPASPSCPSPVPQRRSPVPPSCQSPSPQRRSPVPPSCPAPQPRPPPPPPPGERTLAERAYAKPPSHHVKAGFQGRRSYSELAEGAAYAGASPPWLQAEAATLPKPRAYGSELYGPGRPLSPRRAFEGIRLRFEKQPSEEDEWAVPTSPPSPEVGTIRCASFCAGFPIPESPAATAYAHAEHAQSWPSINLLMETVGSDIRSCPLCQLGFPVGYPDDALIKHIDSHLENSKI

SEQ ID NO: 181834 - protein, 223 aa, Artificial Sequence
  derived and/or modified sequence
MESMFEDDISILTQEALGPSEVWLDSPGDPSLGGDMCSASHFALITAYGDIKERLGGLERENATLRRRLKVYEIKYPLISDFGEEHGFSLYEIKDGSLLEVEKVSLQQRLNQFQHELQKNKEQEEQLGEMIQAYEKLCVEKSDLETELREMRALVETHLRQICGLEQQLRQQQGLQDAAFSNLSPPRRARAVLAVHQLADGDGGLRHPQLPPLPAGFPCRVPG

SEQ ID NO: 181835 - DNA, 1848 bp, Artificial Sequence
  derived and/or modified sequence
atggagagcatgttcgaggacgacatcagcatcctgacccaggaggccctgggccccagcgaggtgtggctggacagccccggcgaccccagcctgggcggcgacatgtgcagcgccagccacttcgccctgatcaccgcctacggcgacatcaaggagagactgggcggcctggagagagagaacgccaccctgagaagaagactgaaggtgtacgagatcaagtaccccctgatcagcgacttcggcgaggagcacggcttcagcctgtacgagatcaaggacggcagcctgctggaggtggagaaggtgagcctgcagcagagactgaaccagttccagcacgagctgcagaagaacaaggagcaggaggagcagctgggcgagatgatccaggcctacgagaagctgtgcgtggagaagagcgacctggagaccgagctgagagagatgagagccctggtggagacccacctgagacagatctgcggcctggagcagcagctgagacagcagcagggcctgcaggacgccgccttcagcaacctgagccccccccccgcccccgcccccccctgcaccgacctggacctgcactacctggccctgagaggcggcagcggcctgagccacgccggctggcccggcagcacccccagcgtgagcgacctggagagaagaagactggaggaggccctggaggccgcccagggcgaggccagaggcgcccagctgagagaggagcagctgcaggccgagtgcgagagactgcagggcgagctgaagcagctgcaggagaccagagcccaggacctggccagcaaccagagcgagagagacatggcctgggtgaagagagtgggcgacgaccaggtgaacctggccctggcctacaccgagctgaccgaggagctgggcagactgagagagctgagcagcctgcagggcagaatcctgagaaccctgctgcaggagcaggccagaagcggcggccagagacacagccccctgagccagagacacagccccgccccccagtgccccagccccagcccccccgccagagccgcccccccctgccccccctgccagagccccgtgccccagagaagaagccccgtgcccccctgccccagcccccagcagagaagaagccccgccagccccagctgccccagccccgtgccccagagaagaagccccgtgccccccagctgccagagccccagcccccagagaagaagccccgtgccccccagctgccccgccccccagcccagacccccccccccccccccccccggcgagagaaccctggccgagagagcctacgccaagccccccagccaccacgtgaaggccggcttccagggcagaagaagctacagcgagctggccgagggcgccgcctacgccggcgccagccccccctggctgcaggccgaggccgccaccctgcccaagcccagagcctacggcagcgagctgtacggccccggcagacccctgagccccagaagagccttcgagggcatcagactgagattcgagaagcagcccagcgaggaggacgagtgggccgtgcccaccagcccccccagccccgaggtgggcaccatcagatgcgccagcttctgcgccggcttccccatccccgagagccccgccgccaccgcctacgcccacgccgagcacgcccagagctggcccagcatcaacctgctgatggagaccgtgggcagcgacatcagaagctgccccctgtgccagctgggcttccccgtgggctaccccgacgacgccctgatcaagcacatcgacagccacctggagaacagcaagatctag

SEQ ID NO: 181836 - DNA, 672 bp, Artificial Sequence
  derived and/or modified sequence
atggagagcatgttcgaggacgacatcagcatcctgacccaggaggccctgggccccagcgaggtgtggctggacagccccggcgaccccagcctgggcggcgacatgtgcagcgccagccacttcgccctgatcaccgcctacggcgacatcaaggagagactgggcggcctggagagagagaacgccaccctgagaagaagactgaaggtgtacgagatcaagtaccccctgatcagcgacttcggcgaggagcacggcttcagcctgtacgagatcaaggacggcagcctgctggaggtggagaaggtgagcctgcagcagagactgaaccagttccagcacgagctgcagaagaacaaggagcaggaggagcagctgggcgagatgatccaggcctacgagaagctgtgcgtggagaagagcgacctggagaccgagctgagagagatgagagccctggtggagacccacctgagacagatctgcggcctggagcagcagctgagacagcagcagggcctgcaggacgccgccttcagcaacctgagcccccccagaagagccagagccgtgctggccgtgcaccagctggccgacggcgacggcggcctgagacacccccagctgccccccctgcccgccggcttcccctgcagagtgcccggctag

SEQ ID NO: 181837 - DNA, 1848 bp, Artificial Sequence
  derived and/or modified sequence
atggaaagcatgtttgaggatgacatctcaatcttgactcaggaggcactgggcccctccgaggtgtggctggattcgcccggggacccatcgctcggtggggacatgtgtagcgcaagccatttcgctttgatcaccgcctatggagatatcaaagagcggctgggcggattggagcgggaaaacgcaactctccggaggcgcctgaaggtatacgaaatcaagtaccccctgatcagcgacttcggggaggaacacggattcagtctctacgaaattaaagatggctccctgctggaagtggaaaaagtgtctctgcagcaacggcttaaccagttccaacacgagctacagaaaaacaaagagcaggaagaacagctgggagagatgatacaggcctacgagaaactgtgcgtggaaaagtctgatctcgagaccgaactgcgcgaaatgagagctctggtggaaactcatctgcgccaaatctgtggcctggaacagcagctcagacaacagcagggcttgcaggatgccgcgttcagcaacttaagtcctccccctgcccccgctcctccatgcaccgacctagacctgcattatctcgcactgcggggtggcagcggcctatcccacgccggctggcctggaagcacaccatcagtgtcggacctggagcgcaggagactagaggaagctttggaggccgctcagggcgaggcccgcggggctcagcttcgggaagaacagctccaggccgagtgcgagaggctacagggggagctcaaacagctgcaggaaacgcgcgcccaggatctcgctagcaaccagagtgagcgggatatggcttgggtgaaacgagttggcgacgaccaagtcaatctggccttagcttacaccgagcttacggaggagctaggtcggctcagagagctgtcctctctgcagggccggatcctgcgtacactgcttcaggagcaggcacgtagtggcggccagcgtcactcacccttatcacagcggcattctcctgcaccccagtgccctagcccgagcccgcccgctagagctgcccctccctgccctccctgccagtcacctgttccccaaagacggtcgcctgttcctccctgcccttcaccccagcaaaggcgctccccggccagtccatcttgcccatctccagtacctcagcgccgttcacccgtgcctccatcgtgtcagagtccttcaccgcagagaagaagcccagtcccaccttcttgccctgcacctcagcctaggccccctcctccacccccaccgggagaaaggacactggccgaacgtgcctatgcaaagccaccaagtcaccacgtgaaggcggggttccagggccgtcgcagctattctgaactcgctgagggcgctgcgtacgcgggcgccagtcctccttggcttcaggcggaagccgcgactctgcccaagccacgggcatacggtagcgaattatacggccccggcaggcccctgagcccgaggagagctttcgaaggtattcgcctgaggttcgaaaagcagccaagcgaagaggacgagtgggccgtgcctaccagtcccccgtcaccagaagtcgggactatccgctgcgcctccttctgcgcgggatttcctatcccggaatcacctgcagctaccgcatatgcccacgcagagcacgcccagagttggccttccatcaacctgctcatggagacagtcggaagtgacattaggagctgcccattgtgtcagttggggttccctgtcggatacccagatgatgctcttatcaaacatatcgatagtcatttggaaaacagcaaaatttag

SEQ ID NO: 181838 - DNA, 672 bp, Artificial Sequence
  derived and/or modified sequence
atggagtctatgtttgaggacgatatctcaatactcacacaggaagcgctgggacccagtgaagtgtggttggatagccctggagaccccagccttggtggtgacatgtgttcagcaagccattttgccctgatcactgcctatggtgatataaaggaaagattagggggtctggagagagaaaatgccacactgcggcgacggcttaaagtatacgaaattaagtatcccctgatctcggatttcggtgaggagcacggatttagtctgtacgaaattaaagatggctctctccttgaagtggaaaaggtgtctctgcaacagcggctcaatcagtttcagcatgagttgcagaagaataaagagcaggaggaacagttgggggagatgatacaggcttacgaaaagctgtgcgtggaaaaaagcgacctcgagacagaacttagggaaatgagggcactggtcgaaacacacctgcgccaaatttgtgggctggagcagcagctacggcagcagcaagggcttcaagatgccgcattctctaacttaagcccgccccgacgcgctagggctgtgttagccgtccaccagctagcagatggcgacggaggtttacgccatccccaactcccccccctgcccgccgggttcccttgtagggtgcctggatag

SEQ ID NO: 181839 - DNA, 1848 bp, Artificial Sequence
  derived and/or modified sequence
atggagagcatgtttgaagatgacatcagcatcctgacccaggaggccctgggccccagcgaggtgtggctggacagccctggggaccccagcctgggcggggacatgtgcagcgccagccactttgccctgatcacagcctacggggacatcaaggagcggctgggcggcctggagagagaaaatgccaccctgcggcggcggctgaaggtgtatgagatcaagtaccccctcatcagtgactttggagaggagcacggcttcagcctgtatgagatcaaggatggcagcctgctggaggtggagaaggtgtccctgcagcagaggctgaaccagttccagcacgagctgcagaagaacaaggagcaggaggagcagctgggggagatgatccaggcctatgagaagctgtgtgtggagaagagtgacctggagacagagctgcgggagatgagggccctggtggagacccacctgcggcagatctgtggcctggagcagcagctgcggcagcagcagggcctgcaggatgctgccttcagcaacctgagccccccaccagccccagccccaccctgcacagacctggacctgcactacctggccctgcggggcggcagcggcctgagccacgccggctggccaggcagcacccccagcgtgtctgacctggagcggcggcggctggaggaggccctggaggccgcccagggcgaggcccggggggcccagctgcgggaggagcagctgcaggctgaatgtgagcggctgcagggcgagctgaagcagctgcaggagacccgggcccaggacctggccagcaaccagagcgagcgggacatggcctgggtgaagagggtgggagatgaccaggtgaacctggccctggcctacacagagctgacagaggagctgggccgcctgcgggagctgagcagcctgcagggccgcatcctgcggaccctgctgcaggagcaggcccggagcggcggccagaggcacagccccctgagccagaggcacagccctgccccccagtgccccagccccagccccccagcccgggccgccccaccctgccccccctgccagagccctgtgccccagaggaggagccctgtgcccccctgccccagcccccagcagaggaggagccctgccagccccagctgccccagccctgtgccccagaggaggagccctgtgccccccagctgccagagccccagcccccagaggaggagccctgtgccccccagctgcccagccccccagccccggcccccacctcctcctcctcctggagagaggaccctggccgagcgggcctatgccaagccacccagccaccacgtgaaggccggcttccagggcagaagaagctacagcgagctggccgagggcgccgcctatgctggggccagccccccctggctgcaggccgaggccgccaccctgcccaagccccgggcctacggcagcgagctgtatggccctggccggcccctgagcccccggcgggcctttgagggcatccggctgcgctttgagaagcagcccagtgaagaagatgagtgggccgtgcccaccagcccccccagccctgaggtgggcaccatccgctgtgccagcttctgtgccggcttccccatccctgagagccctgctgccacagcctatgcccatgctgagcacgcccagagctggcccagcatcaacctgctgatggagaccgtgggcagtgacatccgcagctgccccctgtgccagctgggcttccctgtgggctacccagatgatgccctgatcaagcacatcgacagccacctggagaacagcaagatctag

SEQ ID NO: 181840 - DNA, 672 bp, Artificial Sequence
  derived and/or modified sequence
atggagagcatgtttgaagatgacatcagcatcctgacccaggaggccctgggccccagcgaggtgtggctggacagccctggggaccccagcctgggcggggacatgtgcagcgccagccactttgccctgatcacagcctacggggacatcaaggagcggctgggcggcctggagagagaaaatgccaccctgcggcggcggctgaaggtgtatgagatcaagtaccccctcatcagtgactttggagaggagcacggcttcagcctgtatgagatcaaggatggcagcctgctggaggtggagaaggtgtccctgcagcagaggctgaaccagttccagcacgagctgcagaagaacaaggagcaggaggagcagctgggggagatgatccaggcctatgagaagctgtgtgtggagaagagtgacctggagacagagctgcgggagatgagggccctggtggagacccacctgcggcagatctgtggcctggagcagcagctgcggcagcagcagggcctgcaggatgctgccttcagcaacctgagccccccaagaagagcccgggctgtgctggccgtgcaccagctggctgatggagatggcggcctgcggcacccccagctgccccccctgcctgctggcttcccctgccgggtgcccggctag

SEQ ID NO: 181841 - DNA, 1848 bp, Artificial Sequence
  derived and/or modified sequence
atggagagcatgttcgaggacgacatcagcatcctgacccaggaggccctgggcccctccgaggtctggctggatagtcccggcgatccatctctcggcggcgacatgtgcagcgcttcgcattttgctctcatcactgcctacggtgacatcaaggagagactgggtggtctcgaaagggaaaatgccacgttgagaaggcgcctcaaggtctacgaaatcaagtatcctctgatttccgattttggtgaagagcacggtttctcactttatgagattaaagatggaagcctgctggaggtggagaaagttagcctgcagcaaaggttgaatcaattccagcacgagttacagaagaacaaggaacaggaggagcagctgggcgagatgatacaggcctacgagaagttgtgcgtcgagaagagtgacctcgagacggaacttagggagatgcgggctctggtcgaaacacatctgcgccagatttgcggacttgagcagcagcttcgacagcagcagggcctgcaagatgccgccttctccaacctgagccctccccccgcccctgccccaccctgcaccgatcttgatttacattatttagctctccgtgggggaagcgggctgtcacacgctggctggcccggctctacaccaagtgttagcgatcttgagcggaggcgccttgaggaagcactcgaggccgcccagggagaggcgaggggcgctcagttacgagaagaacaactgcaagctgagtgcgaacggctccagggggaattaaaacaactgcaggagaccagagcccaggacctcgcttctaaccaatccgaacgggatatggcttgggttaaacgcgttggcgacgatcaggtgaacctggccctcgcctacaccgagcttacagaagagctgggtcggctgcgggagctctcgagcctgcagggacggattctccgtaccctgctgcaagagcaggctcgcagcggagggcagaggcactcccctctcagccagcgacactcccccgccccccaatgccctagcccctcacctccggctcgggcagcacctccatgtccaccatgccagagccccgtccctcagcgaagatcccccgtgccaccctgcccctcgccccagcaaaggcgatcacccgcttctccctcctgcccaagccccgtcccccagcgtcgatcaccggttcccccatcctgccaatccccttccccgcaacgacgcagcccagtgcctccctcttgcccagccccacagcctaggcctccccctccccccccaccaggcgagcgcaccctagccgagcgcgcctacgccaagcccccctcccaccacgtgaaggcaggatttcagggccggagatcctattctgagcttgccgaaggagcggcctacgctggcgcaagtcctccatggctgcaggcggaggccgctacgctgccgaaacctagagcctacgggagcgagctctatggaccgggacggccactgagcccacgtcgcgcattcgaaggcatacgattaagattcgagaagcagccttcagaggaggacgagtgggccgtgccaaccagtccaccatctcctgaggttgggacaattcgctgtgcatcgttctgcgccggattccccatacccgagagccctgcggcaacagcttacgcacacgccgagcacgctcagagctggccatccattaatctgctgatggagacagtaggaagcgacattcgatcctgtcccctctgccagctgggcttccctgttgggtatcccgatgacgccctgattaagcacatcgactctcacctcgagaatagcaaaatttag

SEQ ID NO: 181842 - DNA, 672 bp, Artificial Sequence
  derived and/or modified sequence
atggagagcatgttcgaggacgacatcagcatcctgacccaggaggccctcgggccaagtgaggtgtggcttgactctcccggcgatcctagcttgggaggcgatatgtgcagtgcttcgcactttgctctcatcacagcttacggagatattaaagagagactaggtggcttggaaagagagaacgctacactaagacgccggctgaaggtctacgagattaaatatcctctgatctccgacttcggtgaggaacatggcttttcactctacgaaattaaggatggctcgctgttagaggtggaaaaggtgagcctgcagcaaaggctcaaccaattccaacacgagttgcaaaaaaataaagagcaggaggaacagctgggagagatgattcaggcctacgaaaagctgtgcgtcgaaaagtctgaccttgagaccgaactgcgcgagatgcgcgcccttgtagagacccatcttcgtcagatatgtgggctggaacagcagctgcggcagcaacaaggtctccaggacgcagcattcagcaacctgagtccaccccggcgcgcccgagcagtgctggcagtgcaccagttagccgatggggatggaggcctacgccacccgcagctgccaccacttccggctggcttcccttgtagggtccctgggtag

SEQ ID NO: 181843 - DNA, 1848 bp, Artificial Sequence
  derived and/or modified sequence
atggaaagtatgttcgaggatgacatttcaatcttaacccaggaagccctgggccctagcgaagtatggctggacagccctggagacccctctctcggaggcgacatgtgctcggcctctcactttgccctgattacagcttacggcgacattaaagaacgtttgggaggactggagagggaaaatgccaccctgcggaggcgcctgaaggtgtatgaaatcaaataccccctgatttccgacttcggggaagagcatggctttagcctttacgagatcaaagatggatcactgctagaggttgagaaggtctccttacagcagcgactgaaccaattccaacacgaactccagaagaataaagagcaggaggaacaattaggcgagatgattcaggcgtacgaaaaactctgtgtcgagaagtcagaccttgaaacggaactgagggaaatgcgggcattagtcgagacacacctgcggcaaatatgcggcctggagcagcaactgagacagcaacaaggcctgcaggacgctgctttcagtaatctcagccccccaccagctcccgctccaccatgcacggatctggacctccactacttggctctaaggggtgggtctggactgtcccacgcagggtggccgggtagtacgccatcagtttcagacctcgagcgaaggaggctggaagaggctctcgaggccgctcagggcgaagcaaggggggctcagttacgagaagagcagctacaggcagaatgtgagcggcttcaaggcgagctgaagcaacttcaggagacccgagcccaggatctggcttcaaaccagtctgaacgcgacatggcttgggtgaagcgggtcggcgacgatcaggtgaatttggcattggcctacactgaactcactgaagagcttggccgactgcgagagctgtcctccttacagggccgtatacttaggacgctgctgcaggaacaggcccgatctggcggacagagacatagcccactaagtcagagacacagtcctgctccccagtgtccatcccccagtcctcccgctagggctgcaccaccatgccctccttgccagtcaccggtgccccaacgcagaagccccgttcccccatgcccatccccacagcagaggaggagtcccgcttcccccagctgcccgtccccagttccccaaagaagatctcccgtgcccccttcctgtcaaagtccatcacctcagcgtcggtcaccagtcccaccctcatgtccggcaccacaaccaaggccgccacctccacctccaccgggtgaacgcactctggctgagcgagcatacgctaagccaccgtctcatcacgtaaaggcgggttttcagggacgacggtcatattccgagctcgctgaaggagctgcttacgccggagcaagccctccctggctgcaggcggaagccgctacactaccaaagccacgggcatatggctccgaactgtatggtccaggccgtccattaagtcctcgtcgagcgtttgagggcattagattacggttcgaaaagcaacccagtgaggaagatgaatgggctgtgcctacctctcccccaagcccagaggtgggcacaatcagatgcgccagcttttgtgccggttttccaatccccgaatcccctgctgctacagcttacgcacacgccgagcatgcccagagttggccaagcatcaacctacttatggagacagtgggctcagacatccgaagttgccccttgtgtcagctggggttccccgtgggctacccagacgacgccctgattaaacacatcgactcccacctcgagaactcaaagatttag

SEQ ID NO: 181844 - DNA, 672 bp, Artificial Sequence
  derived and/or modified sequence
atggaatctatgtttgaggacgacattagcatccttacacaggaagcccttgggccaagcgaggtgtggctagattcccctggagacccaagtctgggtggcgacatgtgcagtgctagccacttcgcgctcattactgcctatggagacataaaggagcgtctgggcggtctggagagagaaaacgccaccctgcggcgaaggcttaaagtgtatgaaattaagtaccccctgatttcagacttcggggaagaacatggcttctccctgtatgaaattaaggacggttcactgctcgaggtggaaaaagtctcactgcagcagcggctgaaccagtttcagcacgagttacagaagaacaaagaacaagaggagcaactgggagaaatgatccaggcctatgaaaaactctgcgtggagaagtctgacctggaaactgaactgcgggaaatgagagctcttgttgaaacccacctcagacaaatttgtgggctagaacaacagctccggcaacagcaaggattgcaagatgccgctttttcaaacttgtcaccgccacggagagcacgggcagtgcttgccgtgcatcagttagcagacggcgatggcggacttcggcatcctcagttgccacccctccctgcgggttttccttgccgggtgcccggatag

SEQ ID NO: 181845 - DNA, 4132 bp, Artificial Sequence
  derived and/or modified sequence
gagagaagtacacacgcaccccctcactgcctactcctgctttcgggagcctgagtcattcctgccccctcgtagggttccccatttcccggtgcgcgggcaccctgagacagccttgggaattcgttcgcgtccccttccacctgggtccccttccccagtttgcgccccgtaacactcagccaaggacttcctgtgggtcccaggtcaggggccaaggggtcctggaccgctgccacagccccggtgcgcccgggggaggcgcttccttttcctgaactctgggatcctgcgggaggaagtggggaagttgggcgggggtgcagccgagggcgtgccgactgtggaggggccgaccctcgcgcagctctgggccttccttggggaggagctggggtgccagaggcccaggctgaggagcttggcggcgaggtatttggggaagtaaggcctggggtggagaagcgcggaggaatgggccgggcccggctgggaaggcagccctctcccatccacaggtctccctgggttctggcaggagcctgcccctgctgccggcctggcttacttgtccctacttgtcaacaccctggcagcggggtcttcacctggttccagccccttttccccaaggcggcagagaggatggggctgaggagtctgggaaggggccatgggagtccctgctgagctcggggcaggaagtttctgggttgcatcttagccggccccagggagtgcagagccagggagaggggtaccagggacaaaccctagacagacggccctgtccacggttgctcctgctctcctaggaggccccgtgtgggccgcggcccggccctcaccatggagtccatgttcgaggacgacatcagcatcctgacgcaggaggccctggggcctagtgaggtgtggctggacagtcccggagacccctcgcttgggggcgacatgtgctccgcctcccactttgccctcatcactgcttacggagacatcaaggaacggctggggggcctggagagggagaacgccaccctccgacgccgcctcaaagtctacgagatcaagtacccactgatcagtgactttggagaggagcatggcttttctctgtatgaaatcaaggatggctccctgctggaggtggagaaggtcagcctgcagcaacggctcaaccagttccagcatgagttacagaagaacaaggagcaggaagaacagcttggagagatgatccaggcctacgagaaactctgcgtggagaagagtgacttggagacagagctgagggagatgagggccctggtggagacgcacctgcgtcagatctgtggtttggagcagcagctgcggcaacagcaaggcctccaggatgcagccttctccaacctgagcccaccgccagcccccgcccctccctgcactgatttagacctgcactacctggcactgagagggggatctggcttgagtcatgcaggctggccgggctccacacccagtgtgagtgacctggagcggcggcggctagaagaggctttggaggccgcgcagggagaggcccggggggctcagctccgggaggagcagctccaggccgagtgcgagcggctgcagggggagctgaagcagctgcaggagacccgggcccaggatctggcctccaaccagtcggagcgagacatggcgtgggtgaaaagagttggggatgatcaggtgaatttggcgctggcctacaccgagctgacggaggagctgggccggcttcgggagttgagttccctacaggggagaatcttgaggactctgttgcaggaacaggcccggagtggcggccagaggcactcgccgctgtcacaacgccactccccggccccccagtgcccctccccctccccgcctgcccgagcggctcccccgtgccccccgtgccagtcccccgtcccccagcgccgctctcccgtgcccccgtgcccctcgccgcagcagcgccgctctccggcctcaccctcctgcccgtcgcccgtcccgcagcgccgctcgccggtgccgccgtcgtgccagtcccccagcccgcagcgccgttccccggtgccccccagctgcccggccccgcagccccggccaccgccgccgcccccgccgggcgagaggacgctggccgagcgcgcctacgccaagccgcccagccaccacgtgaaggccggcttccagggccgccgcagctactctgagctggcggagggcgcggcctacgcgggcgcctccccgccctggctgcaggccgaagcggccactctccccaagccccgggcctacggcagcgagctctacggccctggcaggcccctcagcccgcggcgcgccttcgagggcatccggctgcgcttcgagaagcagccgtcggaggaggacgagtgggctgtgcccaccagcccgcccagcccggaggtgggcaccatccgctgcgcctccttctgcgcgggcttccccatccccgagtcgcccgccgccaccgcctacgcccacgccgagcacgcgcagtcctggccgtccatcaacttgctgatggagacggtgggctccgacatccgcagctgccccctctgccagctgggtttccctgtcgggtacccggatgatgccctcatcaaacacattgactcccacctggagaacagcaagatctagggcaccagccccacccactggctgtttctccgtcctctcctatcacccccaaacactcactttgaatgctgcatgaatctcgtggggggtccctgcccttgcgacccccagatacctccacttgctaccgagtcaacgtgtgtgccatcttccctggtccaggcaccactcagctctggctcttcctgggaggtcagccgaggctccccccatgctcctggtttctgcttaggaggtggggacttgggctgggatggggacggcatacccctcccaggcctctccctctgcctttctgttcttaatcagggttggatccaagaaggtgtccagtgcttgggcctggggtggggggaaggtgttagaggactccaggagctcctgcacccctccccaaatgtccatctttctcagacggggctctgtctggggagcacccacaggctgcctttggggtcccagagcctgctctgtgcactgaccccagttcctccatcctgtggccagcctagggctcatggcatgggcccccactgggggagggaggcatcttgtttcttgtggttccctgcaggccagtcctgtcctcctttccctgttctgcccactctggggaatagggaggggaggagaggagaggagagggaggatcctggaggactgggaagatctagcctaaagaggcttctctgagggccagggccctacagcatgcccctacggccaggggactgtctgccagcctcccaggcccatgccctcctggtgcccctggcactgaggcacagatcgtcaaggcaggtaccccctcaacccttcttccactggagcccctgacaccacaggtgccctggagcccttgtgtgactcagcctctgttagctgggtgggtgtcatcagcccctgcctcccaggccagaacctgagaacgggcccagggtgctgtggagatcaacttcaaaagagctaaccccttcccacactccacccacccacctacatttcctctgtgaaatctacctcagagttgtaccctcagaaggacgggtaagcaggaggccagggggtccccagggctgaggtggggagccttctacggcgaaagcctgccaccccacaatgaatccaccctgctccactgcgcgcctctcccaggtctcagctctgggtggggagcagtggccgctaccgacagcgcatgtcccgctcttatccaactcttccaggccccacctccctgcacccctcccctctatagagcaggggagtgaaggggtatgtcaggcggggaaggggccaaggacacgtcattgtaccctgagcgtccccagggagtggaaatggggaagggggcctggagaggggaggcaggggcccctgtgctctctgaacaagttgaaagtccaaataaaacttacctgttccatctgtgctc

SEQ ID NO: 181846 - DNA, 3005 bp, Artificial Sequence
  derived and/or modified sequence
gagagaagtacacacgcaccccctcactgcctactcctgctttcgggagcctgagtcattcctgccccctcgtagggttccccatttcccggtgcgcgggcaccctgagacagccttgggaattcgttcgcgtccccttccacctgggtccccttccccagtttgcgccccgtaacactcagccaaggacttcctgtgggtcccaggtcaggggccaaggggtcctggaccgctgccacagccccggtgcgcccgggggaggcgcttccttttcctgaactctgggatcctgcgggaggaagtggggaagttgggcgggggtgcagccgagggcgtgccgactgtggaggggccgaccctcgcgcagctctgggccttccttggggaggagctggggtgccagaggcccaggctgaggagcttggcggcgaggtatttggggaagtaaggcctggggtggagaagcgcggaggaatgggccgggcccggctgggaaggcagccctctcccatccacaggtctccctgggttctggcaggagcctgcccctgctgccggcctggcttacttgtccctacttgtcaacaccctggcagcggggtcttcacctggttccagccccttttccccaaggcggcagagaggatggggctgaggagtctgggaaggggccatgggagtccctgctgagctcggggcaggaagtttctgggttgcatcttagccggccccagggagtgcagagccagggagaggggtaccagggacaaaccctagacagacggccctgtccacggttgctcctgctctcctaggaggccccgtgtgggccgcggcccggccctcaccatggagtccatgttcgaggacgacatcagcatcctgacgcaggaggccctggggcctagtgaggtgtggctggacagtcccggagacccctcgcttgggggcgacatgtgctccgcctcccactttgccctcatcactgcttacggagacatcaaggaacggctggggggcctggagagggagaacgccaccctccgacgccgcctcaaagtctacgagatcaagtacccactgatcagtgactttggagaggagcatggcttttctctgtatgaaatcaaggatggctccctgctggaggtggagaaggtcagcctgcagcaacggctcaaccagttccagcatgagttacagaagaacaaggagcaggaagaacagcttggagagatgatccaggcctacgagaaactctgcgtggagaagagtgacttggagacagagctgagggagatgagggccctggtggagacgcacctgcgtcagatctgtggtttggagcagcagctgcggcaacagcaaggcctccaggatgcagccttctccaacctgagcccaccacgccgagcacgcgcagtcctggccgtccatcaacttgctgatggagacggtgggctccgacatccgcagctgccccctctgccagctgggtttccctgtcgggtacccggatgatgccctcatcaaacacattgactcccacctggagaacagcaagatctagggcaccagccccacccactggctgtttctccgtcctctcctatcacccccaaacactcactttgaatgctgcatgaatctcgtggggggtccctgcccttgcgacccccagatacctccacttgctaccgagtcaacgtgtgtgccatcttccctggtccaggcaccactcagctctggctcttcctgggaggtcagccgaggctccccccatgctcctggtttctgcttaggaggtggggacttgggctgggatggggacggcatacccctcccaggcctctccctctgcctttctgttcttaatcagggttggatccaagaaggtgtccagtgcttgggcctggggtggggggaaggtgttagaggactccaggagctcctgcacccctccccaaatgtccatctttctcagacggggctctgtctggggagcacccacaggctgcctttggggtcccagagcctgctctgtgcactgaccccagttcctccatcctgtggccagcctagggctcatggcatgggcccccactgggggagggaggcatcttgtttcttgtggttccctgcaggccagtcctgtcctcctttccctgttctgcccactctggggaatagggaggggaggagaggagaggagagggaggatcctggaggactgggaagatctagcctaaagaggcttctctgagggccagggccctacagcatgcccctacggccaggggactgtctgccagcctcccaggcccatgccctcctggtgcccctggcactgaggcacagatcgtcaaggcaggtaccccctcaacccttcttccactggagcccctgacaccacaggtgccctggagcccttgtgtgactcagcctctgttagctgggtgggtgtcatcagcccctgcctcccaggccagaacctgagaacgggcccagggtgctgtggagatcaacttcaaaagagctaaccccttcccacactccacccacccacctacatttcctctgtgaaatctacctcagagttgtaccctcagaaggacgggtaagcaggaggccagggggtccccagggctgaggtggggagccttctacggcgaaagcctgccaccccacaatgaatccaccctgctccactgcgcgcctctcccaggtctcagctctgggtggggagcagtggccgctaccgacagcgcatgtcccgctcttatccaactcttccaggccccacctccctgcacccctcccctctatagagcaggggagtgaaggggtatgtcaggcggggaaggggccaaggacacgtcattgtaccctgagcgtccccagggagtggaaatggggaagggggcctggagaggggaggcaggggcccctgtgctctctgaacaagttgaaagtccaaataaaacttacctgttccatctgtgctc

SEQ ID NO: 181847 - protein, 2715 aa, Artificial Sequence
  derived and/or modified sequence
MAAAAGGGSCPGPGSARGRFPGRPRGAGGGGGRGGRGNGAERVRVALRRGGGATGPGGAEPGEDTALLRLLGLRRGLRRLRRLWAGPRVQRGRGRGRGRGWGPSRGCVPEEESSDGESDEEEFQGFHSDEDVAPSSLRSALRSQRGRAPRGRGRKHKTTPLPPPRLADVAPTPPKTPARKRGEEGTERMVQALTELLRRAQAPQAPRSRACEPSTPRRSRGRPPGRPAGPCRRKQQAVVVAEAAVTIPKPEPPPPVVPVKHQTGSWKCKEGPGPGPGTPRRGGQSSRGGRGGRGRGRGGGLPFVIKFVSRAKKVKMGQLSLGLESGQGQGQHEESWQDVPQRRVGSGQGGSPCWKKQEQKLDDEEEEKKEEEEKDKEGEEKEERAVAEEMMPAAEKEEAKLPPPPLTPPAPSPPPPLPPPSTSPPPPLCPPPPPPVSPPPLPSPPPPPAQEEQEESPPPVVPATCSRKRGRPPLTPSQRAEREAARAGPEGTSPPTPTPSTATGGPPEDSPTVAPKSTTFLKNIRQFIMPVVSARSSRVIKTPRRFMDEDPPKPPKVEVSPVLRPPITTSPPVPQEPAPVPSPPRAPTPPSTPVPLPEKRRSILREPTFRWTSLTRELPPPPPAPPPPPAPSPPPAPATSSRRPLLLRAPQFTPSEAHLKIYESVLTPPPLGAPEAPEPEPPPADDSPAEPEPRAVGRTNHLSLPRFAPVVTTPVKAEVSPHGAPALSNGPQTQAQLLQPLQALQTQLLPQALPPPQPQLQPPPSPQQMPPLEKARIAGVGSLPLSGVEEKMFSLLKRAKVQLFKIDQQQQQKVAASMPLSPGGQMEEVAGAVKQISDRGPVRSEDESVEAKRERPSGPESPVQGPRIKHVCRHAAVALGQARAMVPEDVPRLSALPLRDRQDLATEDTSSASETESVPSRSRRGKVEAAGPGGESEPTGSGGTLAHTPRRSLPSHHGKKMRMARCGHCRGCLRVQDCGSCVNCLDKPKFGGPNTKKQCCVYRKCDKIEARKMERLAKKGRTIVKTLLPWDSDESPEASPGPPGPRRGAGAGGPREEVVAHPGPEEQDSLLQRKSARRCVKQRPSYDIFEDSDDSEPGGPPAPRRRTPRENELPLPEPEEQSRPRKPTLQPVLQLKARRRLDKDALAPGPFASFPNGWTGKQKSPDGVHRVRVDFKEDCDLENVWLMGGLSVLTSVPGGPPMVCLLCASKGLHELVFCQVCCDPFHPFCLEEAERPLPQHHDTWCCRRCKFCHVCGRKGRGSKHLLECERCRHAYHPACLGPSYPTRATRKRRHWICSACVRCKSCGATPGKNWDVEWSGDYSLCPRCTQLYEKGNYCPICTRCYEDNDYESKMMQCAQCDHWVHAKCEGLSDEDYEILSGLPDSVLYTCGPCAGAAQPRWREALSGALQGGLRQVLQGLLSSKVVGPLLLCTQCGPDGKQLHPGPCGLQAVSQRFEDGHYKSVHSFMEDMVGILMRHSEEGETPDRRAGGQMKGLLLKLLESAFGWFDAHDPKYWRRSTRLPNGVLPNAVLPPSLDHVYAQWRQQEPETPESGQPPGDPSAAFQGKDPAAFSHLEDPRQCALCLKYGDADSKEAGRLLYIGQNEWTHVNCAIWSAEVFEENDGSLKNVHAAVARGRQMRCELCLKPGATVGCCLSSCLSNFHFMCARASYCIFQDDKKVFCQKHTDLLDGKEIVNPDGFDVLRRVYVDFEGINFKRKFLTGLEPDAINVLIGSIRIDSLGTLSDLSDCEGRLFPIGYQCSRLYWSTVDARRRCWYRCRILEYRPWGPREEPAHLEAAEENQTIVHSPAPSSEPPGGEDPPLDTDVLVPGAPERHSPIQNLDPPLRPDSGSAPPPAPRSFSGARIKVPNYSPSRRPLGGVSFGPLPSPGSPSSLTHHIPTVGDPDFPAPPRRSRRPSPLAPRPPPSRWASPPLKTSPQLRVPPPTSVVTALTPTSGELAPPGPAPSPPPPEDLGPDFEDMEVVSGLSAADLDFAASLLGTEPFQEEIVAAGAMGSSHGGPGDSSEEESSPTSRYIHFPVTVVSAPGLAPSATPGAPRIEQLDGVDDGTDSEAEAVQQPRGQGTPPSGPGVVRAGVLGAAGDRARPPEDLPSEIVDFVLKNLGGPGDGGAGPREESLPPAPPLANGSQPSQGLTASPADPTRTFAWLPGAPGVRVLSLGPAPEPPKPATSKIILVNKLGQVFVKMAGEGEPVPPPVKQPPLPPTISPTAPTSWTLPPGPLLGVLPVVGVVRPAPPPPPPPLTLVLSSGPASPPRQAIRVKRVSTFSGRSPPAPPPYKAPRLDEDGEASEDTPQVPGLGSGGFSRVRMKTPTVRGVLDLDRPGEPAGEESPGPLQERSPLLPLPEDGPPQVPDGPPDLLLESQWHHYSGEASSSEEEPPSPDDKENQAPKRTGPHLRFEISSEDGFSVEAESLEGAWRTLIEKVQEARGHARLRHLSFSGMSGARLLGIHHDAVIFLAEQLPGAQRCQHYKFRYHQQGEGQEEPPLNPHGAARAEVYLRKCTFDMFNFLASQHRVLPEGATCDEEEDEVQLRSTRRATSLELPMAMRFRHLKKTSKEAVGVYRSAIHGRGLFCKRNIDAGEMVIEYSGIVIRSVLTDKREKFYDGKGIGCYMFRMDDFDVVDATMHGNAARFINHSCEPNCFSRVIHVEGQKHIVIFALRRILRGEELTYDYKFPIEDASNKLPCNCGAKRCRRFLN

SEQ ID NO: 181848 - DNA, 93 bp, Artificial Sequence
  derived and/or modified sequence
atgggctctcgcaactcctcatctgccggaagcggttctggagacccctcagaaggtctccccaggagaggagccggattaagaagaagctag

SEQ ID NO: 181849 - protein, 1322 aa, Artificial Sequence
  derived and/or modified sequence
MDVFSFVKIAKLSSHRTKSSGWPPPSGTWGLSQVPPYGWEMTANRDGRDYFINHMTQAIPFDDPRLESCQIIPPAPRKVEMRRDPVLGFGFVAGSEKPVVVRSVTPGGPSEGKLIPGDQIVMINDEPVSAAPRERVIDLVRSCKESILLTVIQPYPSPKSAFISAAKKARLKSNPVKVRFSEEVIINGQVSETVKDNSLLFMPNVLKVYLENGQTKSFRFDCSTSIKDVILTLQEKLSIKGIEHFSLMLEQRTEGAGTKLLLLHEQETLTQVTQRPSSHKMRCLFRISFVPKDPIDLLRRDPVAFEYLYVQSCNDVVQERFGPELKYDIALRLAALQMYIATVTTKQTQKISLKYIEKEWGLETFLPSAVLQSMKEKNIKKALSHLVKANQNLVPPGKKLSALQAKVHYLKFLSDLRLYGGRVFKATLVQAEKRSEVTLLVGPRYGISHVINTKTNLVALLADFSHVNRIEMFSEEESLVRVELHVLDVKPITLLMESSDAMNLACLTAGYYRLLVDSRRSIFNMANKKNTATQETGPENKGKHNLLGPDWNCIPQMTTFIGEGEQEAQITYIDSKQKTVEITDSTMCPKEHRHLYIDNAYSSDGLNQQLSQPGEAPCEADYRSLAQRSLLTLSGPETLKKAQESPRGAKVSFIFGDFALDDGISPPTLGYETLLDEGPEMLEKQRNLYIGSANDMKGLDLTPEAEGIQFVENSVYANIGDVKSFQAAEGIEEPLLHDICYAENTDDAEDEDEVSCEEDLVVGEMNQPAILNLSGSSDDIIDLTSLPPPEGDDNEDDFLLRSLNMAIAAPPPGFRDSSDEEDSQSQAASFPEDKEKGSSLQNDEIPVSLIDAVPTSAEGKCEKGLDNAVVSTLGALEALSVSEEQQTSDNSGVAILRAYSPESSSDSGNETNSSEMTESSELATAQKQSENLSRMFLATHEGYHPLAEEQTEFPASKTPAGGLPPKSSHALAARPATDLPPKVVPSKQLLHSDHMEMEPETMETKSVTDYFSKLHMGSVAYSCTSKRKSKLADGEGKAPPNGNTTGKKQQGTKTAEMEEEASGKFGTVSSRDSQHLSTFNLERTAFRKDSQRWYVATEGGMAEKSGLEAATGKTFPRASGLGAREAEGKEEGAPDGETSDGSGLGQGDRFLTDVTCASSAKDLDNPEDADSSTCDHPSKLPEADESVARLCDYHLAKRMSSLQSEGHFSLQSSQGSSVDAGCGTGSSGSACATPVESPLCPSLGKHLIPDASGKGVNYIPSEERAPGLPNHGATFKELHPQTEGMCPRMTVPALHTAINTEPLFGTLRDGCHRLPKIKETTV

SEQ ID NO: 181850 - DNA, 7917 bp, Artificial Sequence
  derived and/or modified sequence
ttttccagccacaggacgaagtcttcaggctggccgcctccctcgggaacctggggcttgagccaggtgccgccctatggatgggagatgacggcaaaccgagatgggcgagactacttcatcaatcacatgacacaggcaatcccttttgacgaccctcggttagagagctgccaaatcatccctccggctcctcggaaggtggagatgagaagggaccccgtgctgggatttggttttgtggcaggcagtgaaaagccagtggtcgttcgctcagtaacaccaggtggcccctctgaaggcaagctgatcccgggagatcagattgtaatgattaatgatgaaccggtcagcgctgcacccagagagcgggtcatcgatctggtcagaagctgcaaagaatcgatactcctcactgtcattcagccttacccttctcccaaatcagcatttattagtgctgcaaaaaaggcaagattaaagtccaatcctgtcaaagtacgcttctctgaggaggtcatcatcaacggccaagtgtcggaaactgttaaggacaactcacttctttttatgccaaatgttttgaaagtctatctggaaaatgggcagaccaaatcatttcgttttgactgcagcacttccattaaggatgtcatcttaacccttcaagagaagctctccatcaaaggcattgaacacttctctctcatgctggagcagaggacagaaggggctggaacgaagctgctcttgcttcatgaacaggagactctaactcaggtgacacagaggcccagctcccataagatgagatgtcttttccgaattagcttcgtcccaaaagatccaattgaccttttaaggagagatccagttgctttcgagtatctctatgttcagagttgtaacgatgtggttcaggagcgatttgggccggagctgaaatatgacatagccctgcggctggccgcattacaaatgtacattgcaaccgttaccaccaagcaaacgcagaaaatctccctcaaatacatcgaaaaagaatggggattagagacttttcttccctctgctgtgctgcaaagcatgaaagagaagaacataaagaaagcactttcacaccttgtcaaagcaaatcaaaacttggtaccaccgggtaaaaagctctctgcactacaagccaaggtccattatctcaagttcctcagtgacctacgattgtatgggggccgtgtgttcaaggcaacattagtgcaggcagaaaagcgctcggaagtgactctcctggttgggccccggtatggcataagccatgtcatcaacaccaaaaccaatctggtggctcttttagccgactttagccacgtcaacaggatcgaaatgttttccgaggaggagagcttggtgcgggtagaactccacgtgctagatgtgaagcctatcacgcttctgatggaatcctcagatgccatgaacctggcctgcttgacggctggatactaccggctgcttgttgattccaggaggtcgatatttaacatggccaacaagaaaaacacagcgacccaggaaacaggacctgaaaacaaggggaagcataacctccttggcccagattggaactgtataccccaaatgaccacctttattggcgaaggggaacaagaagcccagataacatacatagattcaaagcagaagacggtggagatcacagacagcaccatgtgtccaaaagagcaccggcacttgtacatagacaatgcctatagttcagatggacttaaccagcagctgagccagcccggggaggccccctgtgaggcagactacagaagtctagctcagcggtccctattgaccctctcaggaccagaaactctgaagaaagcacaggaatctccgagaggagctaaagtgtcctttatttttggagacttcgccttggatgatggtattagtcccccaacccttggctatgaaacgctactagatgagggtcctgaaatgctggagaagcagagaaatctctacattggcagtgccaatgacatgaagggcctggatctcactccagaggcagagggcatccagtttgtggaaaattctgtttatgcaaacataggcgatgtgaagagcttccaggccgcggaggggatcgaggaacccctcttgcatgacatctgttatgcagaaaacactgatgacgcggaggacgaggacgaggtgagctgcgaggaggacctcgtggtgggggagatgaaccagccggccatcctcaacctgtctgggtcaagcgatgacatcattgacctcacatccctgccccctccagaaggtgatgacaatgaggatgacttcctgttgcgttccttgaacatggccattgccgcacccccacctggctttagagacagttcagatgaagaggactctcagagccaggcagcttccttccccgaggacaaggagaaaggcagcagcctgcaaaatgatgagatccccgtgtccctcattgacgctgtgcccaccagcgccgaaggcaagtgtgagaagggactggataatgccgtcgtctccacgctgggagctctagaggctctatccgtgtcagaagaacagcagaccagtgacaattcaggtgtagccatcttgcgggcttatagtcctgagtcttcgtcagactcgggcaatgaaactaactcttctgaaatgactgagagttctgaactggccacagcacaaaaacagtcagaaaacctctcccgcatgttcttggccactcacgaaggctaccacccccttgcagaagagcagaccgagttcccggcctccaagacccccgctgggggcttgcctccaaagtcctcgcacgccctggctgctaggccagcaaccgacctcccgcccaaagttgtgccttccaagcagttacttcactcagaccacatggagatggagcctgaaactatggagactaagtcggtcactgactattttagcaaactgcacatggggtcggtggcatactcctgcactagcaaaaggaaaagcaagctggccgatggtgaggggaaggcaccccctaatgggaacacaacaggaaaaaaacagcaggggaccaaaacggcagagatggaggaggaggccagtggtaaatttggtactgtgtcttcacgagacagtcaacacctgagcacttttaatctggagagaactgcctttcgcaaggacagtcaaagatggtatgtggccactgaaggtgggatggctgaaaaaagtggattagaagcagcaacagggaaaacctttccaagagcttctggtcttggggcaagggaggccgaagggaaggaagaaggagctcctgatggagaaaccagtgatggctcaggacttggtcaaggggaccgcttcttaactgacgtgacctgtgcatcttcagccaaagacttagataacccagaggacgctgactcgtccacctgcgaccatccttccaagcttcctgaggctgatgagagtgtggcccgcctttgtgactaccacttggccaagcggatgtcatcactgcaaagcgagggccatttttctctgcagagctcccaaggctcttcagtggatgcaggctgtggcacaggcagcagtggcagtgcctgtgccacacccgtggagtcgccgctctgcccctccctggggaagcacttgattcctgacgcttctgggaaaggcgtgaattacattccttcagaggagagagcccctgggcttcccaaccacggagccacctttaaggaactgcacccacagacagaagggatgtgtccacggatgacagtgcctgctctgcacacagccattaacaccgaacccctgtttggcacattgagagatggatgccatcggctccccaagattaaggaaaccacagtgtagctttgacagagcctgggaaggagagacgaggaggcatgccttcagcttggtctcaacatcctgaagctgatcccatcctgctaccatcaaacattcactcggaatcaaaggtgccaattccaaatcaagaccctaatgatttctcccaagcaaatcaggcatacggagaggctgtgagctggcggccaccggatctgagaggggggagcctcaggacacctcccagccagaaggctctgagacatagcagcagtatcctctccggatctgtcgatttggagaccttccgagagagaaccaagggtgcagtcagcttaaagtgtccaggcatcacagaagcacaggaggccagttctgaaaggcgagcagaactccccctggggaggaagctcaccaaaagtttttcccaaagctcaatgcacttgagctctgaggggaggtttcacaaaaggtccccagtggctcataaagactcaaagctgtataggacattacccttgcggaagctggagggcagcaattggagatgccggggacccttcagctattgcttcctgaaccgagggcaggatgaagatggtgaggaagaagaggagaggggagaggccaccgtccaggtctcttgcctctatagaccacagatgactcaagccatgccagaaccaagcagcccatgcctggctgtggcgattcagaagcaacgaggggagctatccagagggtcagtgctgaaggtctgggcagaagacctgcgagacccagatgacttggacttcagcaacctggcttttgatgcccggattgcaagaataaatgccctaaaggagagcacatatgcaatgcctgatgggttccttgcagcccaaaatgatgccaatgagctgctctgtctcgtcagggcaaccaaggagaagagggaggagtcacgccctgaagcgtacgaccttacactttctcagtacaagcaactgttatccattgagtccagacagttgggaagtgcctgtaggaaaatggcgatggctgagaaaagcccggaggagatgctcctagctatgacttccagctttcaagtgctctgttgcctaacagaagcttgcatgcgattagttaaagtcgtgaactcagaaacacagcggcaggaaattgtagggaagatcgatgaagtggtcataaattacatttgtctactgaaagctgccgaagcagccactggaaagaaccctggggaccctaatgttggactctcggcgcgacactcaaccaccatggccgctctcgtaagcacactgacacgttctctcaagaggcttttaaacaaataaatatggaagtcacgtcataatctacctttgcaaagccatacatgaacttttatttactttgtgtgtatgatgaacagatgtctcctttcttctctctgtatattttgttattttatataaaataggagataaaagtcacattgatgaaatgttgaaatgtactaatcagatgtattctgtttatattatacatatatatacacgtaaaagaaatatccaagaaagtgatgacatttggctatttttcatatagttaaaactccaggtatatgatgtgaaattttaaattctaccatgttagagcaaaacaatgaatcctatcccctttctttccaagtagctacttggaaaccatatcattcatatttagaagtaaaacacaaaacaaaaaagagagagaaaagaaaagaaatcacaatgtatataaaacagtacttatgttttaaaattatgatttttaagcattggaaatagcaaaaagacatttaaaattcaagaagctattatgaattactagagaatatatctgtaataaattaattttttgctcatagtatttggttactggatgctttcttccaagaatcccacatatttaatttgggtttttgctactggggctacaaattggtggggatggattctactgtgtcagcacaaatgctcttcacagtggttctagcatttaaaaaacttcccggggagaagaacagaggggatgatgggcagtttcctaggtaacacctagagttatagaatatctcattacataaaatgtatggaattaataataccaaaattaattatttgatggaaagatctgctttgactaaatgtcaaaaatctgcaaaccaaagacattatcttcccctcatcccaactcaactacgaaacttaaaattccctttagagtgataggacatttagtaaagtatttgcaaacttaaaaaaaggaacatttaatgatcatcaaaattaagtacagattcagtaatgtagaccagaccacacaccagcacctgtgagtctcatctcagatcacagctctcagcatagggcttcatgcatcaccgcctctacagaggctaaggctgccagtcaaatttggaattatagcgtagtactgggacaaaatctcaaatcttggatgttccagaaaatcagggagagatggctactgtaatcatgggagccatgagtaaatagttaagtatttattaaataaatacttaatctggattggctgataaaaatatgaaatctgaaaaaaaaaagaaagaaatggaagtggtatatttgaccagttcaagtgaaaccaatggaatgcaaagaactttccaggactgtcacatctctaaaagtaccctgcagtcataaaataaaatcgatatgtatatatgtatttcctgggtcattcagtgctcaagttacatgcactcctacttagacaggtggctccttaagaacatgatgggagtacaccaggtgcaaatatttctacttttgtagcctgctgagaaggagtcataacacagtccacaattgcaatctctctctagtcagccattccacagggactcaacaacaaaagccgcacgtggttatggatggcagcaaaggaaaggagtttaggtgtgtgttattataaataatgtttaactaaataataaaacattatttcattacaattataattataaatattggtgttttgatattgagagatattagtggtgtttactgtggaaaatcttagtaaatatcattctgtgtactaaaatcctaacctattaataggatgtgtgccctatgtcagacagtgtgctaagcatattaactatattatctcatttaatcatcacaacaatctgctggtttggacactattctctctggaggcaatatggatgagttcttacggatatggggtttggggtcagaaacatcttgattaaaattttgactctgccattttctagcccttttatgttgggaaagctactttttctagtctcaatttcctcataataaaatgaaaatcaattataagatcgatttccatagggttgtcatgagttttgagtaaaaatgtgtatgtaaagttcttaccacaatacctggcagagagtaagtattcaattaatgttagctattattatcatcataatcgttgtgttaaatatattgcccaagataatatgtgggggaatgtttgttttatatgcatattgtatcctgactgtgtgcagaacacattatgtgtattgcatatatgtaaaagaagtgtacaaggaagtggccatccttgttcaagttacgtatctagttagaacaacttcccagtccattggagttctttgagaagcctcagggaagtagctctgggtccttctaatcaacctcccattactgcgccagtaagtttctgtttcttataaataaactctttgctattcagaaaacctcaaggggcccccacattcactaagcatggggctcctaactggggtccaggtccatagagtgtaggaagaacatattagaacaatacttgtgcttatttttatctagcttttttatgtttgtgtatgttttataatggcataatagtacaatggtacatgtacataattttaaataaataaatgaatgaatg

SEQ ID NO: 181851 - DNA, 8465 bp, Artificial Sequence
  derived and/or modified sequence
gggaggcagctgcagtgctgcgaggggtgcgtgcgcgtgtgcccagctcgcctgccgtctcccggctccgtctgcgctcctcggtgcgtggggcacgagggtccgagggccgggaagccagagcagcgcctctcgcccaggcctcgctttctctggacgcccggcagtccccggggctagagcgcacggggcggggcgcgagacccgggccgcgctccccgcccccgcctcttgcgccctgcctggctccctctccattgagttttcctgcctcgggtgcctatcaatggtcctgctcggggatgcacacgcagctcgcggccggaggggggtagcagccgccgcctccaggtgcaggttctctccggccgccgccgccacccgctgtcgccgcgactcgagccccgggcgcactgaggtcttggccatggggctgcggaggctgctgttgctggcgtgagaaggggcgacggagttgtcgcgctcgggggtccccagctgcctgcatggatgtcttcagctttgtgaagattgcaaagctttcgagccacaggacgaagtcttcaggctggccgcctccctcgggaacctggggcttgagccaggtgccgccctatggatgggagatgacggcaaaccgagatgggcgagactacttcatcaatcacatgacacaggcaatcccttttgacgaccctcggttagagagctgccaaatcatccctccggctcctcggaaggtggagatgagaagggaccccgtgctgggatttggttttgtggcaggcagtgaaaagccagtggtcgttcgctcagtaacaccaggtggcccctctgaaggcaagctgatcccgggagatcagattgtaatgattaatgatgaaccggtcagcgctgcacccagagagcgggtcatcgatctggtcagaagctgcaaagaatcgatactcctcactgtcattcagccttacccttctcccaaatcagcatttattagtgctgcaaaaaaggcaagattaaagtccaatcctgtcaaagtacgcttctctgaggaggtcatcatcaacggccaagtgtcggaaactgttaaggacaactcacttctttttatgccaaatgttttgaaagtctatctggaaaatgggcagaccaaatcatttcgttttgactgcagcacttccattaaggatgtcatcttaacccttcaagagaagctctccatcaaaggcattgaacacttctctctcatgctggagcagaggacagaaggggctggaacgaagctgctcttgcttcatgaacaggagactctaactcaggtgacacagaggcccagctcccataagatgagatgtcttttccgaattagcttcgtcccaaaagatccaattgaccttttaaggagagatccagttgctttcgagtatctctatgttcagagttgtaacgatgtggttcaggagcgatttgggccggagctgaaatatgacatagccctgcggctggccgcattacaaatgtacattgcaaccgttaccaccaagcaaacgcagaaaatctccctcaaatacatcgaaaaagaatggggattagagacttttcttccctctgctgtgctgcaaagcatgaaagagaagaacataaagaaagcactttcacaccttgtcaaagcaaatcaaaacttggtaccaccgggtaaaaagctctctgcactacaagccaaggtccattatctcaagttcctcagtgacctacgattgtatgggggccgtgtgttcaaggcaacattagtgcaggcagaaaagcgctcggaagtgactctcctggttgggccccggtatggcataagccatgtcatcaacaccaaaaccaatctggtggctcttttagccgactttagccacgtcaacaggatcgaaatgttttccgaggaggagagcttggtgcgggtagaactccacgtgctagatgtgaagcctatcacgcttctgatggaatcctcagatgccatgaacctggcctgcttgacggctggatactaccggctgcttgttgattccaggaggtcgatatttaacatggccaacaagaaaaacacagcgacccaggaaacaggacctgaaaacaaggggaagcataacctccttggcccagattggaactgtataccccaaatgaccacctttattggcgaaggggaacaagaagcccagataacatacatagattcaaagcagaagacggtggagatcacagacagcaccatgtgtccaaaagagcaccggcacttgtacatagacaatgcctatagttcagatggacttaaccagcagctgagccagcccggggaggccccctgtgaggcagactacagaagtctagctcagcggtccctattgaccctctcaggaccagaaactctgaagaaagcacaggaatctccgagaggagctaaagtgtcctttatttttggagacttcgccttggatgatggtattagtcccccaacccttggctatgaaacgctactagatgagggtcctgaaatgctggagaagcagagaaatctctacattggcagtgccaatgacatgaagggcctggatctcactccagaggcagagggcatccagtttgtggaaaattctgtttatgcaaacataggcgatgtgaagagcttccaggccgcggaggggatcgaggaacccctcttgcatgacatctgttatgcagaaaacactgatgacgcggaggacgaggacgaggtgagctgcgaggaggacctcgtggtgggggagatgaaccagccggccatcctcaacctgtctgggtcaagcgatgacatcattgacctcacatccctgccccctccagaaggtgatgacaatgaggatgacttcctgttgcgttccttgaacatggccattgccgcacccccacctggctttagagacagttcagatgaagaggactctcagagccaggcagcttccttccccgaggacaaggagaaaggcagcagcctgcaaaatgatgagatccccgtgtccctcattgacgctgtgcccaccagcgccgaaggcaagtgtgagaagggactggataatgccgtcgtctccacgctgggagctctagaggctctatccgtgtcagaagaacagcagaccagtgacaattcaggtgtagccatcttgcgggcttatagtcctgagtcttcgtcagactcgggcaatgaaactaactcttctgaaatgactgagagttctgaactggccacagcacaaaaacagtcagaaaacctctcccgcatgttcttggccactcacgaaggctaccacccccttgcagaagagcagaccgagttcccggcctccaagacccccgctgggggcttgcctccaaagtcctcgcacgccctggctgctaggccagcaaccgacctcccgcccaaagttgtgccttccaagcagttacttcactcagaccacatggagatggagcctgaaactatggagactaagtcggtcactgactattttagcaaactgcacatggggtcggtggcatactcctgcactagcaaaaggaaaagcaagctggccgatggtgaggggaaggcaccccctaatgggaacacaacaggaaaaaaacagcaggggaccaaaacggcagagatggaggaggaggccagtggtaaatttggtactgtgtcttcacgagacagtcaacacctgagcacttttaatctggagagaactgcctttcgcaaggacagtcaaagatggtatgtggccactgaaggtgggatggctgaaaaaagtggattagaagcagcaacagggaaaacctttccaagagcttctggtcttggggcaagggaggccgaagggaaggaagaaggagctcctgatggagaaaccagtgatggctcaggacttggtcaaggggaccgcttcttaactgacgtgacctgtgcatcttcagccaaagacttagataacccagaggacgctgactcgtccacctgcgaccatccttccaagcttcctgaggctgatgagagtgtggcccgcctttgtgactaccacttggccaagcggatgtcatcactgcaaagcgagggccatttttctctgcagagctcccaaggctcttcagtggatgcaggctgtggcacaggcagcagtggcagtgcctgtgccacacccgtggagtcgccgctctgcccctccctggggaagcacttgattcctgacgcttctgggaaaggcgtgaattacattccttcagaggagagagcccctgggcttcccaaccacggagccacctttaaggaactgcacccacagacagaagggatgtgtccacggatgacagtgcctgctctgcacacagccattaacaccgaacccctgtttggcacattgagagatggatgccatcggctccccaagattaaggaaaccacagtgtagctttgacagagcctgggaaggagagacgaggaggcatgccttcagcttggtctcaacatcctgaagctgatcccatcctgctaccatcaaacattcactcggaatcaaaggtgccaattccaaatcaagaccctaatgatttctcccaagcaaatcaggcatacggagaggctgtgagctggcggccaccggatctgagaggggggagcctcaggacacctcccagccagaaggctctgagacatagcagcagtatcctctccggatctgtcgatttggagaccttccgagagagaaccaagggtgcagtcagcttaaagtgtccaggcatcacagaagcacaggaggccagttctgaaaggcgagcagaactccccctggggaggaagctcaccaaaagtttttcccaaagctcaatgcacttgagctctgaggggaggtttcacaaaaggtccccagtggctcataaagactcaaagctgtataggacattacccttgcggaagctggagggcagcaattggagatgccggggacccttcagctattgcttcctgaaccgagggcaggatgaagatggtgaggaagaagaggagaggggagaggccaccgtccaggtctcttgcctctatagaccacagatgactcaagccatgccagaaccaagcagcccatgcctggctgtggcgattcagaagcaacgaggggagctatccagagggtcagtgctgaaggtctgggcagaagacctgcgagacccagatgacttggacttcagcaacctggcttttgatgcccggattgcaagaataaatgccctaaaggagagcacatatgcaatgcctgatgggttccttgcagcccaaaatgatgccaatgagctgctctgtctcgtcagggcaaccaaggagaagagggaggagtcacgccctgaagcgtacgaccttacactttctcagtacaagcaactgttatccattgagtccagacagttgggaagtgcctgtaggaaaatggcgatggctgagaaaagcccggaggagatgctcctagctatgacttccagctttcaagtgctctgttgcctaacagaagcttgcatgcgattagttaaagtcgtgaactcagaaacacagcggcaggaaattgtagggaagatcgatgaagtggtcataaattacatttgtctactgaaagctgccgaagcagccactggaaagaaccctggggaccctaatgttggactctcggcgcgacactcaaccaccatggccgctctcgtaagcacactgacacgttctctcaagaggcttttaaacaaataaatatggaagtcacgtcataatctacctttgcaaagccatacatgaacttttatttactttgtgtgtatgatgaacagatgtctcctttcttctctctgtatattttgttattttatataaaataggagataaaagtcacattgatgaaatgttgaaatgtactaatcagatgtattctgtttatattatacatatatatacacgtaaaagaaatatccaagaaagtgatgacatttggctatttttcatatagttaaaactccaggtatatgatgtgaaattttaaattctaccatgttagagcaaaacaatgaatcctatcccctttctttccaagtagctacttggaaaccatatcattcatatttagaagtaaaacacaaaacaaaaaagagagagaaaagaaaagaaatcacaatgtatataaaacagtacttatgttttaaaattatgatttttaagcattggaaatagcaaaaagacatttaaaattcaagaagctattatgaattactagagaatatatctgtaataaattaattttttgctcatagtatttggttactggatgctttcttccaagaatcccacatatttaatttgggtttttgctactggggctacaaattggtggggatggattctactgtgtcagcacaaatgctcttcacagtggttctagcatttaaaaaacttcccggggagaagaacagaggggatgatgggcagtttcctaggtaacacctagagttatagaatatctcattacataaaatgtatggaattaataataccaaaattaattatttgatggaaagatctgctttgactaaatgtcaaaaatctgcaaaccaaagacattatcttcccctcatcccaactcaactacgaaacttaaaattccctttagagtgataggacatttagtaaagtatttgcaaacttaaaaaaaggaacatttaatgatcatcaaaattaagtacagattcagtaatgtagaccagaccacacaccagcacctgtgagtctcatctcagatcacagctctcagcatagggcttcatgcatcaccgcctctacagaggctaaggctgccagtcaaatttggaattatagcgtagtactgggacaaaatctcaaatcttggatgttccagaaaatcagggagagatggctactgtaatcatgggagccatgagtaaatagttaagtatttattaaataaatacttaatctggattggctgataaaaatatgaaatctgaaaaaaaaaagaaagaaatggaagtggtatatttgaccagttcaagtgaaaccaatggaatgcaaagaactttccaggactgtcacatctctaaaagtaccctgcagtcataaaataaaatcgatatgtatatatgtatttcctgggtcattcagtgctcaagttacatgcactcctacttagacaggtggctccttaagaacatgatgggagtacaccaggtgcaaatatttctacttttgtagcctgctgagaaggagtcataacacagtccacaattgcaatctctctctagtcagccattccacagggactcaacaacaaaagccgcacgtggttatggatggcagcaaaggaaaggagtttaggtgtgtgttattataaataatgtttaactaaataataaaacattatttcattacaattataattataaatattggtgttttgatattgagagatattagtggtgtttactgtggaaaatcttagtaaatatcattctgtgtactaaaatcctaacctattaataggatgtgtgccctatgtcagacagtgtgctaagcatattaactatattatctcatttaatcatcacaacaatctgctggtttggacactattctctctggaggcaatatggatgagttcttacggatatggggtttggggtcagaaacatcttgattaaaattttgactctgccattttctagcccttttatgttgggaaagctactttttctagtctcaatttcctcataataaaatgaaaatcaattataagatcgatttccatagggttgtcatgagttttgagtaaaaatgtgtatgtaaagttcttaccacaatacctggcagagagtaagtattcaattaatgttagctattattatcatcataatcgttgtgttaaatatattgcccaagataatatgtgggggaatgtttgttttatatgcatattgtatcctgactgtgtgcagaacacattatgtgtattgcatatatgtaaaagaagtgtacaaggaagtggccatccttgttcaagttacgtatctagttagaacaacttcccagtccattggagttctttgagaagcctcagggaagtagctctgggtccttctaatcaacctcccattactgcgccagtaagtttctgtttcttataaataaactctttgctattcagaaaacctcaaggggcccccacattcactaagcatggggctcctaactggggtccaggtccatagagtgtaggaagaacatattagaacaatacttgtgcttatttttatctagcttttttatgtttgtgtatgttttataatggcataatagtacaatggtacatgtacataattttaaataaataaatgaatgaatgaataaataa

SEQ ID NO: 181852 - DNA, 3939 bp, Artificial Sequence
  derived and/or modified sequence
aagtcacattctccccacaggacgaagtcttcaggctggccgcctccctcgggaacctggggcttgagccaggtgccgccctatggatgggagatgacggcaaaccgagatgggcgagactacttcatcaatcacatgacacaggcaatcccttttgacgaccctcggttagagagctgccaaatcatccctccggctcctcggaaggtggagatgagaagggaccccgtgctgggatttggttttgtggcaggcagtgaaaagccagtggtcgttcgctcagtaacaccaggtggcccctctgaaggcaagctgatcccgggagatcagattgtaatgattaatgatgaaccggtcagcgctgcacccagagagcgggtcatcgatctggtcagaagctgcaaagaatcgatactcctcactgtcattcagccttacccttctcccaaatcagcatttattagtgctgcaaaaaaggcaagattaaagtccaatcctgtcaaagtacgcttctctgaggaggtcatcatcaacggccaagtgtcggaaactgttaaggacaactcacttctttttatgccaaatgttttgaaagtctatctggaaaatgggcagaccaaatcatttcgttttgactgcagcacttccattaaggatgtcatcttaacccttcaagagaagctctccatcaaaggcattgaacacttctctctcatgctggagcagaggacagaaggggctggaacgaagctgctcttgcttcatgaacaggagactctaactcaggtgacacagaggcccagctcccataagatgagatgtcttttccgaattagcttcgtcccaaaagatccaattgaccttttaaggagagatccagttgctttcgagtatctctatgttcagagttgtaacgatgtggttcaggagcgatttgggccggagctgaaatatgacatagccctgcggctggccgcattacaaatgtacattgcaaccgttaccaccaagcaaacgcagaaaatctccctcaaatacatcgaaaaagaatggggattagagacttttcttccctctgctgtgctgcaaagcatgaaagagaagaacataaagaaagcactttcacaccttgtcaaagcaaatcaaaacttggtaccaccgggtaaaaagctctctgcactacaagccaaggtccattatctcaagttcctcagtgacctacgattgtatgggggccgtgtgttcaaggcaacattagtgcaggcagaaaagcgctcggaagtgactctcctggttgggccccggtatggcataagccatgtcatcaacaccaaaaccaatctggtggctcttttagccgactttagccacgtcaacaggatcgaaatgttttccgaggaggagagcttggtgcgggtagaactccacgtgctagatgtgaagcctatcacgcttctgatggaatcctcagatgccatgaacctggcctgcttgacggctggatactaccggctgcttgttgattccaggaggtcgatatttaacatggccaacaagaaaaacacagcgacccaggaaacaggacctgaaaacaaggggaagcataacctccttggcccagattggaactgtataccccaaatgaccacctttattggcgaaggggaacaagaagcccagataacatacatagattcaaagcagaagacggtggagatcacagacagcaccatgtgtccaaaagagcaccggcacttgtacatagacaatgcctatagttcagatggacttaaccagcagctgagccagcccggggaggccccctgtgaggcagactacagaagtctagctcagcggtccctattgaccctctcaggaccagaaactctgaagaaagcacaggaatctccgagaggagctaaagtgtcctttatttttggagacttcgccttggatgatggtattagtcccccaacccttggctatgaaacgctactagatgagggtcctgaaatgctggagaagcagagaaatctctacattggcagtgccaatgacatgaagggcctggatctcactccagaggcagagggcatccagtttgtggaaaattctgtttatgcaaacataggcgatgtgaagagcttccaggccgcggaggggatcgaggaacccctcttgcatgacatctgttatgcagaaaacactgatgacgcggaggacgaggacgaggtgagctgcgaggaggacctcgtggtgggggagatgaaccagccggccatcctcaacctgtctgggtcaagcgatgacatcattgacctcacatccctgccccctccagaaggtgatgacaatgaggatgacttcctgttgcgttccttgaacatggccattgccgcacccccacctggctttagagacagttcagatgaagaggactctcagagccaggcagcttccttccccgaggacaaggagaaaggcagcagcctgcaaaatgatgagatccccgtgtccctcattgacgctgtgcccaccagcgccgaaggcaagtgtgagaagggactggataatgccgtcgtctccacgctgggagctctagaggctctatccgtgtcagaagaacagcagaccagtgacaattcaggtgtagccatcttgcgggcttatagtcctgagtcttcgtcagactcgggcaatgaaactaactcttctgaaatgactgagagttctgaactggccacagcacaaaaacagtcagaaaacctctcccgcatgttcttggccactcacgaaggctaccacccccttgcagaagagcagaccgagttcccggcctccaagacccccgctgggggcttgcctccaaagtcctcgcacgccctggctgctaggccagcaaccgacctcccgcccaaagttgtgccttccaagcagttacttcactcagaccacatggagatggagcctgaaactatggagactaagtcggtcactgactattttagcaaactgcacatggggtcggtggcatactcctgcactagcaaaaggaaaagcaagctggccgatggtgaggggaaggcaccccctaatgggaacacaacaggaaaaaaacagcaggggaccaaaacggcagagatggaggaggaggccagtggtaaatttggtactgtgtcttcacgagacagtcaacacctgagcacttttaatctggagagaactgcctttcgcaaggacagtcaaagatggtatgtggccactgaaggtgggatggctgaaaaaagtggattagaagcagcaacagggaaaacctttccaagagcttctggtcttggggcaagggaggccgaagggaaggaagaaggagctcctgatggagaaaccagtgatggctcaggacttggtcaaggggaccgcttcttaactgacgtgacctgtgcatcttcagccaaagacttagataacccagaggacgctgactcgtccacctgcgaccatccttccaagcttcctgaggctgatgagagtgtggcccgcctttgtgactaccacttggccaagcggatgtcatcactgcaaagcgagggccatttttctctgcagagctcccaaggctcttcagtggatgcaggctgtggcacaggcagcagtggcagtgcctgtgccacacccgtggagtcgccgctctgcccctccctggggaagcacttgattcctgacgcttctgggaaaggcgtgaattacattccttcagaggagagagcccctgggcttcccaaccacggagccacctttaaggaactgcacccacagacagaagggatgtgtccacggatgacagtgcctgctctgcacacagccattaacaccgaacccctgtttggcacattgagagatggatgccatcggctccccaagattaaggaaaccacaggt

SEQ ID NO: 181853 - DNA, 3936 bp, Artificial Sequence
  derived and/or modified sequence
ttctcatcgcaccggaccaagagctctggatggcccccaccctccggcacatggggtctttcccaggtgcccccctatgggtgggagatgaccgcgaatagggatgggagagactactttattaatcatatgacccaggcaattccttttgacgatcctcgactggaatcgtgtcaaatcatcccgccagcgccgagaaaggtcgagatgcggagggatcccgttttgggatttggattcgtggctgggtctgagaagccggtcgtagtgcgctcggtgactcctggcggtccctccgaaggaaagctaatccctggtgaccagattgtgatgataaatgatgagcctgtgtctgcagccccacgagagcgtgtaatagacctagtgcgaagctgtaaggaaagcattttgctcaccgtaatccagccctacccgtcacccaaaagcgccttcataagcgcagcaaaaaaggccagacttaaatctaaccctgtaaaggttcggtttagtgaggaggtgatcatcaatgggcaagtttccgagacggtgaaagataactcgctcttattcatgcccaacgttctgaaggtgtacctagaaaacggccagacaaagagtttcaggtttgactgctccacctcaatcaaagacgtgattctgacattacaagagaagctcagtatcaagggaattgagcatttctctctcatgctcgagcagcgcacagagggggctgggactaagctgctcttactgcacgagcaagagacactgacacaggtcacccagagaccctctagccacaagatgagatgtctctttcgcatttcatttgtgccaaaggatccgattgacctgctgcgccgggatcccgtggcctttgagtatctctacgttcagtcctgcaatgacgtggtgcaagagagatttggccccgagctaaagtatgatatcgcactgcgcctggccgctctgcaaatgtacattgccacggtgacaacaaagcagacacagaagatttccttaaagtatatcgagaaggagtggggcctcgaaacatttctgccctcagccgtactccagtcaatgaaggagaagaacattaagaaagccctgagccacctagtgaaggccaatcagaacctcgtgcctcctgggaaaaagttatccgccctccaggcaaaggtccattatctcaagtttctgtcagatctgaggctgtacggcggtcgcgtgttcaaagcaacactggtgcaggcggagaaacggtcagaggttacgctgctcgtcggccctagatacggcatttcccacgtcatcaatacaaaaacaaacctggtggccctgctggctgatttctctcatgtgaataggatcgagatgtttagcgaagaagaaagtctggtgcgagttgagctccatgtactggacgtaaagcctatcacattgctgatggaatcgagcgatgcgatgaatctggcttgcctgacagctgggtattaccggctgctagttgattccaggagatccatctttaacatggcaaacaagaagaacacggctactcaggagacaggccccgagaacaagggaaagcacaatctcttaggcccggactggaactgtatcccccagatgaccacgtttatcggcgaaggggaacaggaggcacagattacctacatcgatagcaagcagaagactgtggaaatcactgactccacaatgtgtcccaaggagcaccgccatctatatattgataatgcctatagctctgatggactgaaccaacagctctcccagcccggtgaggcgccttgcgaggcggactaccggtccttagcccaacggtcgctgctgacactgagcggacctgagaccttaaaaaaggctcaggagtctccccgaggtgcaaaggtcagttttatctttggggattttgcattagacgatggcatttctcctcctaccctgggatacgagacattgcttgacgaaggccccgaaatgctcgaaaaacagcgcaatctctatattggcagcgccaacgatatgaaaggcttggacttgacgcctgaggcagaggggattcagtttgtggagaatagcgtatatgccaacatcggagacgtgaagtccttccaggctgccgagggcatcgaggagcccttgcttcatgacatctgttatgctgagaacactgacgacgctgaggatgaagatgaagtaagctgcgaggaggacctggtcgtcggagagatgaatcagccagcaatcctgaatctctcaggttcatcagatgacataattgacctgacctccctgcctccacccgaaggggacgataacgaggacgatttcttgttaaggtctctgaatatggccatcgccgctcccccacccggatttcgggattcctccgatgaagaggacagccaatcccaggcggcatcctttccagaggacaaggagaagggatcctcactacagaatgatgagatcccggtgagccttattgacgccgtgccgacctctgccgagggcaaatgcgagaagggtttagataacgctgtcgtctcaaccctaggcgcgttggaggcattatcggtgtccgaggaacagcaaacctccgataattccggagtcgctatccttcgagcctactcacccgaatcgtcctctgatagcggcaacgaaactaactccagcgaaatgactgaaagttctgaactggcgaccgcccagaagcagagtgaaaacctgagcagaatgtttttggccacacacgaaggctatcacccattggccgaggaacagaccgagtttcccgcatccaagactccggctggcggcctgccaccaaagagtagccatgccctcgcggcgagacctgcaacagacctgccccccaaggtcgtgccaagtaagcagttattacactcggaccacatggagatggaaccagaaactatggagaccaagagcgtcaccgactatttttccaagctccatatgggcagtgtggcctattcttgtacgtcgaaaaggaagtccaagttggccgacggagaagggaaagccccccctaacggaaacacgactggcaagaagcagcaagggaccaaaaccgctgaaatggaggaagaagcatctggaaagttcggtaccgtgagttcacgtgactcacagcacctcagtacattcaacctggaaaggacggctttccgcaaggattctcagaggtggtacgtggctacggagggtgggatggctgagaagtccggtctagaggccgctaccggaaagacctttccacgggcatcgggcctgggcgcgagggaggctgaaggcaaggaagagggagccccagatggcgaaacctcagatggctcaggtttgggccaaggtgatagattcctcacagacgttacttgcgcctcttctgctaaagatcttgataatcctgaagatgccgactcctcaacctgtgaccatccctccaaacttcctgaggccgatgaatctgtagcacggctgtgcgattaccatctcgccaagaggatgagttctttgcaaagcgagggccacttctcattgcagtcctctcaagggtcctccgtggatgcaggttgtgggaccggtagcagcgggtcagcatgcgcgacacccgtagagtcaccactgtgcccttcgcttggtaaacatctgattcctgacgcaagtggaaagggcgtcaactacatcccttctgaggagcgagctcctggactgcctaatcatggtgcaacctttaaagagttacatccacagacagaagggatgtgccctcgaatgacagttcctgctttgcataccgccatcaacactgagccactgtttggaactctccgggacggatgccatcgcctcccaaaaattaaagagaccaccgtgtag

SEQ ID NO: 181854 - DNA, 3969 bp, Artificial Sequence
  derived and/or modified sequence
atggacgtgttcagcttcgtcaaaatcgctaagctgtcctctcacagaactaaatcttctggatggcctcccccatctggtacgtggggtctgtctcaagtgccaccctacgggtgggagatgacagccaacagggatggaagagactattttatcaaccacatgacacaggccatccccttcgacgatcctcgcctggagtcatgccagatcattcctccggctccaagaaaagtggagatgcgccgagaccctgtgcttgggtttgggttcgtggcaggatccgagaagcccgtggtagtacggtctgtgacgccgggggggccgtccgagggaaagctcattcccggcgaccagatcgtaatgattaatgacgagccagtcagcgcggcccccagggagagggtgattgacttggtccggtcatgtaaggaaagtatcctgcttacggtaatccagccctatccgtcccctaaatcagcatttatcagcgctgccaagaaggcccggctgaaatccaacccagtaaaggtgaggttctcagaggaagtcattattaacggtcaggtgagtgagaccgtgaaggataacagccttctctttatgccgaacgttttgaaggtctaccttgagaatgggcagaccaaatcatttcgttttgattgcagtacatcaatcaaagatgtgattctgacattgcaggagaagttatccataaaagggatcgagcacttcagcctcatgctggagcagcgaacagaaggggctggtaccaaattactgctcttacacgagcaggagacacttacacaggtgacccagcgcccttcttctcataagatgcgatgtctgtttaggattagttttgtccctaaggatcctattgacctcctgcgccgggatcctgtcgctttcgagtacctgtacgtccagagctgcaacgacgtcgtgcaagagaggtttggtcccgaacttaagtatgacattgccctgaggttggccgcattacagatgtacatcgctactgtcaccaccaagcagacccaaaagatctccctgaaatacatagagaaggagtggggtctggaaaccttcctaccctctgccgtgttgcaatcaatgaaagagaaaaatatcaagaaggcgttgtctcacctcgtgaaagcgaaccagaacctggtcccacctggtaaaaagctcagtgctctgcaggctaaagtgcactatttgaagtttctttcagatttgcggctgtatggggggcgggtgtttaaagcaacactggttcaggccgagaagcgttccgaggtcacgttgctcgtgggccctagatatggaattagccatgttataaataccaaaacaaacctcgtcgcgctgctggccgactttagccacgtgaataggattgagatgttttcagaggaagaaagtttagtgagagtcgaattgcatgtgctcgacgtgaagcccattacactgctgatggaaagctctgatgctatgaacctggcatgcctaaccgcgggatattatagactcctagtagacagtagacgctctatctttaatatggccaacaaaaaaaatacggcaacccaggaaacggggcctgagaataaaggaaaacacaacctgcttggaccagactggaactgcatcccacagatgaccacctttatcggagagggcgaacaggaagcccagattacatacattgatagtaagcagaagaccgtcgagattacggactctaccatgtgtccaaaggaacaccgccacctctacatcgataacgcctactcttccgacggacttaaccagcagctgagtcagcccggcgaagcaccatgtgaggccgactatcggtccctcgcccaacggagcctgttgaccttatctggtccagaaacactgaagaaagctcaggagtctccgagaggcgcaaaagtctctttcatcttcggagattttgcactcgatgatggaatcagtccgcccaccctgggctatgagactttgcttgacgaaggaccagagatgcttgagaagcagcggaatctgtatatcgggtctgccaatgacatgaaagggttggatctcactcccgaggccgaaggtatccagtttgtggagaacagtgtgtatgcgaatattggagacgtgaaaagctttcaagccgccgagggtattgaagagcctttgcttcatgacatatgctacgctgagaacaccgacgacgccgaggacgaggacgaagtatcttgtgaggaagacctggttgttggagaaatgaaccagcctgccattctgaatctgagcggctctagtgacgacatcatcgaccttacctccctgcctccacctgaaggggacgataatgaggatgatttcctcctgaggagtcttaatatggcaattgccgcgccccctcccggatttagagacagcagtgatgaggaggactcacagtcccaggctgcctcgttccccgaggataaggagaaggggagctccttgcagaacgacgaaatacctgttagtctgatcgatgctgtgccaacctccgccgagggaaaatgcgaaaaaggtctggataatgccgtggtatccaccttgggggctttggaggcactgagtgtgagcgaggaacagcagacttcagacaactcaggcgtggctatactgagggcctacagccccgagagtagttccgactcaggcaacgaaaccaactcctcggagatgactgagagcagcgagctggcgactgcccaaaagcagtccgaaaatctctcccggatgtttctggctacacacgaggggtaccaccctctggccgaggagcagaccgagttcccggcaagcaagacccctgccggggggttgccgccaaagtcaagtcatgcattggcagcacggccagccactgacctgcctccaaaggtggtccccagcaaacagctccttcactcggatcatatggagatggaaccagaaaccatggagacaaaatcagtgactgactacttttctaaactccacatgggatccgtcgcttatagctgcacctcaaaacggaaatcaaagctggccgacggagaagggaaggcccctcctaatggaaacacgacagggaagaaacagcagggaactaagaccgctgagatggaagaggaggcttctgggaaatttgggacggtgtcctccagagattcacagcatctgagcacctttaaccttgaaagaactgcgttccgcaaagactctcaacggtggtatgtggctacggaggggggcatggcagagaagtcaggtctggaggctgcgaccggtaaaacttttccccgagcaagcggactaggtgcaagagaagctgaaggtaaagaagagggtgctcctgacggagaaaccagcgacgggagcgggcttggccagggcgaccgatttttaaccgatgtcacctgcgcttcttctgctaaagatttagataaccctgaagatgcggactcctccacttgcgatcacccgtcgaaactcccagaggccgacgaatcggtggctcgtctttgtgactaccatttggcgaagagaatgagttctctgcagtcagaaggtcacttcagcctgcaaagctcgcaaggctcaagtgtggatgccggttgcggcaccggatcaagtggatccgcctgtgccaccccagtggagtcaccactttgtccatccctcggcaagcacctcatcccagatgctagtggaaagggcgttaactatatcccttctgaggaaagagctccgggcttgcctaaccatggggctacctttaaagagctgcatccccagacagaggggatgtgtccccggatgaccgtaccggcactccacacggccataaatacggagccattgttcggcactcttagggatgggtgtcatcgactgcccaagattaaggaaacaacagtatag

SEQ ID NO: 181855 - DNA, 3942 bp, Artificial Sequence
  derived and/or modified sequence
aaatcccactctccgcacagaaccaagtcttcggggtggcctcctcccagcggaacctggggattatcccaagtgcctccttacggctgggagatgacagccaatagggatgggagggactactttatcaaccatatgacacaggcaatccccttcgacgaccctcggctggagagctgccaaatcatacctccagccccacgaaaagttgagatgagacgggacccggttcttggcttcggcttcgtcgccggctctgaaaagccagttgtggttcgctctgtcaccccgggtggacccagcgaaggcaagctgatccctggagatcagatcgttatgattaacgacgaaccagtcagcgccgcaccaagagagagggtgatcgacctagttcgctcctgtaaggagtccatattgttgactgtaattcagccatacccctcgcccaagagcgcatttatctccgcggccaaaaaggcccgtctgaaatccaatccggtgaaggtaaggtttagtgaggaggtgattattaatggccaggtgtctgaaactgtgaaggacaattcactgctgttcatgccaaatgtgcttaaggtatatctggaaaacggccagactaaaagctttagattcgactgttctacttctatcaaggacgtgattctaaccttgcaggaaaagcttagcattaaaggtatcgagcacttttcacttatgcttgagcagcggacagaaggcgccggcaccaaactgctactgcttcacgagcaagagaccctgacacaggtgacccagcgtccgagcagccacaaaatgcggtgtctcttccggatctcattcgttccgaaggacccgatcgatttgctgcgccgggacccagtagcgtttgaatacctgtacgtgcagtcctgtaacgatgtcgtacaggagagatttggtcccgagctcaagtacgacatcgccctgcggctggcagccctgcagatgtatatcgccaccgtcactactaagcagacacaaaagatcagccttaaatacattgagaaagagtggggtctggagacgtttctgccgtctgctgttttgcagtccatgaaagagaagaacataaagaaggccctgagccatctagtaaaggctaaccagaacctcgtaccaccggggaagaagctgtctgcactgcaggcaaaggtacactacttgaagttcctctcggatttgagactgtatgggggacgcgttttcaaggctactttggtgcaggctgaaaaaagaagcgaggttacgctactcgtgggcccccgatatgggatcagtcacgtgattaataccaagaccaatttggttgctctgcttgctgatttttcgcatgtgaataggattgagatgttctctgaagaagaaagcctagtgagagtcgagctgcatgtgctggacgtgaagccaatcactctcctcatggagtcgagtgatgctatgaatctggcctgcctgacagccggttactatcgcctgctcgtggactcacgacgttccatttttaacatggcaaataaaaaaaacacggcaacccaggaaacaggccctgagaacaaaggaaagcacaacctgctggggcctgattggaattgtattccccaaatgaccacattcattggcgagggggagcaggaggctcaaataacgtatattgacagcaagcagaaaacagtagagataaccgactctacaatgtgtcccaaagagcacaggcatctctacattgataacgcgtattcgagtgatgggttgaaccaacagctctcacaacctggggaggccccttgtgaggcagactacaggagcctagcacagcggtctttgctcactttgtcaggtccagaaacactcaagaaagcgcaagaatcaccacggggggccaaggtgtcattcatctttggcgacttcgccctggacgacggtatcagccctccaacactcggttacgaaaccctactagacgaagggccagagatgctggaaaagcagaggaatctttacatcgggtccgccaatgatatgaaaggtctggaccttactccagaggctgagggcatccaatttgtagaaaattccgtctatgctaatataggcgacgttaagtccttccaagccgcggaaggcattgaggaacccctccttcatgacatctgttatgcagagaatactgatgacgcagaagatgaagatgaagtatcttgcgaggaggatttagtggtaggggagatgaaccagcctgctattttaaacctgagtggaagttcagacgacattatcgaccttacatctctgccacccccagagggagacgataatgaggatgattttctgcttaggtctctgaacatggccatagccgccccaccacccggattccgtgacagctccgatgaagaagattcccagtcacaagctgctagctttcccgaagacaaggaaaaaggatcctctctgcagaacgatgagatacccgtgtccctgatcgacgcagtgccgacttctgccgaggggaagtgcgaaaagggtcttgacaacgccgtggtcagtacattgggagctttggaggcgctcagcgtcagcgaggaacaacagacatccgacaacagcggagtagctatcctccgcgcttactctcctgagagtagttcagacagcggtaatgaaacaaatagctccgaaatgacagaatcttctgagctggcaaccgcgcaaaagcaaagcgaaaacctgtcccgcatgttcctggcaacgcatgagggatatcatcccttagccgaagagcagaccgagtttcctgcctccaagacaccagctggtggtctgccacccaaatctagtcacgcacttgccgcacggccagctaccgacctgccgcctaaggtagtgccgtctaagcagttgctgcacagcgatcatatggagatggagccggaaacgatggagactaagtcagtcacagattatttcagcaaacttcacatgggcagtgttgcttactcgtgcacttcaaagcgcaaatctaaattagcagatggcgagggcaaagcacctcctaacggtaatacaactggaaagaagcagcagggaacaaaaactgccgagatggaggaggaagcctcgggaaagtttggcacagttagttccagagattcacagcacctaagtacctttaaccttgaacgcactgcctttagaaaggacagccagcggtggtacgtagccacagaagggggaatggcagagaaatcgggactcgaggcggcgacaggcaaaaccttcccaagagccagcggcctgggtgcccgagaagcagagggtaaggaggagggtgcacctgatggcgagacttcagatggttcaggactgggccagggagaccggttcctgaccgacgttacctgcgcctcttccgctaaagatttggacaacccagaggatgccgacagcagcacctgcgaccaccccagcaaactaccagaggccgacgagtccgtcgcacggctgtgcgactatcacctcgccaaaagaatgtctagcctacagagcgaaggtcacttttcactccagtcttcccagggttcctccgtggatgcgggttgcggcactggaagcagtggatctgcatgtgcaacccccgtggagtcacctctgtgtccaagtctggggaaacacctgatcccggatgcctcaggcaagggagtcaattacattcccagtgaagaacgtgcgccgggtctgcccaaccatggggctaccttcaaggagctgcaccctcaaacagagggcatgtgcccacggatgaccgtgccggcccttcacaccgccatcaacacggaaccgctgtttggaaccctgcgtgatggatgtcatcggctgcccaagatcaaggagactactggatag

SEQ ID NO: 181856 - DNA, 3936 bp, Artificial Sequence
  derived and/or modified sequence
ttcagcagccacaggaccaagagcagcggctggcccccaccttctggcacctggggcctgagccaggtgcccccctacggctgggagatgacagccaacagagatggccgggactacttcatcaaccacatgacccaggccatcccctttgatgacccccggctggagagctgccagatcatccccccagcccccaggaaggtggagatgagaagagatcctgtgctgggcttcggctttgtggccggcagcgagaagcctgtggtggtgcgctctgtgaccccaggcggccccagcgagggcaagctgatccctggggaccagatcgtgatgatcaatgatgagcctgtgtctgctgccccccgggagagggtcatcgacctggtgcgcagctgcaaggagagcatcctgctgaccgtcatccagccctaccccagccccaagagcgccttcatctctgctgccaagaaggcccggctgaagagcaaccctgtgaaggtgcgcttcagcgaggaggtgatcatcaatggccaggtgtctgagaccgtgaaggacaacagcctgctcttcatgcccaacgtgctgaaggtgtacctggagaatggccagaccaagagcttccgctttgactgcagcaccagcatcaaggatgtgatcctgaccctgcaggagaagctgagcatcaagggcatcgagcacttcagcctgatgctggagcagaggacagagggcgccggcaccaagctgctgctgctgcacgagcaggagaccctgacccaggtgacccagaggcccagcagccacaagatgcgctgcctcttccgcatcagctttgtgcccaaggaccccatcgacctgctgcggcgggaccctgtggcctttgagtacctgtatgtgcagagctgcaatgatgtggtgcaggagcgcttcggccctgagctgaagtatgacatcgccctgcggctggccgccctgcagatgtacatcgccaccgtgaccaccaagcagacccagaagatcagcctgaagtacatcgagaaggagtggggcctggagaccttcctgcccagcgctgtgctgcagagcatgaaggagaagaacatcaagaaggccctgagccacctggtgaaggccaaccagaacctggtgcccccaggcaagaagctgagcgccctgcaggccaaggtgcactacctgaagttcctgagtgacctgcggctgtatggaggccgggtcttcaaggccaccctggtgcaggccgagaagaggtctgaggtgaccctgctggtgggccccaggtatggcatcagccacgtgatcaacaccaagaccaacctggtggccctgctggccgacttcagccacgtgaacagaattgagatgttttctgaggaggagagcctggtgcgggtggagctgcacgtgctggatgtgaagcccatcaccctgctgatggagagcagtgatgccatgaacctggcctgcctgacagctggctactaccgcctgctggtggacagccgccgcagcatcttcaacatggccaacaagaagaacacagccacccaggagactggacctgagaacaagggcaagcacaacctgctgggccctgactggaactgcatcccccagatgaccaccttcatcggggagggggagcaggaggcccagatcacctacatcgacagcaagcagaagacagtggagatcacagacagcaccatgtgccccaaggagcaccgccacctgtacatcgacaatgcctacagcagtgatggcctgaaccagcagctgagccagcccggggaggccccctgtgaggccgactaccgcagcctggcccagaggagcctgctgaccctgagcggccctgagaccctgaagaaggcccaggagagccccaggggggccaaggtgtccttcatctttggagactttgccctggatgatggcatcagcccccccaccctgggctatgagaccctgctggatgagggccctgagatgctggagaagcagaggaacctgtacatcggcagcgccaatgacatgaagggcctggacctgaccccagaggccgagggcatccagtttgtggagaacagcgtgtatgccaacattggagatgtgaagagcttccaggccgctgagggcatcgaggagcccctgctgcatgacatctgctacgccgagaacacagatgatgctgaagatgaagatgaggtgtcctgtgaggaggacctggtggtgggggagatgaaccagcctgccatcctgaacctgagcggcagcagtgatgacatcatcgacctgaccagcctgcccccaccagaaggagatgacaatgaagatgacttcctgctgcggagcctgaacatggccatcgccgcccctcctcctggcttccgggacagcagtgatgaggaggacagccagagccaggccgccagcttccctgaggacaaggagaagggcagcagcctgcagaatgatgagatccctgtgtccctgattgatgctgtgcccaccagcgctgagggcaaatgtgagaagggcctggacaatgctgtggtgtccaccctgggcgccctggaggccctgtctgtgtctgaggagcagcagaccagtgacaacagcggcgtggccatcctgcgggcctacagccctgagagcagcagtgacagcggaaatgagaccaacagcagcgagatgacagagagcagcgagctggccacagcccagaagcagagcgagaacctgagcaggatgttcctggccacccatgagggctaccaccccctggccgaggagcagacagagttccctgccagcaagaccccagctgggggcctgccccccaagagcagccacgccctggccgcccggcctgccacagacctgccccccaaggtggtgcccagcaagcagctgctgcacagcgaccacatggagatggagcctgagaccatggagaccaagtctgtgacagactacttcagcaagctgcacatgggctctgtggcctacagctgcaccagcaagaggaagagcaagctggctgatggagagggcaaggccccacccaacggcaacaccaccgggaagaagcagcagggcaccaagacagctgagatggaggaggaggccagcggcaagtttggcaccgtgagcagccgggacagccagcacctgagcaccttcaacctggagaggacagccttcaggaaggacagccagcgctggtacgtggccacagagggcggcatggccgagaagagcggcctggaggccgccaccgggaagaccttcccccgggccagcggcctgggcgcccgggaggccgagggcaaggaggagggcgccccagatggagagaccagtgatggcagcggcctgggccagggcgaccgcttcctgacagatgtgacctgtgccagcagcgccaaggacctggacaacccagaagatgctgacagcagcacctgtgaccaccccagcaagctgcctgaggctgatgaatctgtggcccggctgtgtgactaccacctggccaagaggatgagcagcctgcagagcgagggccacttcagcctgcagagcagccagggcagctctgtggatgctggctgcggcaccggcagcagcggcagcgcctgtgccacccctgtggagagccccctgtgccccagcctgggcaagcacctgatcccagatgccagcgggaaaggagtgaactacatccccagcgaggagcgggcccctggcctgcccaaccacggggccaccttcaaggagctgcacccccagacagagggcatgtgccccaggatgacagtgcctgccctgcacacagccatcaacacagagcccctgtttggcaccctgagagatggctgccaccggctgcccaagatcaaggagaccaccgtgtag

SEQ ID NO: 181857 - DNA, 3969 bp, Artificial Sequence
  derived and/or modified sequence
atggatgtgttctcctttgtgaagatcgccaagctgagcagccacaggaccaagagcagcggctggcccccacccagcggcacctggggcctgagccaggtgcccccctacggctgggagatgacagccaacagagatggccgggactacttcatcaaccacatgacccaggccatcccctttgatgacccccggctggagagctgccagatcatccccccagcccccaggaaggtggagatgaggcgggaccctgtgctgggctttggatttgtggccggcagcgagaagcctgtggtggtgcgctctgtgacccctgggggccccagcgagggcaagctgatccctggggaccagatcgtgatgatcaatgatgagcctgtgtctgctgccccccgggagcgggtgattgacctggtgcgcagctgcaaggagagcatcctgctgaccgtcatccagccctaccccagccccaagagcgccttcatctctgctgccaagaaggcccggctgaagagcaaccctgtgaaggtgcgcttcagcgaggaggtgatcatcaatggccaggtgtctgaaacagtgaaggacaacagcctgctcttcatgcccaacgtgctgaaggtgtacctggagaatggccagaccaagagcttccgctttgactgcagcaccagcatcaaggatgtgatcctgaccctgcaggagaagctgagcatcaagggcatcgagcacttcagcctgatgctggagcagaggacagaaggagctggcaccaagctgctgctgctgcacgagcaggagaccctgacccaggtgacccagaggcccagcagccacaagatgcgctgcctcttccgcatcagctttgtgcccaaggaccccatcgacctgctgcggcgggaccctgtggcctttgagtacctgtatgtgcagagctgcaatgatgtggtgcaggagagatttggacctgagctgaagtatgacatcgccctgcggctggccgccctgcagatgtacatcgccaccgtgaccaccaagcagacccagaagatcagcctgaagtacatcgagaaggagtggggcctggagaccttcctgcccagcgctgtgctgcagagcatgaaggagaagaacatcaagaaggccctgagccacctggtgaaggccaaccagaacctggtgcccccaggcaagaagctgagcgccctgcaggccaaggtgcactacctgaagttcctgagtgacctgcggctgtatggaggccgggtcttcaaggccaccctggtgcaggccgagaagaggtctgaggtgaccctgctggtgggccccaggtatggcatcagccacgtgatcaacaccaagaccaacctggtggccctgctggccgacttcagccacgtgaaccgcatcgagatgttcagcgaggaggagagcctggtgcgggtggagctgcacgtgctggatgtgaagcccatcaccctgctgatggagagcagtgatgccatgaacctggcctgcctgacagctggctactaccgcctgctggtggacagcagaagaagcatcttcaacatggccaacaagaagaacacagccacccaggagaccggcccagaaaataaaggcaagcacaacctgctgggccctgactggaactgcatcccccagatgaccaccttcatcggggagggggagcaggaggcccagatcacctacatcgacagcaagcagaagacagtggagatcacagacagcaccatgtgccccaaggagcaccgccacctgtacatcgacaatgcctacagcagtgatggcctgaaccagcagctgagccagcctggagaggccccctgtgaggccgactaccgcagcctggcccagaggagcctgctgaccctgagcggccctgagaccctgaagaaggcccaggagagccccaggggggccaaggtgtccttcatctttggagactttgccctggatgatggcatcagcccccccaccctgggctatgagaccctgctggatgagggccctgagatgctggagaagcagaggaacctgtacatcggcagcgccaatgacatgaagggcctggacctgaccccagaggccgagggcatccagtttgtggagaacagcgtgtatgccaacattggagatgtgaagagcttccaggccgctgagggcatcgaggagcccctgctgcatgacatctgctacgcagaaaatacagatgatgctgaagatgaagatgaggtgtcctgtgaggaggacctggtggtgggggagatgaaccagcctgccatcctgaacctgagcggcagcagtgatgacatcatcgacctgaccagcctgcccccaccagaaggagatgacaatgaagatgacttcctgctgcggagcctgaacatggccatcgccgcccctcctcctggcttccgggacagcagtgatgaggaggacagccagagccaggccgccagcttccctgaggacaaggagaagggcagcagcctgcagaatgatgagatccctgtgtccctgattgatgctgtgcccaccagcgctgagggcaaatgtgagaagggcctggacaatgctgtggtgtccaccctgggcgccctggaggccctgtctgtgtctgaggagcagcagaccagtgacaacagcggcgtggccatcctgcgggcctacagccctgagagcagcagtgacagcggaaatgagaccaacagcagcgagatgacagagagcagcgagctggccacagcccagaagcagagcgagaacctgagcaggatgttcctggccacccatgagggctaccaccccctggccgaggagcagacagagttccctgccagcaagaccccagctgggggcctgccccccaagagcagccacgccctggccgcccggcctgccacagacctgccccccaaggtggtgcccagcaagcagctgctgcacagcgaccacatggagatggagcctgagaccatggagaccaagtctgtgacagactacttcagcaagctgcacatgggctctgtggcctacagctgcaccagcaagaggaagagcaagctggctgatggagagggcaaggcccccccaaatggaaacaccaccgggaagaagcagcagggcaccaagacagctgagatggaggaggaggccagcggcaagtttggaacagtgagcagccgggacagccagcacctgagcaccttcaacctggagaggacagccttcaggaaggacagccagcgctggtacgtggccacagaaggaggcatggccgagaagagcggcctggaggccgccaccgggaagaccttcccccgggccagcggcctgggcgcccgggaggccgagggcaaggaggagggcgccccagatggagagaccagtgatggcagcggcctgggccagggcgaccgcttcctgacagatgtgacctgtgccagcagcgccaaggacctggacaacccagaagatgctgacagcagcacctgtgaccaccccagcaagctgcctgaggctgatgagagcgtggcccggctgtgtgactaccacctggccaagaggatgagcagcctgcagagcgagggccacttcagcctgcagagcagccagggcagctctgtggatgctggctgcggcaccggcagcagcggcagcgcctgtgccacccctgtggagagccccctgtgccccagcctgggcaagcacctgatcccagatgccagcggcaagggcgtgaactacatccccagcgaggagcgggcccctggcctgcccaaccacggggccaccttcaaggagctgcacccccagacagagggcatgtgccccaggatgacagtgcctgccctgcacacagccatcaacacagagcccctgtttggcaccctgagagatggctgccaccggctgcccaagatcaaggagaccaccgtgtag

SEQ ID NO: 181858 - DNA, 3942 bp, Artificial Sequence
  derived and/or modified sequence
aagagccacagcccccacaggaccaagagcagcggctggcccccaccttctggcacctggggcctgagccaggtgcccccctacggctgggagatgacagccaacagagatggccgggactacttcatcaaccacatgacccaggccatcccctttgatgacccccggctggagagctgccagatcatccccccagcccccaggaaggtggagatgagaagagatcctgtgctgggcttcggctttgtggccggcagcgagaagcctgtggtggtgcgctctgtgaccccaggcggccccagcgagggcaagctgatccctggggaccagatcgtgatgatcaatgatgagcctgtgtctgctgccccccgggagagggtcatcgacctggtgcgcagctgcaaggagagcatcctgctgaccgtcatccagccctaccccagccccaagagcgccttcatctctgctgccaagaaggcccggctgaagagcaaccctgtgaaggtgcgcttcagcgaggaggtgatcatcaatggccaggtgtctgagaccgtgaaggacaacagcctgctcttcatgcccaacgtgctgaaggtgtacctggagaatggccagaccaagagcttccgctttgactgcagcaccagcatcaaggatgtgatcctgaccctgcaggagaagctgagcatcaagggcatcgagcacttcagcctgatgctggagcagaggacagagggcgccggcaccaagctgctgctgctgcacgagcaggagaccctgacccaggtgacccagaggcccagcagccacaagatgcgctgcctcttccgcatcagctttgtgcccaaggaccccatcgacctgctgcggcgggaccctgtggcctttgagtacctgtatgtgcagagctgcaatgatgtggtgcaggagcgcttcggccctgagctgaagtatgacatcgccctgcggctggccgccctgcagatgtacatcgccaccgtgaccaccaagcagacccagaagatcagcctgaagtacatcgagaaggagtggggcctggagaccttcctgcccagcgctgtgctgcagagcatgaaggagaagaacatcaagaaggccctgagccacctggtgaaggccaaccagaacctggtgcccccaggcaagaagctgagcgccctgcaggccaaggtgcactacctgaagttcctgagtgacctgcggctgtatggaggccgggtcttcaaggccaccctggtgcaggccgagaagaggtctgaggtgaccctgctggtgggccccaggtatggcatcagccacgtgatcaacaccaagaccaacctggtggccctgctggccgacttcagccacgtgaacagaattgagatgttttctgaggaggagagcctggtgcgggtggagctgcacgtgctggatgtgaagcccatcaccctgctgatggagagcagtgatgccatgaacctggcctgcctgacagctggctactaccgcctgctggtggacagccgccgcagcatcttcaacatggccaacaagaagaacacagccacccaggagactggacctgagaacaagggcaagcacaacctgctgggccctgactggaactgcatcccccagatgaccaccttcatcggggagggggagcaggaggcccagatcacctacatcgacagcaagcagaagacagtggagatcacagacagcaccatgtgccccaaggagcaccgccacctgtacatcgacaatgcctacagcagtgatggcctgaaccagcagctgagccagcccggggaggccccctgtgaggccgactaccgcagcctggcccagaggagcctgctgaccctgagcggccctgagaccctgaagaaggcccaggagagccccaggggggccaaggtgtccttcatctttggagactttgccctggatgatggcatcagcccccccaccctgggctatgagaccctgctggatgagggccctgagatgctggagaagcagaggaacctgtacatcggcagcgccaatgacatgaagggcctggacctgaccccagaggccgagggcatccagtttgtggagaacagcgtgtatgccaacattggagatgtgaagagcttccaggccgctgagggcatcgaggagcccctgctgcatgacatctgctacgccgagaacacagatgatgctgaagatgaagatgaggtgtcctgtgaggaggacctggtggtgggggagatgaaccagcctgccatcctgaacctgagcggcagcagtgatgacatcatcgacctgaccagcctgcccccaccagaaggagatgacaatgaagatgacttcctgctgcggagcctgaacatggccatcgccgcccctcctcctggcttccgggacagcagtgatgaggaggacagccagagccaggccgccagcttccctgaggacaaggagaagggcagcagcctgcagaatgatgagatccctgtgtccctgattgatgctgtgcccaccagcgctgagggcaaatgtgagaagggcctggacaatgctgtggtgtccaccctgggcgccctggaggccctgtctgtgtctgaggagcagcagaccagtgacaacagcggcgtggccatcctgcgggcctacagccctgagagcagcagtgacagcggaaatgagaccaacagcagcgagatgacagagagcagcgagctggccacagcccagaagcagagcgagaacctgagcaggatgttcctggccacccatgagggctaccaccccctggccgaggagcagacagagttccctgccagcaagaccccagctgggggcctgccccccaagagcagccacgccctggccgcccggcctgccacagacctgccccccaaggtggtgcccagcaagcagctgctgcacagcgaccacatggagatggagcctgagaccatggagaccaagtctgtgacagactacttcagcaagctgcacatgggctctgtggcctacagctgcaccagcaagaggaagagcaagctggctgatggagagggcaaggccccacccaacggcaacaccaccgggaagaagcagcagggcaccaagacagctgagatggaggaggaggccagcggcaagtttggcaccgtgagcagccgggacagccagcacctgagcaccttcaacctggagaggacagccttcaggaaggacagccagcgctggtacgtggccacagagggcggcatggccgagaagagcggcctggaggccgccaccgggaagaccttcccccgggccagcggcctgggcgcccgggaggccgagggcaaggaggagggcgccccagatggagagaccagtgatggcagcggcctgggccagggcgaccgcttcctgacagatgtgacctgtgccagcagcgccaaggacctggacaacccagaagatgctgacagcagcacctgtgaccaccccagcaagctgcctgaggctgatgaatctgtggcccggctgtgtgactaccacctggccaagaggatgagcagcctgcagagcgagggccacttcagcctgcagagcagccagggcagctctgtggatgctggctgcggcaccggcagcagcggcagcgcctgtgccacccctgtggagagccccctgtgccccagcctgggcaagcacctgatcccagatgccagcgggaaaggagtgaactacatccccagcgaggagcgggcccctggcctgcccaaccacggggccaccttcaaggagctgcacccccagacagagggcatgtgccccaggatgacagtgcctgccctgcacacagccatcaacacagagcccctgtttggcaccctgagagatggctgccaccggctgcccaagatcaaggagaccaccggctag

SEQ ID NO: 181859 - DNA, 3936 bp, Artificial Sequence
  derived and/or modified sequence
ttcagcagccaccggaccaagagcagcggctggcccccccccagcggaacttggggactttcccaggtgccaccttacggatgggaaatgaccgccaaccgagatgggagagactactttattaatcacatgacgcaggcaattccattcgatgaccctagactggaaagttgccaaattattcctccagctccaagaaaagtcgagatgcggagggatccagttctggggtttgggtttgttgctggctccgaaaagcctgtcgtggtgcggtccgtcaccccaggcggtccttctgaaggtaagttgatccccggtgatcagatagtcatgataaacgacgagcccgtcagtgctgccccccgagagcgggtaatcgacctggtaagatcgtgcaaggaaagcatcctcctaacagtcatacaaccctacccgtcccccaaaagtgcgtttatctctgctgccaaaaaagcacgattgaagtcaaatccagtgaaagtacgcttcagcgaagaggttatcatcaacggccaggtctctgagactgtgaaagataatagtttgttattcatgccaaacgtgctgaaggtgtacctagagaacggccagaccaagagctttcggttcgattgctccacctctatcaaggacgtgatcctgacattgcaagaaaagctctccatcaaaggcattgagcacttcagcttaatgcttgagcagcgaactgagggcgccggcacaaaactgctgctactgcatgagcaggaaacattaactcaggttacgcagcgccccagcagccataagatgagatgtctcttccggatcagcttcgtgcccaaggaccccatagacttgcttagaagagacccggtcgcatttgagtatttgtatgtccagtcttgtaacgatgtagtgcaggaaaggttcggccctgaacttaagtacgatattgcactccgacttgccgccctacaaatgtacattgccaccgtcacaaccaaacagacccagaagatctcactgaaatacatcgagaaggagtgggggcttgagacttttctgccttccgctgtcttacagtcaatgaaggaaaagaatatcaaaaaagcgttgtcacacttagtgaaagcaaatcagaatctggttcctcctggaaaaaagctgtctgcactccaggccaaagtgcactacctaaaattcctctctgatttgagactctacggaggtagagtgttcaaagctactttagtgcaggctgaaaagaggtcagaagtgaccctactggtcgggccccggtatgggatctcccatgtgattaacactaaaaccaatttggtggccctcctggcagacttctcccacgtcaatcggatagagatgttcagtgaggaagagtccctggtcagggtagagctgcatgtactcgatgtaaaacctattactctcctgatggaaagctccgacgctatgaatctggcctgccttacagctggctactacagacttttggtggacagcagacgctccatctttaacatggccaacaaaaagaatactgccacccaagaaaccgggccagaaaataaaggtaagcacaacctgttgggacctgactggaattgtatccctcaaatgacaacatttatcggcgagggtgaacaggaagcacagataacctatattgactctaagcagaagactgtggagatcactgattcaaccatgtgtcccaaagaacataggcatctttatattgataacgcatattcatccgatggacttaatcagcagctgtcccaaccgggagaggcaccctgcgaggccgattaccgcagtctggctcagagaagtttactgactctgagtggccctgaaactctgaagaaagctcaggagagcccccgcggagctaaggtttcatttattttcggggacttcgctctggatgacgggatttctcctccaacgcttggatacgagacactactggacgaggggccagagatgctcgaaaaacaaagaaatctgtacatcggtagtgctaatgatatgaaaggactggatctgacgccagaggcagaaggtatccagttcgtggagaatagcgtctatgcgaatataggcgacgtgaagagcttccaagccgctgaggggatcgaggagccgcttcttcacgacatctgctatgccgaaaacactgacgatgccgaggacgaggacgaggtgtcctgtgaggaagacctggtggtgggggagatgaaccaaccagccattctaaacttatcaggcagttctgatgacatcatagaccttaccagcctcccacctcccgaaggggatgacaacgaggatgactttctgctgagatccctgaatatggcaattgcagcccccccaccgggctttagggacagcagtgatgaggaggattcccaatcccaggcagcaagctttcctgaggataaagagaagggatcctccttacagaatgacgaaatacccgtgtccttaattgatgcagtgccaacttccgcagaaggaaaatgcgagaaagggttggacaatgcggtggtctctactcttggagcgctggaagccctctccgtcagcgaggaacagcagacaagcgacaattcaggagtggccatacttcgcgcctactctcccgaaagctcctcagactctggcaacgagaccaattcatctgaaatgactgagagcagcgagctcgcaacggcccaaaagcagagtgagaatctgtctaggatgtttctggcgacccacgaggggtatcatcctcttgctgaggagcagactgagtttcccgcctccaagacccccgcaggcggcctgcctccgaagtccagccatgcacttgccgcccgcccagccaccgaccttccgcccaaagttgtgccaagtaagcaattactgcactctgaccatatggagatggagccggaaactatggaaaccaaatccgtgacggattacttttctaagctgcatatgggctctgtggcgtattcatgcaccagtaaacggaagtccaaactcgcagatggtgaagggaaagcacctccaaacggcaacacgaccgggaagaaacagcagggcacgaagaccgctgaaatggaggaggaagcgtccgggaagtttggaacagtctcatcaagagactctcaacatctgagtacattcaatctggagcggactgctttccgtaaagattcacaaaggtggtacgtcgctaccgaaggcggcatggccgagaagagcggcctggaggcagctactggtaagacattccccagggccagcggtctcggagccagggaagcggaagggaaagaggagggggcccccgatggggaaacaagtgacggaagcggcctcggccagggagatagattcctcaccgacgtgacctgtgcttcgtccgcgaaggacttggacaacccagaggacgctgactcatccacatgtgaccacccaagtaagctgcccgaagccgacgagtccgtggcacgactgtgtgactatcatctggcgaagagaatgagtagcctgcagagtgaggggcacttctccctgcagtcttcacagggcagctccgtggatgccggttgcggtacggggtcttctgggagcgcatgtgcgactccagttgagtcccccttgtgtcccagcttaggtaaacacctcatccctgatgcatctggcaaaggcgtgaactatatcccttctgaggagagagcacccgggttgccaaaccacggggctactttcaaggaattgcatccccaaacagaggggatgtgcccccgtatgacagtgcccgcacttcacaccgcaattaatacagagcccttatttggcactctgagagatggatgccacagactcccgaaaataaaggagactacggtgtag

SEQ ID NO: 181860 - DNA, 3969 bp, Artificial Sequence
  derived and/or modified sequence
atggacgtgttcagcttcgtgaagatcgccaagctgagcagccacagaaccaaaagcagtggttggcctccacctagcggtacctgggggctgagccaagtgcccccttacggctgggaaatgactgctaatagagacggacgggattactttatcaaccatatgacacaggcgatcccttttgatgaccctcgacttgagtcgtgtcaaatcattccccccgctccccgtaaagtggaaatgcgacgggatcctgttctcggctttgggtttgtggccggttcagagaagccagttgtagtcagatcagttaccccgggggggccaagtgaaggcaagcttatccccggcgatcagattgtgatgattaatgatgagccagtatccgccgccccccgcgagcgtgtcattgatctcgtcaggagttgtaaggagagcatactgttgacggttatacaaccataccctagccccaagtctgcctttatttcagcggccaagaaagcccgccttaaatccaacccagtcaaggtgaggttctctgaggaggtcattataaacgggcaggtttccgaaactgtaaaagataacagcttactgtttatgcctaacgttctgaaagtctatttggaaaatggccagacaaaaagtttccgtttcgactgcagcacaagtatcaaggatgtaatcctgacactacaggagaagctctccataaaggggatcgaacacttttctctgatgctcgaacagcgcaccgagggcgccggaaccaagctgctcctgctgcacgaacaggagaccctaacccaggtaactcagcgcccttcttctcacaagatgcgctgtctgtttcggattagctttgttccaaaggaccctatcgacttgctgcggcgtgaccctgtggccttcgagtatctgtatgtacagtcctgcaatgatgtggttcaggaacggttcgggcctgaactgaaatatgatatcgcacttcgtctcgcggcccttcagatgtatatcgcaaccgtgacgactaaacagacccagaaaataagtttaaagtacatcgaaaaggaatggggcctggaaacctttctaccttctgcagtgctgcagtcaatgaaagagaagaacatcaagaaggcactgtcgcatctggtgaaggctaaccagaatttggtgccgcctggcaagaaactcagtgctctacaagcaaaggttcattacctcaagtttcttagtgacctgcgcctctatggcggccgcgtgtttaaggcaacattggtgcaggccgaaaagcggtccgaggtgacgctgcttgtcggtccccgatacggaatcagccatgtgattaacactaaaaccaatttggtcgctctgctggcagatttcagccatgtcaaccgtatcgagatgtttagtgaagaggagagtctcgtgagggtggagttgcacgtgttggatgtgaagcccatcacactgctgatggaatcaagtgatgccatgaatcttgcctgtctgactgccggatactaccgtctattagtcgactcccgtaggtcaatcttcaatatggcgaataagaaaaacaccgctactcaggaaactggacctgaaaacaagggaaagcacaatctgctggggccggattggaactgtattcctcaaatgactacttttatcggggaaggggaacaggaagcacagatcacgtacatcgattccaagcagaagactgttgagattaccgattccacgatgtgccccaaagagcaccggcacctgtacatcgataacgcttatagcagcgatggcctgaaccagcaattaagtcagccgggggaggctccttgtgaggctgattacaggagcttagcccagcgctctctgcttacactaagcggccccgagacactaaaaaaagcccaggagtccccacgtggagccaaggtaagtttcatctttggggattttgcgctggatgatggcattagtccccccaccctgggatatgagacactgctggatgagggcccagaaatgctggaaaaacagcgcaatctgtatatcggttcagctaatgacatgaagggcttagacctgacccctgaagcagaaggtatacaattcgtcgagaactccgtgtatgcgaacattggtgatgtgaaaagcttccaagccgccgagggaatagaggagcccctactgcacgatatctgttacgctgagaatacagatgacgcagaggacgaggacgaagtatcttgcgaagaagacttggttgttggggagatgaaccaacctgcaattctgaatcttagtggaagttccgacgacattattgatctaaccagtctgccaccccctgaaggcgacgataatgaagacgactttcttctcaggagcctcaacatggcgattgccgcccccccccctgggtttcgcgactcgtctgacgaagaagacagccaaagccaagccgcctcctttcctgaagacaaagagaaggggtcgtccctacaaaatgacgaaatccccgtgagcctgattgatgcagtgcctacgagtgccgaggggaagtgcgaaaagggtcttgacaacgccgtggtcagcactttaggtgccttagaggcactgtctgtctcagaagaacagcagacctctgataactccggcgtggcaattctccgcgcatatagcccagaatcatccagcgacagtggtaatgagacgaattcctcggagatgacagagagtagcgaactggccaccgcccaaaagcagagcgaaaatctaagcagaatgtttttggctacacacgagggataccacccactggctgaagagcagacagaattccctgctagcaaaaccccagccggaggactccctcccaaaagctctcatgccctggcggcaaggcccgcaactgatctgccccccaaagtggttccctctaaacaactgctacactcagaccatatggagatggagcctgaaactatggagactaaaagcgttacagattattttagcaaactgcatatgggaagtgtggcttatagttgcacatccaagcgcaaaagtaagctggcagacggcgaaggaaaggcacctcctaatggcaacaccaccggcaagaaacagcagggcactaagacagcagaaatggaggaagaggccagcgggaaatttggtaccgtatcaagtcgagatagtcagcatttgtctactttcaacctggagcggacggctttcaggaaagactcccagcgatggtatgttgctaccgagggcggcatggcagaaaagagcggactcgaagccgccactggaaagacattcccccgcgcaagcggcctcggtgcgcgcgaagctgaaggcaaggaggaaggagcccctgatggggagacctcagacggaagtgggctgggccagggagacaggttcctcacagacgtgacctgcgcctcatctgcgaaggacttagacaatccggaggatgccgatagtagcacttgcgatcacccttccaaactgcctgaggccgacgagtctgtggcgcgtctctgtgactaccacctcgccaaacggatgagcagtctgcaaagcgaaggacatttttcactgcagtcctcacagggaagctccgtggacgctggatgtgggacaggctcatccggctcggcctgcgccacccctgtggaatcaccactgtgcccatcactcggaaagcacctgattccagatgcttctgggaaaggggtaaactacatccccagtgaggagcgagcccccggtctacccaatcatggcgcaacctttaaagagcttcatcctcagacagaaggcatgtgcccgaggatgactgtgccagccctccataccgctatcaatacagaaccactgtttggcacactgcgggacggctgccatcgattgccaaagattaaagagactaccgtctag

SEQ ID NO: 181861 - DNA, 3942 bp, Artificial Sequence
  derived and/or modified sequence
aagagccacagcccccaccggaccaagagcagcggctggccccccccttctgggacttgggggttgagccaagtgccaccgtacggctgggagatgacagcaaatcgggatgggagggactatttcattaatcacatgacacaagctattcccttcgatgaccctcgactggagagttgccagattattccaccggcacctaggaaagtggagatgaggagggacccagtgcttggatttggctttgtggccggctcggagaaacctgtagtggtccggagtgtcacaccaggcggtccgtcggaaggaaagcttatcccgggggaccagatcgtcatgatcaatgatgagcccgtgtctgctgcccccagggagagggtcattgatctcgtacgaagttgcaaagagagcatcctcctcaccgtgattcagccttatccatctcctaagtccgcctttatctctgctgccaagaaggccagactcaaatccaatcccgttaaggtgagatttagcgaggaagtgattatcaatggacaagtcagtgagaccgtcaaagacaacagcttgctttttatgccaaatgtgctgaaggtgtacctcgagaacgggcaaacaaaaagctttcggtttgattgttccacttcgatcaaggatgtaatccttacactgcaggaaaagctctcaataaaaggaatcgaacacttctccctaatgctcgagcagagaactgagggcgccggaacaaagttactattactccatgaacaggagacactgactcaggtgactcagcgaccgtcatctcacaagatgagatgcctgttccgtatcagctttgttcccaaggatcctatcgatcttctccgcagagatccagtggcatttgaatatctgtacgtacagagctgcaatgatgtggtccaggaaaggttcggcccggaacttaagtacgatattgctctccgcctggccgcgttacaaatgtatatcgctacggtcactactaagcagactcagaagatctccctgaagtacattgaaaaggaatggggcttggagacatttctaccctccgccgtattacagagtatgaaggaaaaaaatattaagaaggccttgagccatctggtgaaagccaaccagaacctggtcccaccaggtaagaagttaagcgcccttcaagcgaaagttcactatttgaagtttctgtctgatcttcgcctgtacggcggacgcgttttcaaagcgacacttgtgcaagccgagaaacgcagcgaggtgactctgctggtcgggccacggtacgggattagccacgttatcaacaccaaaaccaaccttgtggcattgctggcagattttagccacgtcaacaggattgaaatgttctcagaggaggaatctctggttcgtgttgaacttcatgtcctggacgtgaaaccaattacgctactgatggaaagtagtgacgcaatgaacctcgcctgtttaactgcgggctactatcggctgttagtggactcccggaggtcgattttcaacatggctaataagaaaaacacggcgacacaggaaacaggtcccgagaacaaaggaaaacacaatctgctggggccagattggaactgtatcccacagatgactaccttcatcggcgaaggagagcaagaggcgcagattacctacatcgactctaagcagaaaacagtagagattactgatagcacaatgtgtcctaaagaacataggcacctgtacatcgataacgcctactcatccgatggtcttaatcagcaattatcacaaccaggggaggcaccgtgtgaggcggattatcgatctctggctcaacgaagcctcctaacactgtcgggacccgaaactctgaagaaggcccaagagtcccctcgcggtgccaaggtaagctttatctttggagatttcgccttggacgatggtatctccccaccaaccctcggatacgagacgctgctggatgaagggccggagatgttggaaaagcagcgaaacctgtacataggcagcgccaatgatatgaaggggctagatttgacccccgaagctgaagggatacagtttgtggaaaactccgtgtatgcaaacatcggagatgtcaaatccttccaggccgctgaaggcattgaagaacctttactgcatgacatatgttacgccgaaaacacagacgatgccgaagacgaggacgaggtgtcttgcgaggaagacttagtggtgggagagatgaaccaaccagcaatcctcaacctgagcgggtccagcgacgacatcatcgatcttacaagcctacccccccctgaaggagacgacaatgaagatgacttcctcctccgtagtctaaacatggccatcgccgcccccccgcctggctttagagacagctcagacgaggaagattcacagtcccaggccgcatcctttcctgaagacaaggaaaaaggaagcagtctgcaaaatgacgagattcctgtgtcccttatcgatgcagtgcccacaagcgctgagggtaaatgtgaaaaaggacttgataatgctgttgtttcaaccctgggcgctctagaggcattgtccgtcagtgaagaacagcaaacgtccgataacagcggcgtggccatactcagagcctattctccagaatctagctcagatagcggaaacgagactaattcttctgaaatgaccgaatcaagcgaactggccaccgcgcagaaacaaagtgaaaatctctctagaatgttcttggccactcacgagggatatcaccctctggccgaagaacagactgagttccccgctagcaagacacctgccggggggctgccaccgaaatcctctcacgccttagccgctagacctgcgacagaccttcccccgaaggtggtgccaagcaaacaactgctgcatagcgaccatatggaaatggagccagaaaccatggagacaaagtctgtgactgattacttcagtaagctgcacatgggctccgtcgcatacagttgtacttctaaaagaaagtctaagctcgcagatggagaaggtaaggcacctccaaacggaaatacaaccggaaaaaagcaacagggaaccaaaaccgctgaaatggaagaggaggcctcagggaagttcgggacggtgagcagtagggactcacagcatttgtctacctttaatctggagcgcaccgctttccgaaaggatagtcagcggtggtacgttgccacggaggggggcatggccgaaaagtctggacttgaggcagctacaggtaagacttttccccgggcttctggtctcggagcaagggaggccgaggggaaggaggagggtgctcccgacggagagacatcagacgggtccgggctgggccagggagacaggtttctcacggatgtgacctgtgcaagctccgctaaagacctggacaaccctgaagacgcggattctagcacatgtgatcacccttctaagctaccagaggccgatgagagtgtggcacggttgtgcgattatcacctggctaagcgcatgtcgtctctgcagtcggaaggccatttctcactgcagtcatctcagggctcctccgtggatgcagggtgtggaaccggctctagtgggtccgcctgcgctacccccgtagagagcccactgtgccctagtctggggaagcaccttatcccagacgcttcaggaaaaggggtgaattatatcccatcggaggagcgagccccaggcctgcccaatcacggtgctaccttcaaggaattgcacccacagacagagggcatgtgtccacgcatgaccgttccagcattgcacacggctataaatacagagcctcttttcggtactctgagggatggctgccatagactgccgaaaattaaggaaaccacgggctag

SEQ ID NO: 181862 - DNA, 3936 bp, Artificial Sequence
  derived and/or modified sequence
ttttcatcacataggacaaagtcttctggttggcccccaccgagtggcacgtgggggctgtctcaggtgcctccatacggatgggagatgaccgcaaacagagatggtagagactatttcataaaccacatgactcaggccataccatttgatgatccccgtttagagtcgtgtcaaatcatcccgcctgcccctcggaaggtagaaatgcggagggatcctgtattgggctttggattcgtggccggtagcgagaagcccgtggtcgtacgctcagtgactcccggagggcctagcgaagggaagcttattccgggtgaccaaatagttatgattaatgatgaaccggtctcagccgctcccagagagcgcgtgatcgacctcgtgcgcagctgcaaagagagtatccttctcactgtgatacaaccgtaccctagtccgaaatcagcctttataagtgccgctaagaaggctagactgaaatccaatccagttaaggtgagattttcggaggaggtaataatcaacggacaggtatccgagacagtgaaggataattctctgctgtttatgcctaatgtgctgaaagtttaccttgagaacggccagacgaagagcttcaggttcgactgttctaccagcatcaaagatgtgatcttgacactgcaggagaagctgagtataaagggaattgaacattttagtttgatgctggaacagagaaccgagggcgctgggactaagctcctgctgctccacgaacaggagacgctgacccaggtaactcaacgcccttcaagccacaaaatgcgctgcctgttccgtatcagtttcgtgcccaaggatcccatcgatctactgagacgcgaccctgtggcttttgagtacctgtatgtgcagagttgcaacgacgtcgtgcaggagcgtttcggaccggaactgaagtatgacatagctctcaggctggccgctttgcagatgtatatagcaacagtgaccactaaacagacacagaagatctcgctgaagtatattgaaaaagagtggggccttgagacctttttgccaagcgccgtgctccaatcgatgaaagagaaaaatataaagaaagccctatcccatctcgtgaaagcgaatcagaatttagtacctccaggtaagaagctttccgcgctgcaggccaaggtccactatttgaagttcttgtctgacctgcgactctatggaggcagagtgtttaaagctactctggttcaggccgaaaagcgttctgaggtgaccctgctggttgggcctcggtacgggattagtcacgtgattaacactaagacaaacctggtggccctcctggccgacttttctcacgtgaatcgtatcgagatgttttctgaagaggagagcctggtaagagtggagctgcatgtgttggacgttaagcccattaccctcctgatggagtcctccgacgccatgaatctcgcgtgcctgacggcaggctactaccggctgctggtggattcacggaggagcatctttaatatggcaaataaaaaaaacacagccactcaggaaactggcccagagaataagggcaagcacaacctgctgggtcccgactggaactgtatccctcaaatgacaaccttcatcggcgaaggggagcaagaggcccaaatcacatacatagacagcaagcagaagacagtggagatcaccgattcgactatgtgccctaaagagcaccgacatctgtacattgacaatgcttacagcagcgacggactgaaccagcagttatctcagcctggcgaggctccatgcgaagctgactatcggtcccttgcgcagcgttcattgttgaccctgagcggacccgagactctgaagaaggcccaggagtctcctagaggcgcaaaggtatcgtttatcttcggcgacttcgctctggacgatggcattagccccccaactctgggttatgaaaccctgctcgacgaggggccagaaatgctggagaagcaacgcaacctgtacatcgggtccgctaacgatatgaaggggctggacctcacccctgaggcagaagggatccagtttgtggagaactctgtgtatgctaacatcggtgacgtaaagagtttccaggcagccgaggggattgaagagcccctgctgcacgacatttgttacgccgagaatacagacgatgctgaggacgaggacgaggtgtcatgcgaggaggacctggtagtgggcgagatgaatcagccggctatcctgaatctttccggctcatccgacgacattattgatttgacttccctcccccctccagaaggagacgataacgaagacgacttcctactgaggagtctgaacatggcaatcgctgccccaccacccggatttcgcgacagctccgatgaggaggactctcagtcccaggccgctagttttccggaggataaggagaaaggatcgagccttcagaatgatgaaatcccagtgtccctgatcgacgccgtgcccacctccgcggaagggaaatgcgagaagggcttagataacgcagtggtcagcaccctcggggctttagaagctctcagcgtgagtgaggaacagcagacaagtgataactctggagttgcaatcctgcgagcgtactcccccgaaagtagttctgatagcggtaatgaaactaattcttccgaaatgaccgagtccagcgaacttgccaccgcccagaaacagagcgagaacctctccaggatgttcctcgccactcacgaggggtaccacccattagccgaagaacagacagagttcccggcatctaaaacccccgcagggggattgccccctaagagcagtcatgctcttgccgctcgaccagctacggatctcccaccaaaggtggtcccatctaaacagctgctccattctgatcacatggaaatggagcctgaaaccatggagactaagtccgtgaccgattattttagcaagctgcacatgggtagtgtggcatattcatgcaccagcaagaggaagagtaaactcgctgatggtgaaggcaaggcacccccaaatggcaacacaaccggaaaaaaacagcagggaaccaaaacggcagaaatggaggaggaagcaagcggaaaatttggaacagtgtcgagtcgagatagccagcacctgagtaccttcaacttggagcgtaccgccttccggaaggacagtcagcggtggtatgtggcaacggaagggggaatggccgagaagagcgggctcgaggcggcaaccgggaagacctttccaagggcctcaggtctgggagcacgggaagccgaggggaaggaggagggggcaccagacggtgagacaagcgatggcagtggactcggtcagggcgatcggtttctgaccgacgtgacttgtgcttctagcgccaaggacttggacaatcccgaagatgcagattcttctacctgcgaccatccctctaaactgccggaggccgacgagtctgtggctcgcctgtgcgattatcatctggctaagaggatgagttcactgcagtccgagggacacttttccctgcaatcctctcaggggagttcagtggacgctgggtgcggtacaggaagcagtggctcggcatgcgccactccagtcgagagtcctttgtgtcccagcctagggaagcacctcatccccgacgccagcgggaaaggagtgaactacattccgagcgaggagagggcacccggactgcctaaccatggggctacatttaaagagctgcacccacagacggagggaatgtgtcctcgtatgacggtccctgcgctccacacggccatcaataccgagcccttatttggcacacttagagatgggtgccaccggctgcctaaaattaaagagaccacagtgtag

SEQ ID NO: 181863 - DNA, 3969 bp, Artificial Sequence
  derived and/or modified sequence
atggacgtgtttagtttcgtcaaaatagctaagctgtctagccacagaacgaagtcatccggctggcctcccccaagtggaacttgggggctgagccaggtgccaccttacggttgggaaatgacagcgaaccgtgatggccgtgactacttcatcaaccatatgactcaggctatcccttttgatgatccacggctggaatcgtgtcagattattccgcctgcccctcgtaaagtggaaatgaggcgagatcccgtcctcggcttcggtttcgtggctggctctgaaaaaccagtggtggtcaggagcgtgactcctggagggccttctgagggtaagctcattcccggagaccaaattgtaatgatcaacgatgagccagtgagtgcagcacccagggagcgcgttattgatctggttagatcatgtaaagaatcaatcctcttgacagtgatacaaccctatcctagcccgaaatcggcattcatttcggccgctaaaaaggctaggctcaaatcaaaccctgtcaaggttaggttttccgaggaggttatcatcaacggtcaggtcagcgaaacagtgaaggataactctctcctgttcatgccaaacgttcttaaggtctatctagaaaacgggcagaccaagtcctttaggtttgattgtagcaccagtatcaaagacgttattctcaccctgcaggagaaactgtccatcaagggaattgagcatttttcactgatgctagagcaacggaccgagggtgccggaactaagcttttacttttacacgaacaggagacactaactcaggtgacccagcgaccaagctctcataaaatgaggtgccttttccggatcagcttcgtcccaaaagatcctatcgacctgctgaggagggatcccgtggccttcgaatacctttacgttcagtcttgcaatgacgtcgtgcaggagaggttcggccctgagctcaagtacgacattgccctgcggctcgccgcactccaaatgtatattgccacggtcacaaccaagcaaactcaaaagatctccctgaaatacatcgagaaagagtggggacttgagacgtttcttcccagcgcggtgctgcagtccatgaaagagaaaaacatcaagaaggccctgtctcatcttgtgaaagcaaaccaaaaccttgtgcccccagggaagaaattatctgctttgcaggcaaaagttcactatttaaagtttttgagtgacctgcgcctatacggagggagggtgttcaaggccacactcgtacaggcagagaagcgctctgaggtaaccctcctcgtcggacctcgctatggaatttcccatgtgatcaataccaagacaaatttagtcgcactcctggccgacttttcccatgtgaacagaatcgagatgttcagcgaggaggaatccttggtccgtgtggagctgcacgtattagacgttaaacctatcaccctgctgatggagtcatcagatgcgatgaacctggcatgcctgacagcaggctactatagactgctagtcgatagccgcagatccatctttaatatggctaacaaaaaaaatactgctacacaggaaacaggacccgagaacaagggaaaacacaatctgctaggccctgattggaattgtatcccacagatgaccacctttattggggaaggagagcaggaggcacaaatcacatacatcgactctaagcaaaagacagttgaaataactgacagcaccatgtgcccaaaggagcatagacacttatacattgataatgcatattcctctgacgggttgaatcagcagctctcccagccaggtgaagccccatgtgaggccgactatagaagcctagcacagaggtccctcctaaccctatctggtcctgagactctgaaaaaggcccaggaaagtcctcgcggagccaaggtgagctttatattcggcgattttgctttggacgatggcatttccccacccacattggggtatgaaactctcttagacgagggtcctgaaatgctagaaaagcaaagaaatctatatatcggtagtgccaatgacatgaaagggttagacctgactcccgaggccgagggcatccagtttgtggagaatagtgtgtatgcaaacatcggtgacgttaagagttttcaggctgctgaaggaatcgaagaacctctactacatgatatctgctacgcagagaatacagacgatgcggaggatgaggacgaagtgtcttgcgaggaggacctggtcgtgggcgaaatgaatcagccagcaatacttaatttatctggctcctccgacgacatcatcgacctgacatcccttccaccacccgagggcgatgacaatgaggatgatttcctcctgaggagtctcaacatggccatcgcggcacctcctcccggatttagagacagcagcgatgaggaagacagtcaatcccaggctgctagcttcccagaggataaggagaagggctcatccctacagaacgacgagatacctgtgagcctgattgacgctgttccgacgtccgctgaagggaaatgcgagaaggggctggacaatgccgtagtgtctacactgggagcacttgaggccttaagcgttagtgaggagcagcagacctccgacaattccggcgtggccatcctgcgggcttattccccagagtctagctccgatagtggcaacgaaacaaactcttcagaaatgactgaatcaagtgaacttgcaacagcccaaaaacagtcagaaaacctgtctcgcatgtttcttgccacacacgagggttatcatcctctggcggaagagcagacagaatttcctgccagcaaaacaccagctggaggacttccaccgaagagcagtcacgccctcgccgcaaggcccgctactgacctaccgcctaaagtggtgccgtctaagcagctgctgcactccgaccacatggagatggaacctgaaacgatggagaccaaatccgtcactgactacttctctaaattgcatatggggtcagttgcttattcctgtacaagcaaacgcaagagcaagctcgccgacggcgaagggaaggcgcctccaaatgggaatacaactggaaaaaaacaacagggtacgaaaactgcagagatggaggaagaggccagcggcaagttcggcacagtcagtagcagggacagtcaacacctgagcacatttaatctggagcgtactgctttccgcaaagactcccaaagatggtatgtggccacggaggggggaatggctgaaaaatccggcttagaagccgctactggtaaaaccttccctagggcttcaggcctgggcgctcgggaggccgaagggaaagaagagggcgctccagacggagagacctccgatgggagcggattaggccagggcgacaggtttctgacggacgtcacctgtgcaagttccgctaaggatttggacaacccggaggatgcggacagctccacttgcgaccatcccagcaagttacccgaggccgatgagtctgttgccagattatgtgactatcaccttgcgaagcggatgagcagcctccagagtgaaggccacttctcactccaaagcagtcaaggctcctctgtggatgcaggctgcggcacaggctcatcaggcagcgcgtgtgctaccccagtggagagcccactgtgcccttctctgggaaagcatctgatccctgatgcctcaggaaaaggagttaattacatcccatcagaggaaagagctccaggcctaccaaaccacggggcaaccttcaaggaactgcatccccaaacggagggaatgtgccctaggatgaccgtgccggctcttcacaccgctattaatactgaacctctgtttggaactctcagagacggctgccaccgcctaccaaagatcaaagagacgactgtctag

SEQ ID NO: 181864 - DNA, 3942 bp, Artificial Sequence
  derived and/or modified sequence
aagtctcacagcccacaccggacaaagagttctggatggccccctccatctggaacctggggattgagccaggtccctccatacggttgggagatgacagccaatagagatggcagagattactttatcaaccacatgactcaggccatccccttcgacgaccccaggctggagagttgtcaaataatacctccggctccgagaaaggttgaaatgaggcgagaccctgtactcgggtttggttttgttgcaggctccgagaagcccgtggtggtcagatccgtgaccccgggaggcccatccgagggaaagttaatccccggtgaccagattgttatgatcaatgacgaaccagtgtcggctgctccacgggagagggtaatcgatctagtaaggagctgcaaagagtcaatcttgctgaccgtcatccagccatatcccagccccaagtcagcctttattagcgctgctaagaaggcaagactaaagtccaaccctgtaaaggttagatttagtgaggaagtgatcatcaatggccaggtgagtgagacggtgaaggacaattccctgctgtttatgccaaacgttctcaaagtttatctggaaaacggtcaaactaagagttttcggtttgactgcagtacttcaatcaaagacgtcatcctcaccttacaagagaagctgtcaatcaaggggatagagcacttctccctgatgttggaacagaggacagaaggcgctggcaccaagctcctgcttctccatgaacaagagactttgacccaagttacccagagaccttcttctcacaaaatgcgctgtctgtttcgaatttccttcgtaccaaaagaccccatcgacctgcttcgcagggaccccgtggccttcgagtacttatatgtccagagttgtaatgatgttgtccaggaaaggttcggacccgagctgaagtacgatatcgccctgcgcttagccgcacttcagatgtacatcgcaaccgtcactacgaagcagacccaaaagattagcctgaaatacatcgagaaggaatgggggcttgagacatttctgccctctgctgtgttacagtcaatgaaagagaaaaatatcaagaaggccctgtcccacttagtaaaagccaatcagaacttggtacctcccggaaagaagctgagcgctctgcaagcaaaggtgcactatttgaaattcctttcagacctccgtctgtatggcggtagggtctttaaggctacactcgtgcaggccgaaaagcgaagtgaagtaacactgctcgtgggtccacgctatggaataagtcacgtgatcaataccaagaccaatctggtggccctgctggctgatttctcgcatgtaaaccgaattgagatgttcagtgaagaggagagtctggtgagggtggagttgcacgtcctggacgtgaaaccaattactctgttgatggagagcagtgatgccatgaacctggcgtgcctaaccgcaggctactataggctcctggttgacagcagacgcagtatattcaacatggcaaacaagaagaacactgccacccaggagaccggacctgagaataagggaaagcacaatctgctcggtccagactggaactgcatacctcaaatgactacatttatcggcgagggcgagcaggaggctcaaatcacttacattgactcaaaacagaagacggtggagatcactgactcaacaatgtgccctaaagagcataggcatctgtacatcgataacgcttatagctccgacggccttaaccaacaactctcccagcctggcgaggcaccctgcgaagccgactaccggagcttggcccagcggagcctcttgacactcagcggtcccgagacgttgaagaaggcccaggagagtccacggggagccaaggtgagctttatttttggagatttcgccctggatgatggtattagccctccaactctgggctacgagactcttctggacgaggggcctgagatgctggagaagcaaaggaatctgtacatagggtctgctaatgatatgaagggccttgacctaacccccgaggcagaaggcattcagttcgttgaaaatagcgtctatgctaacattggagatgtgaaatcgttccaggccgctgaaggaattgaggaacccctgctgcacgatatttgttacgctgagaatactgacgatgccgaagacgaagatgaggtgtcatgcgaagaagatctagtggtgggcgagatgaatcaacctgccattctgaacttgtccggttcttctgatgacattatcgatctcaccagcctgcctcccccagaaggtgatgacaacgaagacgattttcttttgaggtcactgaacatggccatcgccgcaccgcctcctgggttccgggatagttctgatgaagaagatagtcaaagtcaggccgcttcattcccggaagataaagagaagggcagtagcctgcagaatgacgagattccagtcagcctgattgatgccgttcctacgtcagccgaggggaaatgcgaaaagggcctggataatgcagtcgttagtaccttgggcgcactcgaagctctgagtgtttctgaggagcagcaaacttccgacaattccggggtggctattctgagagcctattcacccgagtcttctagcgacagtggtaatgagaccaacagttctgaaatgacggagagcagtgagctagccacagcgcagaaacaaagcgagaatcttagtaggatgttcctggcaacgcacgaaggttaccatccgctcgctgaggagcagaccgagtttcccgcttcaaaaacccctgcagggggactgccgcctaagtcttcccacgcactcgccgcaagacccgctaccgacctgcccccaaaggtggtgccatctaaacagctgttgcattccgatcatatggaaatggaacccgaaacaatggaaacgaaaagtgtcacggactattttagcaagctccacatggggagcgttgcatacagctgcaccagtaagcgcaaaagtaagctcgcagatggcgaaggtaaagccccacctaatggcaacactaccggcaaaaagcagcagggaactaagactgctgagatggaggaagaagccagtggcaaattcgggacggtaagctcgagagactctcaacacctgtcaacatttaatctggagcgcactgctttccgaaaggacagtcagagatggtatgtggcaaccgagggagggatggcggaaaaaagcggattggaagccgctaccgggaagaccttcccacgagcatccggcttgggcgctcgtgaagccgagggtaaagaggaaggcgcacccgatggcgagacctctgatggatccggacttggacagggcgatcgctttttaacagatgtgacttgtgccagttccgccaaggacttagacaatcccgaagacgcagactcctccacctgtgaccatcccagcaaattgccagaggctgacgagtccgtggcaaggctgtgcgattatcacttagctaaaagaatgagcagtctgcagagcgagggacacttctcgttgcaaagctcacaaggtagttctgtggatgctgggtgtgggacagggtcttccggttcggcatgcgcgacacccgtcgagtcaccattgtgtcctagtctgggaaaacacctcatccccgatgcttcaggcaaaggcgtaaactatatccccagcgaggaaagggcacccggactgcctaatcacggcgctaccttcaaagaattacaccctcaaaccgaaggcatgtgtcctagaatgaccgtgcccgcactgcataccgcaattaacacagaacctctcttcggtaccctacgagacggctgccaccgccttccaaagattaaggagacaactggttag

SEQ ID NO: 181865 - DNA, 3936 bp, Artificial Sequence
  derived and/or modified sequence
ttcagcagccacagaaccaagagcagcggctggcccccccccagcggcacctggggcctgagccaggtgcccccctacggctgggagatgaccgccaacagagacggcagagactacttcatcaaccacatgacccaggccatccccttcgacgaccccagactggagagctgccagatcatcccccccgcccccagaaaggtggagatgagaagagaccccgtgctgggcttcggcttcgtggccggcagcgagaagcccgtggtggtgagaagcgtgacccccggcggccccagcgagggcaagctgatccccggcgaccagatcgtgatgatcaacgacgagcccgtgagcgccgcccccagagagagagtgatcgacctggtgagaagctgcaaggagagcatcctgctgaccgtgatccagccctaccccagccccaagagcgccttcatcagcgccgccaagaaggccagactgaagagcaaccccgtgaaggtgagattcagcgaggaggtgatcatcaacggccaggtgagcgagaccgtgaaggacaacagcctgctgttcatgcccaacgtgctgaaggtgtacctggagaacggccagaccaagagcttcagattcgactgcagcaccagcatcaaggacgtgatcctgaccctgcaggagaagctgagcatcaagggcatcgagcacttcagcctgatgctggagcagagaaccgagggcgccggcaccaagctgctgctgctgcacgagcaggagaccctgacccaggtgacccagagacccagcagccacaagatgagatgcctgttcagaatcagcttcgtgcccaaggaccccatcgacctgctgagaagagaccccgtggccttcgagtacctgtacgtgcagagctgcaacgacgtggtgcaggagagattcggccccgagctgaagtacgacatcgccctgagactggccgccctgcagatgtacatcgccaccgtgaccaccaagcagacccagaagatcagcctgaagtacatcgagaaggagtggggcctggagaccttcctgcccagcgccgtgctgcagagcatgaaggagaagaacatcaagaaggccctgagccacctggtgaaggccaaccagaacctggtgccccccggcaagaagctgagcgccctgcaggccaaggtgcactacctgaagttcctgagcgacctgagactgtacggcggcagagtgttcaaggccaccctggtgcaggccgagaagagaagcgaggtgaccctgctggtgggccccagatacggcatcagccacgtgatcaacaccaagaccaacctggtggccctgctggccgacttcagccacgtgaacagaatcgagatgttcagcgaggaggagagcctggtgagagtggagctgcacgtgctggacgtgaagcccatcaccctgctgatggagagcagcgacgccatgaacctggcctgcctgaccgccggctactacagactgctggtggacagcagaagaagcatcttcaacatggccaacaagaagaacaccgccacccaggagaccggccccgagaacaagggcaagcacaacctgctgggccccgactggaactgcatcccccagatgaccaccttcatcggcgagggcgagcaggaggcccagatcacctacatcgacagcaagcagaagaccgtggagatcaccgacagcaccatgtgccccaaggagcacagacacctgtacatcgacaacgcctacagcagcgacggcctgaaccagcagctgagccagcccggcgaggccccctgcgaggccgactacagaagcctggcccagagaagcctgctgaccctgagcggccccgagaccctgaagaaggcccaggagagccccagaggcgccaaggtgagcttcatcttcggcgacttcgccctggacgacggcatcagcccccccaccctgggctacgagaccctgctggacgagggccccgagatgctggagaagcagagaaacctgtacatcggcagcgccaacgacatgaagggcctggacctgacccccgaggccgagggcatccagttcgtggagaacagcgtgtacgccaacatcggcgacgtgaagagcttccaggccgccgagggcatcgaggagcccctgctgcacgacatctgctacgccgagaacaccgacgacgccgaggacgaggacgaggtgagctgcgaggaggacctggtggtgggcgagatgaaccagcccgccatcctgaacctgagcggcagcagcgacgacatcatcgacctgaccagcctgcccccccccgagggcgacgacaacgaggacgacttcctgctgagaagcctgaacatggccatcgccgcccccccccccggcttcagagacagcagcgacgaggaggacagccagagccaggccgccagcttccccgaggacaaggagaagggcagcagcctgcagaacgacgagatccccgtgagcctgatcgacgccgtgcccaccagcgccgagggcaagtgcgagaagggcctggacaacgccgtggtgagcaccctgggcgccctggaggccctgagcgtgagcgaggagcagcagaccagcgacaacagcggcgtggccatcctgagagcctacagccccgagagcagcagcgacagcggcaacgagaccaacagcagcgagatgaccgagagcagcgagctggccaccgcccagaagcagagcgagaacctgagcagaatgttcctggccacccacgagggctaccaccccctggccgaggagcagaccgagttccccgccagcaagacccccgccggcggcctgccccccaagagcagccacgccctggccgccagacccgccaccgacctgccccccaaggtggtgcccagcaagcagctgctgcacagcgaccacatggagatggagcccgagaccatggagaccaagagcgtgaccgactacttcagcaagctgcacatgggcagcgtggcctacagctgcaccagcaagagaaagagcaagctggccgacggcgagggcaaggccccccccaacggcaacaccaccggcaagaagcagcagggcaccaagaccgccgagatggaggaggaggccagcggcaagttcggcaccgtgagcagcagagacagccagcacctgagcaccttcaacctggagagaaccgccttcagaaaggacagccagagatggtacgtggccaccgagggcggcatggccgagaagagcggcctggaggccgccaccggcaagaccttccccagagccagcggcctgggcgccagagaggccgagggcaaggaggagggcgcccccgacggcgagaccagcgacggcagcggcctgggccagggcgacagattcctgaccgacgtgacctgcgccagcagcgccaaggacctggacaaccccgaggacgccgacagcagcacctgcgaccaccccagcaagctgcccgaggccgacgagagcgtggccagactgtgcgactaccacctggccaagagaatgagcagcctgcagagcgagggccacttcagcctgcagagcagccagggcagcagcgtggacgccggctgcggcaccggcagcagcggcagcgcctgcgccacccccgtggagagccccctgtgccccagcctgggcaagcacctgatccccgacgccagcggcaagggcgtgaactacatccccagcgaggagagagcccccggcctgcccaaccacggcgccaccttcaaggagctgcacccccagaccgagggcatgtgccccagaatgaccgtgcccgccctgcacaccgccatcaacaccgagcccctgttcggcaccctgagagacggctgccacagactgcccaagatcaaggagaccaccgtgtag

SEQ ID NO: 181866 - DNA, 3969 bp, Artificial Sequence
  derived and/or modified sequence
atggacgtgttcagcttcgtgaagatcgccaagctgagcagccacagaaccaagagcagcggctggcccccccccagcggcacctggggcctgagccaggtgcccccctacggctgggagatgaccgccaacagagacggcagagactacttcatcaaccacatgacccaggccatccccttcgacgaccccagactggagagctgccagatcatcccccccgcccccagaaaggtggagatgagaagagaccccgtgctgggcttcggcttcgtggccggcagcgagaagcccgtggtggtgagaagcgtgacccccggcggccccagcgagggcaagctgatccccggcgaccagatcgtgatgatcaacgacgagcccgtgagcgccgcccccagagagagagtgatcgacctggtgagaagctgcaaggagagcatcctgctgaccgtgatccagccctaccccagccccaagagcgccttcatcagcgccgccaagaaggccagactgaagagcaaccccgtgaaggtgagattcagcgaggaggtgatcatcaacggccaggtgagcgagaccgtgaaggacaacagcctgctgttcatgcccaacgtgctgaaggtgtacctggagaacggccagaccaagagcttcagattcgactgcagcaccagcatcaaggacgtgatcctgaccctgcaggagaagctgagcatcaagggcatcgagcacttcagcctgatgctggagcagagaaccgagggcgccggcaccaagctgctgctgctgcacgagcaggagaccctgacccaggtgacccagagacccagcagccacaagatgagatgcctgttcagaatcagcttcgtgcccaaggaccccatcgacctgctgagaagagaccccgtggccttcgagtacctgtacgtgcagagctgcaacgacgtggtgcaggagagattcggccccgagctgaagtacgacatcgccctgagactggccgccctgcagatgtacatcgccaccgtgaccaccaagcagacccagaagatcagcctgaagtacatcgagaaggagtggggcctggagaccttcctgcccagcgccgtgctgcagagcatgaaggagaagaacatcaagaaggccctgagccacctggtgaaggccaaccagaacctggtgccccccggcaagaagctgagcgccctgcaggccaaggtgcactacctgaagttcctgagcgacctgagactgtacggcggcagagtgttcaaggccaccctggtgcaggccgagaagagaagcgaggtgaccctgctggtgggccccagatacggcatcagccacgtgatcaacaccaagaccaacctggtggccctgctggccgacttcagccacgtgaacagaatcgagatgttcagcgaggaggagagcctggtgagagtggagctgcacgtgctggacgtgaagcccatcaccctgctgatggagagcagcgacgccatgaacctggcctgcctgaccgccggctactacagactgctggtggacagcagaagaagcatcttcaacatggccaacaagaagaacaccgccacccaggagaccggccccgagaacaagggcaagcacaacctgctgggccccgactggaactgcatcccccagatgaccaccttcatcggcgagggcgagcaggaggcccagatcacctacatcgacagcaagcagaagaccgtggagatcaccgacagcaccatgtgccccaaggagcacagacacctgtacatcgacaacgcctacagcagcgacggcctgaaccagcagctgagccagcccggcgaggccccctgcgaggccgactacagaagcctggcccagagaagcctgctgaccctgagcggccccgagaccctgaagaaggcccaggagagccccagaggcgccaaggtgagcttcatcttcggcgacttcgccctggacgacggcatcagcccccccaccctgggctacgagaccctgctggacgagggccccgagatgctggagaagcagagaaacctgtacatcggcagcgccaacgacatgaagggcctggacctgacccccgaggccgagggcatccagttcgtggagaacagcgtgtacgccaacatcggcgacgtgaagagcttccaggccgccgagggcatcgaggagcccctgctgcacgacatctgctacgccgagaacaccgacgacgccgaggacgaggacgaggtgagctgcgaggaggacctggtggtgggcgagatgaaccagcccgccatcctgaacctgagcggcagcagcgacgacatcatcgacctgaccagcctgcccccccccgagggcgacgacaacgaggacgacttcctgctgagaagcctgaacatggccatcgccgcccccccccccggcttcagagacagcagcgacgaggaggacagccagagccaggccgccagcttccccgaggacaaggagaagggcagcagcctgcagaacgacgagatccccgtgagcctgatcgacgccgtgcccaccagcgccgagggcaagtgcgagaagggcctggacaacgccgtggtgagcaccctgggcgccctggaggccctgagcgtgagcgaggagcagcagaccagcgacaacagcggcgtggccatcctgagagcctacagccccgagagcagcagcgacagcggcaacgagaccaacagcagcgagatgaccgagagcagcgagctggccaccgcccagaagcagagcgagaacctgagcagaatgttcctggccacccacgagggctaccaccccctggccgaggagcagaccgagttccccgccagcaagacccccgccggcggcctgccccccaagagcagccacgccctggccgccagacccgccaccgacctgccccccaaggtggtgcccagcaagcagctgctgcacagcgaccacatggagatggagcccgagaccatggagaccaagagcgtgaccgactacttcagcaagctgcacatgggcagcgtggcctacagctgcaccagcaagagaaagagcaagctggccgacggcgagggcaaggccccccccaacggcaacaccaccggcaagaagcagcagggcaccaagaccgccgagatggaggaggaggccagcggcaagttcggcaccgtgagcagcagagacagccagcacctgagcaccttcaacctggagagaaccgccttcagaaaggacagccagagatggtacgtggccaccgagggcggcatggccgagaagagcggcctggaggccgccaccggcaagaccttccccagagccagcggcctgggcgccagagaggccgagggcaaggaggagggcgcccccgacggcgagaccagcgacggcagcggcctgggccagggcgacagattcctgaccgacgtgacctgcgccagcagcgccaaggacctggacaaccccgaggacgccgacagcagcacctgcgaccaccccagcaagctgcccgaggccgacgagagcgtggccagactgtgcgactaccacctggccaagagaatgagcagcctgcagagcgagggccacttcagcctgcagagcagccagggcagcagcgtggacgccggctgcggcaccggcagcagcggcagcgcctgcgccacccccgtggagagccccctgtgccccagcctgggcaagcacctgatccccgacgccagcggcaagggcgtgaactacatccccagcgaggagagagcccccggcctgcccaaccacggcgccaccttcaaggagctgcacccccagaccgagggcatgtgccccagaatgaccgtgcccgccctgcacaccgccatcaacaccgagcccctgttcggcaccctgagagacggctgccacagactgcccaagatcaaggagaccaccgtgtag

SEQ ID NO: 181867 - DNA, 3942 bp, Artificial Sequence
  derived and/or modified sequence
aagagccacagcccccacagaaccaagagcagcggctggcccccccccagcggcacctggggcctgagccaggtgcccccctacggctgggagatgaccgccaacagagacggcagagactacttcatcaaccacatgacccaggccatccccttcgacgaccccagactggagagctgccagatcatcccccccgcccccagaaaggtggagatgagaagagaccccgtgctgggcttcggcttcgtggccggcagcgagaagcccgtggtggtgagaagcgtgacccccggcggccccagcgagggcaagctgatccccggcgaccagatcgtgatgatcaacgacgagcccgtgagcgccgcccccagagagagagtgatcgacctggtgagaagctgcaaggagagcatcctgctgaccgtgatccagccctaccccagccccaagagcgccttcatcagcgccgccaagaaggccagactgaagagcaaccccgtgaaggtgagattcagcgaggaggtgatcatcaacggccaggtgagcgagaccgtgaaggacaacagcctgctgttcatgcccaacgtgctgaaggtgtacctggagaacggccagaccaagagcttcagattcgactgcagcaccagcatcaaggacgtgatcctgaccctgcaggagaagctgagcatcaagggcatcgagcacttcagcctgatgctggagcagagaaccgagggcgccggcaccaagctgctgctgctgcacgagcaggagaccctgacccaggtgacccagagacccagcagccacaagatgagatgcctgttcagaatcagcttcgtgcccaaggaccccatcgacctgctgagaagagaccccgtggccttcgagtacctgtacgtgcagagctgcaacgacgtggtgcaggagagattcggccccgagctgaagtacgacatcgccctgagactggccgccctgcagatgtacatcgccaccgtgaccaccaagcagacccagaagatcagcctgaagtacatcgagaaggagtggggcctggagaccttcctgcccagcgccgtgctgcagagcatgaaggagaagaacatcaagaaggccctgagccacctggtgaaggccaaccagaacctggtgccccccggcaagaagctgagcgccctgcaggccaaggtgcactacctgaagttcctgagcgacctgagactgtacggcggcagagtgttcaaggccaccctggtgcaggccgagaagagaagcgaggtgaccctgctggtgggccccagatacggcatcagccacgtgatcaacaccaagaccaacctggtggccctgctggccgacttcagccacgtgaacagaatcgagatgttcagcgaggaggagagcctggtgagagtggagctgcacgtgctggacgtgaagcccatcaccctgctgatggagagcagcgacgccatgaacctggcctgcctgaccgccggctactacagactgctggtggacagcagaagaagcatcttcaacatggccaacaagaagaacaccgccacccaggagaccggccccgagaacaagggcaagcacaacctgctgggccccgactggaactgcatcccccagatgaccaccttcatcggcgagggcgagcaggaggcccagatcacctacatcgacagcaagcagaagaccgtggagatcaccgacagcaccatgtgccccaaggagcacagacacctgtacatcgacaacgcctacagcagcgacggcctgaaccagcagctgagccagcccggcgaggccccctgcgaggccgactacagaagcctggcccagagaagcctgctgaccctgagcggccccgagaccctgaagaaggcccaggagagccccagaggcgccaaggtgagcttcatcttcggcgacttcgccctggacgacggcatcagcccccccaccctgggctacgagaccctgctggacgagggccccgagatgctggagaagcagagaaacctgtacatcggcagcgccaacgacatgaagggcctggacctgacccccgaggccgagggcatccagttcgtggagaacagcgtgtacgccaacatcggcgacgtgaagagcttccaggccgccgagggcatcgaggagcccctgctgcacgacatctgctacgccgagaacaccgacgacgccgaggacgaggacgaggtgagctgcgaggaggacctggtggtgggcgagatgaaccagcccgccatcctgaacctgagcggcagcagcgacgacatcatcgacctgaccagcctgcccccccccgagggcgacgacaacgaggacgacttcctgctgagaagcctgaacatggccatcgccgcccccccccccggcttcagagacagcagcgacgaggaggacagccagagccaggccgccagcttccccgaggacaaggagaagggcagcagcctgcagaacgacgagatccccgtgagcctgatcgacgccgtgcccaccagcgccgagggcaagtgcgagaagggcctggacaacgccgtggtgagcaccctgggcgccctggaggccctgagcgtgagcgaggagcagcagaccagcgacaacagcggcgtggccatcctgagagcctacagccccgagagcagcagcgacagcggcaacgagaccaacagcagcgagatgaccgagagcagcgagctggccaccgcccagaagcagagcgagaacctgagcagaatgttcctggccacccacgagggctaccaccccctggccgaggagcagaccgagttccccgccagcaagacccccgccggcggcctgccccccaagagcagccacgccctggccgccagacccgccaccgacctgccccccaaggtggtgcccagcaagcagctgctgcacagcgaccacatggagatggagcccgagaccatggagaccaagagcgtgaccgactacttcagcaagctgcacatgggcagcgtggcctacagctgcaccagcaagagaaagagcaagctggccgacggcgagggcaaggccccccccaacggcaacaccaccggcaagaagcagcagggcaccaagaccgccgagatggaggaggaggccagcggcaagttcggcaccgtgagcagcagagacagccagcacctgagcaccttcaacctggagagaaccgccttcagaaaggacagccagagatggtacgtggccaccgagggcggcatggccgagaagagcggcctggaggccgccaccggcaagaccttccccagagccagcggcctgggcgccagagaggccgagggcaaggaggagggcgcccccgacggcgagaccagcgacggcagcggcctgggccagggcgacagattcctgaccgacgtgacctgcgccagcagcgccaaggacctggacaaccccgaggacgccgacagcagcacctgcgaccaccccagcaagctgcccgaggccgacgagagcgtggccagactgtgcgactaccacctggccaagagaatgagcagcctgcagagcgagggccacttcagcctgcagagcagccagggcagcagcgtggacgccggctgcggcaccggcagcagcggcagcgcctgcgccacccccgtggagagccccctgtgccccagcctgggcaagcacctgatccccgacgccagcggcaagggcgtgaactacatccccagcgaggagagagcccccggcctgcccaaccacggcgccaccttcaaggagctgcacccccagaccgagggcatgtgccccagaatgaccgtgcccgccctgcacaccgccatcaacaccgagcccctgttcggcaccctgagagacggctgccacagactgcccaagatcaaggagaccaccggctag

SEQ ID NO: 181868 - protein, 526 aa, Artificial Sequence
  derived and/or modified sequence
MDVRFYPPPAQPAAAPDAPCLGPSPCLDPYYCNKFDGENMYMSMTEPSQDYVPASQSYPGPSLESEDFNIPPITPPSLPDHSLVHLNEVESGYHSLCHPMNHNGLLPFHPQNMDLPEITVSNMLGQDGTLLSNSISVMPDIRNPEGTQYSSHPQMAAMRPRGQPADIRQQPGMMPHGQLTTINQSQLSAQLGLNMGGSNVPHNSPSPPGSKSATPSPSSSVHEDEGDDTSKINGGEKRPASDMGKKPKTPKKKKKKDPNEPQKPVSAYALFFRDTQAAIKGQNPNATFGEVSKIVASMWDGLGEEQKQVYKKKTEAAKKEYLKQLAAYRASLVSKSYSEPVDVKTSQPPQLINSKPSVFHGPSQAHSALYLSSHYHQQPGMNPHLTAMHPSLPRNIAPKPNNQMPVTVSIANMAVSPPPPLQISPPLHQHLNMQQHQPLTMQQPLGNQLPMQVQSALHSPTMQQGFTLQPDYQTIINPTSTAAQVVTQAMEYVRSGCRNPPPQPVDWNNDYCSSGGMQRDKALYLT

SEQ ID NO: 181869 - protein, 276 aa, Artificial Sequence
  derived and/or modified sequence
MGKKPKTPKKKKKKDPNEPQKPVSAYALFFRDTQAAIKGQNPNATFGEVSKIVASMWDGLGEEQKQVYKKKTEAAKKEYLKQLAAYRASLVSKSYSEPVDVKTSQPPQLINSKPSVFHGPSQAHYHQQPGMNPHLTAMHPSLPRNIAPKPNNQMPVTVSIANMAVSPPPPLQISPPLHQHLNMQQHQPLTMQQPLGNQLPMQVQSALHSPTMQQGFTLQPDYQTIINPTSTAAQVVTQAMEYVRSGCRNPPPQPVDWNNDYCSSGGMQRDKALYLT

SEQ ID NO: 181870 - DNA, 1581 bp, Artificial Sequence
  derived and/or modified sequence
atggacgtgagattctaccccccccccgcccagcccgccgccgcccccgacgccccctgcctgggccccagcccctgcctggacccctactactgcaacaagttcgacggcgagaacatgtacatgagcatgaccgagcccagccaggactacgtgcccgccagccagagctaccccggccccagcctggagagcgaggacttcaacatcccccccatcaccccccccagcctgcccgaccacagcctggtgcacctgaacgaggtggagagcggctaccacagcctgtgccaccccatgaaccacaacggcctgctgcccttccacccccagaacatggacctgcccgagatcaccgtgagcaacatgctgggccaggacggcaccctgctgagcaacagcatcagcgtgatgcccgacatcagaaaccccgagggcacccagtacagcagccacccccagatggccgccatgagacccagaggccagcccgccgacatcagacagcagcccggcatgatgccccacggccagctgaccaccatcaaccagagccagctgagcgcccagctgggcctgaacatgggcggcagcaacgtgccccacaacagccccagcccccccggcagcaagagcgccacccccagccccagcagcagcgtgcacgaggacgagggcgacgacaccagcaagatcaacggcggcgagaagagacccgccagcgacatgggcaagaagcccaagacccccaagaagaagaagaagaaggaccccaacgagccccagaagcccgtgagcgcctacgccctgttcttcagagacacccaggccgccatcaagggccagaaccccaacgccaccttcggcgaggtgagcaagatcgtggccagcatgtgggacggcctgggcgaggagcagaagcaggtgtacaagaagaagaccgaggccgccaagaaggagtacctgaagcagctggccgcctacagagccagcctggtgagcaagagctacagcgagcccgtggacgtgaagaccagccagcccccccagctgatcaacagcaagcccagcgtgttccacggccccagccaggcccacagcgccctgtacctgagcagccactaccaccagcagcccggcatgaacccccacctgaccgccatgcaccccagcctgcccagaaacatcgcccccaagcccaacaaccagatgcccgtgaccgtgagcatcgccaacatggccgtgagcccccccccccccctgcagatcagcccccccctgcaccagcacctgaacatgcagcagcaccagcccctgaccatgcagcagcccctgggcaaccagctgcccatgcaggtgcagagcgccctgcacagccccaccatgcagcagggcttcaccctgcagcccgactaccagaccatcatcaaccccaccagcaccgccgcccaggtggtgacccaggccatggagtacgtgagaagcggctgcagaaacccccccccccagcccgtggactggaacaacgactactgcagcagcggcggcatgcagagagacaaggccctgtacctgacctag

SEQ ID NO: 181871 - DNA, 831 bp, Artificial Sequence
  derived and/or modified sequence
atgggcaagaagcccaagacccccaagaagaagaagaagaaggaccccaacgagccccagaagcccgtgagcgcctacgccctgttcttcagagacacccaggccgccatcaagggccagaaccccaacgccaccttcggcgaggtgagcaagatcgtggccagcatgtgggacggcctgggcgaggagcagaagcaggtgtacaagaagaagaccgaggccgccaagaaggagtacctgaagcagctggccgcctacagagccagcctggtgagcaagagctacagcgagcccgtggacgtgaagaccagccagcccccccagctgatcaacagcaagcccagcgtgttccacggccccagccaggcccactaccaccagcagcccggcatgaacccccacctgaccgccatgcaccccagcctgcccagaaacatcgcccccaagcccaacaaccagatgcccgtgaccgtgagcatcgccaacatggccgtgagcccccccccccccctgcagatcagcccccccctgcaccagcacctgaacatgcagcagcaccagcccctgaccatgcagcagcccctgggcaaccagctgcccatgcaggtgcagagcgccctgcacagccccaccatgcagcagggcttcaccctgcagcccgactaccagaccatcatcaaccccaccagcaccgccgcccaggtggtgacccaggccatggagtacgtgagaagcggctgcagaaacccccccccccagcccgtggactggaacaacgactactgcagcagcggcggcatgcagagagacaaggccctgtacctgacctag

SEQ ID NO: 181872 - DNA, 1581 bp, Artificial Sequence
  derived and/or modified sequence
atggacgttcgattttacccgccacctgctcagccagccgctgcacctgacgccccgtgtctcggccccagcccttgtctggacccttactactgcaacaagttcgacggcgaaaacatgtatatgtcgatgactgagccctcccaggactatgtcccagcaagtcagagctaccccggtccttctttggaatcagaggacttcaatatccctcctataacgcctccctctctccccgatcatagtttggtgcacctgaacgaagtggagtctgggtaccatagtctgtgtcatccaatgaaccataacgggctgttgcccttccatcctcagaatatggatctacccgaaataactgtgtcaaacatgctcggtcaggacgggaccctgctctccaacagtatcagcgtgatgcctgatattaggaacccagaagggacacagtatagtagccacccacagatggccgctatgcgcccccggggccagcctgcagatatccgccagcagcccggaatgatgccgcacggccagctgactactatcaatcaatcgcagctgtccgcacagttaggcctgaacatggggggctcaaacgtgcctcacaattcaccatctcctccaggttctaagtccgccacccccagcccttcctctagtgtccatgaagacgaaggtgacgacacgagcaaaattaacgggggggagaagcgaccagccagtgatatgggcaaaaaacctaagacccctaagaaaaaaaaaaaaaaggaccctaacgagcctcagaagccagtgtccgcctatgcactcttctttcgagacactcaagcggctattaagggacagaaccctaatgcaaccttcggagaagtttccaaaatcgtggccagcatgtgggacggactcggtgaagagcaaaaacaggtctataagaagaaaacggaagctgccaagaaggagtacttgaagcaacttgccgcctatcgcgcctccttggtctcaaagagctattcagagccagtggacgtcaagacatcccagccacctcagctcatcaattccaaaccctctgtgtttcacggaccatctcaagcccattcagcactgtacctatccagtcactatcaccaacagcctggcatgaatcctcacctgaccgccatgcacccaagcttacctaggaacatcgcgcccaaacctaataaccagatgccagtcacagtctccatcgccaacatggccgtgtctccccctccaccgcttcaaatcagccccccactacaccagcacctgaatatgcaacagcaccagcccctcaccatgcaacaaccattgggcaatcagttaccgatgcaggtgcaatccgcactgcactccccaacgatgcaacaaggatttacattgcagccagactatcagacaatcatcaatccaactagtactgcagcccaggtcgtgactcaggcaatggaatacgtcaggtccggctgcaggaacccaccgcctcagcctgtggattggaacaacgactattgttccagtgggggcatgcagcgcgacaaagcactgtacttaacttag

SEQ ID NO: 181873 - DNA, 831 bp, Artificial Sequence
  derived and/or modified sequence
atgggaaagaaacctaaaacccctaaaaaaaagaaaaagaaagatccaaacgagccccaaaagccagtgtccgcttacgctctgttctttagagacacccaggcagctatcaaaggccagaatccgaatgctacctttggtgaagtatcaaagattgtggcaagcatgtgggatggtttgggcgaggagcagaaacaggtctacaagaagaagaccgaagccgccaaaaaggagtatctgaagcaactcgccgcttaccgggcgtcactggtatcaaagagctacagcgaacctgtcgatgttaagacctcacagccgccccagctcataaactcaaagccttcggttttccatggtccatcacaggcccactaccaccaacaacccgggatgaacccccatctgacagccatgcacccgtccctccccagaaatatcgccccaaagcccaataaccagatgcccgtgacagtatcaatagccaatatggccgtgtcccctccaccaccactgcaaattagtccaccactgcaccagcatcttaacatgcaacagcatcagccattaacaatgcagcagcccttgggcaatcagcttccaatgcaagtgcagtccgccttgcattcacccacaatgcagcagggtttcactttgcagcccgactaccagacaattattaacccaacgtccacagctgcccaagtggttacccaagcgatggagtatgtgcggtcagggtgtcggaaccccccaccgcagcccgttgactggaataatgattattgctccagcggcggcatgcagcgggataaggccctgtatctgacatag

SEQ ID NO: 181874 - DNA, 1581 bp, Artificial Sequence
  derived and/or modified sequence
atggatgtgcgcttctacccacctccagcccagcctgctgctgccccagatgccccctgcctgggccccagcccctgcctggacccctactactgcaacaagtttgatggagagaacatgtacatgtccatgacagagcccagccaggactatgtgcctgccagccagagctacccaggccccagcctggagagcgaggacttcaacatcccccccatcaccccacccagcctgcctgaccacagcctggtgcacctgaatgaggtggagagcggctaccacagcctgtgccaccccatgaaccacaacggcctgctgcccttccacccccagaacatggacctgcctgagatcaccgtgagcaacatgctgggccaggacggcaccctgctgagcaacagcatctctgtgatgccagacatccggaaccctgagggcacccagtacagcagccacccccagatggccgccatgaggccccggggccagcctgctgacatccggcagcagcccggcatgatgccccacggccagctgaccaccatcaaccagagccagctgagcgcccagctgggcctgaacatgggcggcagcaatgtgccccacaacagccccagccccccaggcagcaagagcgccacccccagccccagcagctctgtgcatgaagatgaaggagatgacaccagcaagatcaatggaggagagaagaggcctgccagtgacatgggcaagaagcccaagacccccaagaagaagaagaagaaggaccccaatgagccccagaagcctgtgtctgcctatgccctcttcttccgggacacccaggccgccatcaagggccagaaccccaatgccaccttcggggaggtgtccaagatcgtggcctccatgtgggatggcctgggggaggagcagaagcaggtgtacaagaagaagacagaggccgccaagaaggagtacctgaagcagctggccgcctaccgggccagcctggtgtccaagagctacagcgagcctgtggatgtgaagaccagccagcccccccagctgatcaacagcaagcccagcgtcttccacggccccagccaggcccacagcgccctgtacctgagcagccactaccaccagcagcccggcatgaacccccacctgacagccatgcaccccagcctgcccaggaacatcgcccccaagcccaacaaccagatgcctgtgacagtgtccatcgccaacatggctgtgtccccacctccacccctgcagatcagcccccccctgcaccagcacctgaacatgcagcagcaccagcccctgaccatgcagcagcccctgggcaaccagctgcccatgcaggtgcagagcgccctgcacagccccaccatgcagcagggcttcaccctgcagcctgactaccagaccatcatcaaccccaccagcacagctgcccaggtggtgacccaggccatggagtatgtgcgcagcggctgcaggaaccccccaccccagcctgtggactggaacaatgactactgcagcagcggcggcatgcagagggacaaggccctgtacctgacctag

SEQ ID NO: 181875 - DNA, 831 bp, Artificial Sequence
  derived and/or modified sequence
atgggcaagaagcccaagacccccaagaagaagaagaagaaggaccccaatgagccccagaagcctgtgtctgcctatgccctcttcttccgggacacccaggccgccatcaagggccagaaccccaatgccaccttcggggaggtgtccaagatcgtggcctccatgtgggatggcctgggggaggagcagaagcaggtgtacaagaagaagacagaggccgccaagaaggagtacctgaagcagctggccgcctaccgggccagcctggtgtccaagagctacagcgagcctgtggatgtgaagaccagccagcccccccagctgatcaacagcaagcccagcgtcttccacggccccagccaggcccactaccaccagcagcccggcatgaacccccacctgacagccatgcaccccagcctgcccaggaacatcgcccccaagcccaacaaccagatgcctgtgacagtgtccatcgccaacatggctgtgtccccacctccacccctgcagatcagcccccccctgcaccagcacctgaacatgcagcagcaccagcccctgaccatgcagcagcccctgggcaaccagctgcccatgcaggtgcagagcgccctgcacagccccaccatgcagcagggcttcaccctgcagcctgactaccagaccatcatcaaccccaccagcacagctgcccaggtggtgacccaggccatggagtatgtgcgcagcggctgcaggaaccccccaccccagcctgtggactggaacaatgactactgcagcagcggcggcatgcagagggacaaggccctgtacctgacctag

SEQ ID NO: 181876 - DNA, 1581 bp, Artificial Sequence
  derived and/or modified sequence
atggacgtgcggttctaccccccccccgcccagcccgccgccgccccagatgcgccttgcctgggcccttcaccttgcctagacccctattactgtaacaagtttgatggcgagaacatgtatatgtcaatgactgagccctcacaggactacgttcctgccagccaatcttatcctgggccttctcttgagagcgaggatttcaacattcctccaatcacacccccttctttgcctgatcactctctggttcacctgaatgaagtggagagtgggtaccacagcctctgtcaccctatgaatcataatgggttgttaccctttcaccctcagaatatggatctgcccgagatcactgtgtctaatatgctcggacaggatggaactctgttgtccaacagcatctcagtgatgccggatattcgtaaccctgaaggtacccaatattcaagccatccccagatggcggctatgcgccctaggggccagcccgccgatattcgtcagcagcctggcatgatgccacatggacagctcaccacaattaaccagagtcaactctccgcccagctcggtctcaacatgggtggctccaatgtgcctcataactctcccagcccaccaggttccaaatctgcgactcccagcccttctagttctgtccacgaagatgaaggcgacgatacttctaagataaatggtggcgaaaagcgaccggcatccgacatgggcaagaagccgaagacaccaaaaaagaagaaaaaaaaagatccgaacgaacctcagaaacccgtatctgcgtacgccctttttttccgagacactcaagccgccatcaaaggccagaaccctaacgcaaccttcggcgaggtcagcaaaatagtggcaagcatgtgggatgggctgggggaggagcaaaaacaggtgtataagaaaaaaacggaagctgccaagaaggagtacctcaagcagttggccgcataccgggcctctctggtctccaaatcttattccgagcctgtagacgttaagacctctcagcctccacagttaattaattccaagccatcagtgttccacggaccttcacaagcccattccgcactctacttgtcctcacactaccatcagcagccaggcatgaacccacacctcacggctatgcacccatctttaccacgaaacatcgctccaaaacctaataatcagatgcctgtaaccgtgtctatagccaacatggccgtgagtccaccgcccccgttgcagataagcccccccctgcatcaacaccttaatatgcagcaacatcagcccctgacgatgcagcagcctctaggcaaccaactcccaatgcaggtgcaatccgccctgcattctcctacgatgcagcaaggcttcaccctgcagcctgattatcaaactatcataaaccccactagtaccgcagcacaggtcgtgacacaggcaatggaatacgtccgctccggctgtcgcaacccaccaccccaaccggtcgactggaacaatgactattgcagcagcgggggcatgcagcgtgacaaagctctgtaccttacatag

SEQ ID NO: 181877 - DNA, 831 bp, Artificial Sequence
  derived and/or modified sequence
atgggcaagaagcccaagacccccaagaagaagaagaagaaggaccctaacgagcctcagaagcccgtctccgcttatgctctgttctttcgggacactcaagccgccattaagggccagaaccctaatgccacgtttggcgaagttagcaagatcgtcgcaagcatgtgggacgggcttggagaagagcagaagcaggtctataagaagaaaactgaagcagccaagaaggagtatcttaagcaactggccgcctatcgggcaagtctggtgagcaagagttactccgagcccgtggatgtgaaaacgagccagcccccccagctgatcaattcaaaaccatccgtgttccacggccccagtcaggcacactatcaccaacagccgggaatgaatccccacctaaccgcaatgcatccatcactgccaaggaatattgctcccaaaccaaacaaccagatgccagttactgtatctatagccaacatggcagtctccccgccacctcccttacaaatatcacccccccttcaccagcacttgaacatgcagcaacatcagccactcaccatgcaacagcctttaggaaaccagctgcctatgcaggtgcagtccgcactacattcccccacaatgcaacagggcttcactttacagcccgattatcagactattattaacccaacatcaactgctgcacaggtggtaacgcaggccatggaatatgtgcggtccggttgcaggaaccctcctccgcagcccgtcgattggaataacgattattgtagctccggcggcatgcaacgcgacaaagccttgtaccttacttag

SEQ ID NO: 181878 - DNA, 1581 bp, Artificial Sequence
  derived and/or modified sequence
atggacgtaagattttaccccccaccggcacagcccgctgcagcccctgatgcaccctgtcttgggccttctccttgcctcgacccctactactgcaacaagtttgatggggaaaatatgtacatgtccatgaccgagcctagtcaagattatgtcccagcctctcagtcttatccaggaccgtcactggagagtgaagacttcaatatcccacctattacacctccctccctgcctgatcactccctggtgcatcttaatgaggttgagagcgggtatcactctctgtgtcaccccatgaatcataatgggctgctgccttttcatccacagaatatggacctccctgaaatcaccgtgtctaacatgttgggacaggacggaaccctcctgagcaacagcatcagtgtcatgccggacatccgtaatcccgagggtactcagtatagttcccacccacagatggcagccatgcgtcccaggggacaacctgctgatatccgccagcagccaggcatgatgccccacggtcagcttacaaccattaaccaaagccaactctccgcgcagttagggctgaacatgggaggcagtaacgtgcctcacaactctccatccccgcctggctctaagagtgccacgccatcaccttccagcagcgtgcacgaagacgaaggcgatgatacgtccaaaatcaatggaggagagaagaggccagcgtctgacatggggaagaagccaaagacccctaaaaagaagaagaaaaaggaccctaatgaaccccagaagcccgtttccgcgtatgccttgttctttcgggacacgcaggcagctattaaggggcaaaatcccaatgctacttttggagaggtgtcaaagatcgtagctagcatgtgggacggcttgggggaggaacagaagcaggtgtacaaaaagaaaacggaggctgccaagaaggagtacctgaagcaactggcggcttatcgcgcttcactcgtaagcaagtcctactcagaaccagttgacgtgaaaacctcgcagcccccacaactgatcaacagcaagccctccgttttccacggacccagtcaagctcactctgccctttacctgtcctcacactatcatcagcagcctggcatgaacccccatctgactgctatgcaccctagccttccacggaacatcgctccaaaaccgaacaaccagatgccagttacagtctcaatcgcgaacatggccgtgagccctccgcctccgctccagataagcccacccctacatcagcacctgaatatgcagcaacatcagcccctgactatgcagcagcccctcggaaatcagctcccaatgcaggtgcagtccgcgctacacagtcccacaatgcaacagggcttcaccctccaacccgactatcagacaatcatcaatcctacgtccaccgccgcacaggtggtgacacaagcaatggagtatgtgcgctccggctgtaggaatccaccccctcagcctgtggactggaataatgactactgctctagcggaggcatgcagcgcgataaagcgttgtacctcacttag

SEQ ID NO: 181879 - DNA, 831 bp, Artificial Sequence
  derived and/or modified sequence
atggggaagaaacctaaaactcctaagaaaaagaagaaaaaggacccaaacgagccacagaagcccgtctccgcctacgccctcttctttcgggacactcaggctgctattaagggacagaatccaaacgccacctttggtgaggtcagcaaaattgtggcatctatgtgggacgggctgggggaagaacagaagcaggtgtacaagaagaaaacagaggccgcaaaaaaagaatacctaaaacagctagccgcttaccgtgccagcttggtaagcaagagttactctgagccagtggacgtaaaaacatcacagccccctcaattgattaactctaaaccctctgtctttcacggaccctctcaagcccattatcatcagcagcctgggatgaatcctcatctgactgcaatgcacccctccctgcctcgaaacatcgcaccaaagcccaataaccagatgccggtaactgtatccatagcaaatatggcggtgtcgcccccaccccctctgcaaatttctccaccactgcaccaacacctaaacatgcagcagcaccagccattaaccatgcagcaacctctcggcaatcagctgcccatgcaggtacaatccgcccttcactctccaactatgcaacaggggtttactctccagccagattaccagactatcataaaccctacgagtaccgctgcacaggtggtcacccaggccatggagtacgtgaggtccggctgcagaaaccccccaccccagcctgtggactggaataatgattactgctcgagcggaggaatgcagcgcgacaaggccttgtatttgacgtag

SEQ ID NO: 181880 - DNA, 4131 bp, Artificial Sequence
  derived and/or modified sequence
ggtgcgcgccgcggcttgggggagagttgagcgcttttcccccctcttttttttttttttcctcttcttcttaaacaaaccacaaacggatgtgagggaaggaaggtgtttcttttactcctgagcccagacacctcactctgttccgtctaagcttgttttgctgaacacttttttttaaaaaaggaaaaagaaaaggagttgcttgatgtgagagtgaaatggacgtaagattttatccacctccagcccagcccgccgctgcgcccgacgctccctgtctgggaccttctccctgcctggacccctactattgcaacaagtttgacggtgagaacatgtatatgagcatgacagagccgagccaggactatgtgccagccagccagtcctaccctggtccaagcctggaaagtgaagacttcaacattccaccaattactcctccttccctcccagaccactcgctggtgcacctgaatgaagttgagtctggttaccattctctgtgtcaccccatgaaccataatggcctgctaccatttcatccacaaaacatggacctccctgaaatcacagtctccaatatgctgggccaggatggaacactgctttctaattccatttctgtgatgccagatatacgaaacccagaaggaactcagtacagttcccatcctcagatggcagccatgagaccaaggggccagcctgcagacatcaggcagcagccaggaatgatgccacatggccagctgactaccattaaccagtcacagctaagtgctcaacttggtttgaatatgggaggaagcaatgttccccacaactcaccatctccacctggaagcaagtctgcaactccttcaccatccagttcagtgcatgaagatgaaggcgatgatacctctaagatcaatggtggagagaagcggcctgcctctgatatggggaaaaaaccaaaaactcccaaaaagaagaagaagaaggatcccaatgagccccagaagcctgtgtctgcctatgcgttattctttcgtgatactcaggccgccatcaagggccaaaatccaaacgctacctttggcgaagtctctaaaattgtggcttcaatgtgggacggtttaggagaagagcaaaaacaggtctataaaaagaaaaccgaggctgcgaagaaggagtacctgaagcaactcgcagcatacagagccagccttgtatccaagagctacagtgaacctgttgacgtgaagacatctcaacctcctcagctgatcaattcgaagccgtcggtgttccatgggcccagccaggcccactcggccctgtacctaagttcccactatcaccaacaaccgggaatgaatcctcacctaactgccatgcatcctagtctccccaggaacatagcccccaagccgaataaccaaatgccagtgactgtctctatagcaaacatggctgtgtcccctcctcctcccctccagatcagcccgcctcttcaccagcatctcaacatgcagcagcaccagccgctcaccatgcagcagccccttgggaaccagctccccatgcaggtccagtctgccttacactcacccaccatgcagcaaggatttactcttcaacccgactatcagactattatcaatcctacatctacagctgcacaagttgtcacccaggcaatggagtatgtgcgttcggggtgcagaaatcctcccccacaaccggtggactggaataacgactactgcagtagtgggggcatgcagagggacaaagcactgtaccttacttgagaatctgaacacctcttctttccactgaggaattcagggaagtgttttcaccatggattgctttgtacagtcaaggcagttctccattttattagaaaatacaagttgctaagcacttaggaccatttgagcttgtgggtcacccactctggaagaaatagtcatgcttctttattatttttttaatcctttatggacattgtttttcttcttccctgaaggaaatttggaccattcagattttatgttggttttttgctgtgaagtgctgcgctctagtaactgccttagcaactgtagatgtctcggataaaagtcctggattttccattggttttcataatgggtgtttatatgaaactactaaagactttttaaatggcttgatgtagcagtcatagcaagtttgtaaatagcatctatgttacactctcctagagtataaaatgtgaatgtttttgtagctaaattgtaattgaaactggctcattccagtttattgatttcacaataggggttaaattggcaaacattcatatttttacttcatttttaaaacaactgactgatagttctatattttcaaaatatttgaaaataaaaagtattcccaagtgattttaatttaaaaacaaattggctttgtctcattgatcagacaaaaagaaactagtattaagggaagcgcaaacacatttattttgtactgcagaaaaattgcttttttgtatcactttttgtgtaatggttagtaaatgtcatttaagtccttttatgtataaaactgccaaatgcttacctggtattttattagatgcagaaacagattggaaacagctaaattacaacttttacatatggctctgtcttattgtttcttcatactgtgtctgtatttaatctttttttatggaacctgttgcgcctatttatgaaataataaatataggtgtttgtaagtaaatttgttagtatttgaaagaggtttctttgatgttttaacttttgctggcaaaaaaaaattcacgcttggtgtgaatactttattatttagtttttacagtaacatgaataaagccaaacctgcttttcatttagcagcaaattaaagtaaccagtccttatttctgcatttctttggttgatgcaaacaaaaaactattatatttaagaactttatttcttcatacgacataacagaattgccctccaagtcacacaagctccaagactaaacaaacagacaggtcctctgtcttaaaaaggttacttcttggttctcagctggttctagtcaattctgaaccaccaccccccgccccccgcaaaaaagtaaaagtcaaaccaaacttcctcaagctgcatgcttttcacaaaatccagaaagcatttaagaattgaactaggggctggaagaagtgaaagggaagcatctaaaaatgaaaggtgagtaaccagatagcaaaagaaaagggaaagccatccaaatttgaaagctgttgatagaaattgagattcttgctgtcttttgtgcctctacaagctactactcattccagaattcctgggtcttccaagaggattcttaaggtaccagagatttgctagggaaccaaaagtgcttgagaatctgcctgagggcttgcatagctttcacattaaaaaaagaaaaagctagcagatttactcctttttaggggatcatatcaagaaagttagtctggttggaaaccaagagaatggctgatgtctctttcttggaatatgtgaaataaatttagcagtttaactaaatacaaatatatgcattgtgtaatccactcagaattaaacagacaaaaggtatgcttgctttggaatgattttaggcattgtacaaccttgaatcacttgagcatgtaataactaataaataatgcagatccatgtgattattaaaatgactgtagctgagagctctaattttcctgtcttgaaactgtataagaactcatgtgattaagttcacagtttattgtttgtctgtttagtattttagaaatataccagcactactaattaactaatgtcttttatttattatattatgataaagtaaaaatttcacttgcattaagtctaaactgagaaggtaattactgggaggagaatgagcagctttgactttgacaggcggtttgtgcaggaaagcacagtgccgtgttgtttacagcttttctagagcagctgtgcgaccagggtagagagtgttgaaattcaataccaaatacagtaaaaacaaatgtaaataaaagaaaacacatcatcaataaaactgttattatgcgtg

SEQ ID NO: 181881 - DNA, 4107 bp, Artificial Sequence
  derived and/or modified sequence
ggtgcgcgccgcggcttgggggagagttgagcgcttttcccccctcttttttttttttttcctcttcttcttaaacaaaccacaaacggatgtgagggaaggaaggtgtttcttttactcctgagcccagacacctcactctgttccgtctaagcttgttttgctgaacacttttttttaaaaaaggaaaaagaaaaggagttgcttgatgtgagagtgaaatggacgtaagattttatccacctccagcccagcccgccgctgcgcccgacgctccctgtctgggaccttctccctgcctggacccctactattgcaacaagtttgacggtgagaacatgtatatgagcatgacagagccgagccaggactatgtgccagccagccagtcctaccctggtccaagcctggaaagtgaagacttcaacattccaccaattactcctccttccctcccagaccactcgctggtgcacctgaatgaagttgagtctggttaccattctctgtgtcaccccatgaaccataatggcctgctaccatttcatccacaaaacatggacctccctgaaatcacagtctccaatatgctgggccaggatggaacactgctttctaattccatttctgtgatgccagatatacgaaacccagaaggaactcagtacagttcccatcctcagatggcagccatgagaccaaggggccagcctgcagacatcaggcagcagccaggaatgatgccacatggccagctgactaccattaaccagtcacagctaagtgctcaacttggtttgaatatgggaggaagcaatgttccccacaactcaccatctccacctggaagcaagtctgcaactccttcaccatccagttcagtgcatgaagatgaaggcgatgatacctctaagatcaatggtggagagaagcggcctgcctctgatatggggaaaaaaccaaaaactcccaaaaagaagaagaagaaggatcccaatgagccccagaagcctgtgtctgcctatgcgttattctttcgtgatactcaggccgccatcaagggccaaaatccaaacgctacctttggcgaagtctctaaaattgtggcttcaatgtgggacggtttaggagaagagcaaaaacaggtctataaaaagaaaaccgaggctgcgaagaaggagtacctgaagcaactcgcagcatacagagccagccttgtatccaagagctacagtgaacctgttgacgtgaagacatctcaacctcctcagctgatcaattcgaagccgtcggtgttccatgggcccagccaggcccactatcaccaacaaccgggaatgaatcctcacctaactgccatgcatcctagtctccccaggaacatagcccccaagccgaataaccaaatgccagtgactgtctctatagcaaacatggctgtgtcccctcctcctcccctccagatcagcccgcctcttcaccagcatctcaacatgcagcagcaccagccgctcaccatgcagcagccccttgggaaccagctccccatgcaggtccagtctgccttacactcacccaccatgcagcaaggatttactcttcaacccgactatcagactattatcaatcctacatctacagctgcacaagttgtcacccaggcaatggagtatgtgcgttcggggtgcagaaatcctcccccacaaccggtggactggaataacgactactgcagtagtgggggcatgcagagggacaaagcactgtaccttacttgagaatctgaacacctcttctttccactgaggaattcagggaagtgttttcaccatggattgctttgtacagtcaaggcagttctccattttattagaaaatacaagttgctaagcacttaggaccatttgagcttgtgggtcacccactctggaagaaatagtcatgcttctttattatttttttaatcctttatggacattgtttttcttcttccctgaaggaaatttggaccattcagattttatgttggttttttgctgtgaagtgctgcgctctagtaactgccttagcaactgtagatgtctcggataaaagtcctggattttccattggttttcataatgggtgtttatatgaaactactaaagactttttaaatggcttgatgtagcagtcatagcaagtttgtaaatagcatctatgttacactctcctagagtataaaatgtgaatgtttttgtagctaaattgtaattgaaactggctcattccagtttattgatttcacaataggggttaaattggcaaacattcatatttttacttcatttttaaaacaactgactgatagttctatattttcaaaatatttgaaaataaaaagtattcccaagtgattttaatttaaaaacaaattggctttgtctcattgatcagacaaaaagaaactagtattaagggaagcgcaaacacatttattttgtactgcagaaaaattgcttttttgtatcactttttgtgtaatggttagtaaatgtcatttaagtccttttatgtataaaactgccaaatgcttacctggtattttattagatgcagaaacagattggaaacagctaaattacaacttttacatatggctctgtcttattgtttcttcatactgtgtctgtatttaatctttttttatggaacctgttgcgcctatttatgaaataataaatataggtgtttgtaagtaaatttgttagtatttgaaagaggtttctttgatgttttaacttttgctggcaaaaaaaaattcacgcttggtgtgaatactttattatttagtttttacagtaacatgaataaagccaaacctgcttttcatttagcagcaaattaaagtaaccagtccttatttctgcatttctttggttgatgcaaacaaaaaactattatatttaagaactttatttcttcatacgacataacagaattgccctccaagtcacacaagctccaagactaaacaaacagacaggtcctctgtcttaaaaaggttacttcttggttctcagctggttctagtcaattctgaaccaccaccccccgccccccgcaaaaaagtaaaagtcaaaccaaacttcctcaagctgcatgcttttcacaaaatccagaaagcatttaagaattgaactaggggctggaagaagtgaaagggaagcatctaaaaatgaaaggtgagtaaccagatagcaaaagaaaagggaaagccatccaaatttgaaagctgttgatagaaattgagattcttgctgtcttttgtgcctctacaagctactactcattccagaattcctgggtcttccaagaggattcttaaggtaccagagatttgctagggaaccaaaagtgcttgagaatctgcctgagggcttgcatagctttcacattaaaaaaagaaaaagctagcagatttactcctttttaggggatcatatcaagaaagttagtctggttggaaaccaagagaatggctgatgtctctttcttggaatatgtgaaataaatttagcagtttaactaaatacaaatatatgcattgtgtaatccactcagaattaaacagacaaaaggtatgcttgctttggaatgattttaggcattgtacaaccttgaatcacttgagcatgtaataactaataaataatgcagatccatgtgattattaaaatgactgtagctgagagctctaattttcctgtcttgaaactgtataagaactcatgtgattaagttcacagtttattgtttgtctgtttagtattttagaaatataccagcactactaattaactaatgtcttttatttattatattatgataaagtaaaaatttcacttgcattaagtctaaactgagaaggtaattactgggaggagaatgagcagctttgactttgacaggcggtttgtgcaggaaagcacagtgccgtgttgtttacagcttttctagagcagctgtgcgaccagggtagagagtgttgaaattcaataccaaatacagtaaaaacaaatgtaaataaaagaaaacacatcatcaataaaactgttattatgcgtg

SEQ ID NO: 181882 - protein, 292 aa, Artificial Sequence
  derived and/or modified sequence
MLGAWAVEGTAVALLRLLLLLLPPAIRGPGLGVAGVAGAAGAGLPESVIWAVNAGGEAHVDVHGIHFRKDPLEGRVGRASDYGMKLPILRSNPEDQILYQTERYNEETFGYEVPIKEEGDYVLVLKFAEVYFAQSQQKVFDVRLNGHVVVKDLDIFDRVGHSTAHDEIIPMSIRKGKLSVQGEVSTFTGKLYIEFVKGYYDNPKVCALYIMAGTVDDVPKLQPHPGLEKKEEEEEEEEYDEGSNLKKQTNKNRVQSGPRTPNPYASDNSSLMFPILVAFGVFIPTLFCLCRL

SEQ ID NO: 181883 - DNA, 879 bp, Artificial Sequence
  derived and/or modified sequence
atgctgggggcctgggcggtggaaggaaccgctgtagcactccttcgcctcttactgctcttactgcctccggccatacgtggcccgggcctgggcgtggcaggagtggccggcgccgcaggggcaggccttccggagagtgtgatttgggcagtgaatgccggcggcgaggcccacgtggacgtgcacggtattcactttcggaaggatccccttgagggtagggtgggcagagcctcagattacggcatgaaactgccaattctccgctccaatccggaagatcagatcctgtatcaaacagagaggtacaacgaggagacgttcggctacgaggtgccaattaaagaagaaggcgactatgtgctagtgttaaagtttgcagaagtgtacttcgcccaatcacagcaaaaggtgttcgacgtccggctgaacggccacgttgtcgtcaaggacctggatatcttcgacagagtggggcactctactgcgcatgatgagataatcccgatgagcattaggaagggcaagcttagcgtccagggagaggtgtccaccttcaccggcaagctgtacatagaatttgtgaaaggatattacgataatcctaaagtgtgcgccctttacatcatggctggaaccgtcgacgatgtgcctaagctccaaccccacccgggcctcgaaaaaaaggaggaggaggaggaagaggaggagtatgacgaagggtctaatctcaaaaagcagaccaataagaatagagtgcaatcaggccccaggacccccaacccttacgctagtgacaactcctctctgatgttcccaatactggtcgctttcggggtctttattcccaccttgttctgtttgtgtcggctctag

SEQ ID NO: 181884 - DNA, 879 bp, Artificial Sequence
  derived and/or modified sequence
atgctgggcgcctgggccgtggagggcacagctgtggccctgctgcggctgctgctgctgctgctgcccccagccatccggggccctggcctgggcgtggccggcgtggccggggccgccggggccggcctgcctgagagcgtcatctgggccgtgaatgctggaggagaggcccacgtggatgtgcacggcatccacttcaggaaggaccccctggagggccgggtgggccgggccagtgactatggcatgaagctgcccatcctgcggagcaaccctgaggaccagatcctgtaccagacagagcgctacaatgaggagaccttcggctatgaggtgcccatcaaggaggagggggactatgtgctggtgctgaagtttgctgaggtgtactttgcccagagccagcagaaggtgtttgatgtgcggctgaatggacatgtggtggtgaaggacctggacatctttgacagagtgggccacagcacagcccatgatgagatcatccccatgagcatcaggaagggcaagctgtctgtgcagggcgaggtgtccaccttcaccgggaagctgtacattgaatttgtgaagggctactatgacaaccccaaggtgtgtgccctgtacatcatggccggcaccgtggatgatgtgcccaagctgcagccccaccctggcctggagaagaaggaggaggaggaggaggaggaggagtatgatgagggcagcaacctgaagaagcagaccaacaagaacagagtgcagagcggccccaggacccccaacccctatgccagtgacaacagcagcctgatgttccccatcctggtggcctttggagtcttcatccccaccctcttctgcctgtgccgcctgtag

SEQ ID NO: 181885 - DNA, 6626 bp, Artificial Sequence
  derived and/or modified sequence
gtgggattccggggccgcctgggcgctgcacccgccacttccgcatcgaaccgccgcttcaaccgaactcactccctctgcgcgcgctccatctggtgcccgactgctgggccggcgcctgggagaagccacgccctttcccgcgcctgacagccaatgagcgggcgcctcccggcggggtggtgggtaattaatgagggccgggcgctgattggctgcagcgtcgtggccgggggcagggcggcggggtaggttgttcctgaggtgggaggcggtacccgtggctgagaagaaggaggcctgagagcgacatgtccccggcggctcaggcggagcggcccgtggcgctgtttttctgagtccggggtggcctggcagccggccgaggacgagggtcggcgggggctgcccccgtggtggtggccgccatgctgggagcctgggcggttgagggaaccgctgtggcgctcctgcgactgctgctgctgctgctgccgccggcgatccggggacccgggctcggcgtggccggcgtggccggcgcggcgggggccgggctgcccgagagcgtcatttgggcggtcaacgcgggtggagaggcgcatgtggacgtgcacgggatccacttccgcaaggaccctttggaaggccgggtgggccgagcctcagactatggcatgaaactgccaatcctgcgttccaaccctgaggaccagatcctgtatcaaactgagcggtacaatgaggagacctttggctacgaagtgcccatcaaagaggagggggactacgtgctggtcttgaaatttgcagaggtctactttgcacagtcccagcaaaaggtatttgatgtacgattgaatggccacgtcgtggtgaaggacttggatatctttgatcgtgttgggcatagcacagctcacgatgaaattatacctatgagcatcagaaaggggaagctgagtgtccagggggaggtgtccaccttcacagggaaactctacattgagtttgtcaaggggtactatgacaatcccaaggtctgtgcactctacatcatggctgggacagtggatgatgtaccaaagcttcagcctcatccgggattggagaagaaagaagaggaagaagaagaagaagaatatgatgaagggtctaatctcaaaaaacagaccaataagaaccgggtgcagtcaggcccccgcacacccaacccctatgcctcggacaacagcagcctcatgtttcccatcctggtggccttcggagtcttcattccaaccctcttctgcctctgccggttgtgagaacaaatgactatcctgaacagggtggaggggtgtgggaaagaaaccagccatattggttttggtttctgtatttttcacaatgattaatgaacaaaaacaaagagaaaaaaacacacatcaattaaaggagacaaaaagaggcagagcgagtagagagcagccctcattcaccacctggtcccagacgtgcttcagtcctcgtcctctctttgtggctggctcccagccttctctttcctcttgaggatacttagggtaaactggatccttcctgctcaaggatcctcatttgtatacctagtggaaaggactctgaactcagaggagtcactgttcctttttttaggttagaaattaacagcagggaaatgccatcttattacctgagacgaccagcactgggagttaggtacggtctgaagttatgtctagataagacttcagacgtcctgggattgaaagaatgtgtgtgaaggggtagaatttgtgcggtaaagacttaaaaaaaaaagtagggagattaaaaaaaaagaaagaaaatgcttccttatctggaagcctttctggattaatccagtgatggtcccacctttagtgtttgagctttgtcattgcttgtctccctggcatgtgccagttatagactgtccagcatccaagacgtttcggttatgtcgggtcctcagatcgcctctgacttgttaccacaacaaatcattttgatttcagtgcctgttggggacttgatttcttctcagttttgtttgtttgtttgtttccttaatctggctcatttgaaatttcttctccctctcaaccatcccactaagttatagccaagaagggaaggagacacggggatttggggttctctgcttgaatgtcttctcctttaccacctcaccttgttggtacctccctccctggatctctgagccagcagccaggaggacctgacccagcagttctttactggcccctttgtagggccttgctgccagggggcagggatgctttccagcctgcagcaacagaacacttgaccttaaaagtctcttctggtctttggattagaaaaggcttatgttagcatagcttaagagcaacctcagagatttgagccctactaagtgactgaccactgtttagagtgtctggtatctgatgttcatttattcccatgttcttgtgtgtcacagttcagccagttttggtttatgcctagagctacttcaaggaactagactaattagctatataggcccagcgatgcttcttattgatcttaatagtatgcccctccttcccctgtcctttcatttctctatccaagtagcagtcaggttcttggtgtgatgggactgaaagaattccagtcagccagagccttggcagctctgaagctaaccttagcatctaagtgtcgatcttgaattccctgaaaaaatttctataggaaatgaagcttccctggtcccctcctttctggccattgtcatccatttcccagttagggcaacaatgaaggaggacccagccaagctagaaggaattttgtggatgggagacagcaggattagcttcagcttgggctggagcagtcaatataggatctcaggccaggcccgcttttctagaatgtgtttaattttgagtttgctttattagatatgttttttaagagctctgtatatttgaactgctccttatgtgacaaaataggtagctcttgggctcatgtcctgggttttggctctttaatgattactccaggccagcatttagtcgtttgagaattgtagcctgttgttttcgctgtgacttgggtctcagtgctagggtattgagtcaggcagctggagggttgtggcccgaggctgcagtcagaggtatacttcccatagtgcttcacacagctcccctgcttctaaaggataaggtactgtagccttggtcctggggaccacctgcctggggcagtggacatcctaactaaacaggcttctggcagtagctttggttcctatcccatcgaaattccccaaagccctgggccactgccattgggttagtcaagatgaaggaggaggactggctgcctccattttgccttgtttgttagtttgcctgggtctgtctgaggaaggagggggtcccgccttccacctcaacacatcccttcagtgactcagagtctcagaaggaaaccctgactcctggggccatttcctaatggtactgtaagccaagcagctttgcttctgcctctgtttccaagcccacccttttcccctgagctcagggttagggatgggcgctttcctctctggttgtgaacgaaaggaaggaacatctttctatggctaacaaaaactaaaggggaagtgaggaaacaggaagaagtatggtgggggctggggtagactcccctggagccaagcctatccagctaacaagagctccctggggctggtcacagctggctcatgatgctgaacttgaaagtttttttgtttttgtttttgttttgtggctcctccaagatataggtacatgaagtttaggttaaaggggtgggattctttatttttatttttgtattgtatgtgtcaagaattactctgttgttcaccttttgctttttgcactgtttgttctcttatctgtattttgagcttagtgctaggactgagaggctgcaccatagggaatgtatgggagatggtgaggggtgccagtgaggggtgcgtggaggagaggcctgggctcctctactggatctacactctgtcccaggtttttagatcccactgagcccagctgactgaaaacaaggacagtcagggtgaaacttcttttgccagaagtgtggcctgagttgaatttctgggaggatgacgcagatgtctgctgcagagctgggctgagagttctgcagtctagctctgacttaggtcaggggcctgttggtctctcattggacgtttttgggtctcactcatgcttactgaaacattgtgccaagaaactctgtgggatttgtgtcccttaaaccagactcacttttctgaaaaatctccattgttgaggagaggctgctcaatcgacaccccgagttctcatgactgggaagatagttttcttcaggtgtcaatggcgttagactcccaggaagactagccctgcccacagggccacctgttggtttgagagcgtgttcgtgttctcttgccctccctgcctaagagctactgggatcacgttagcgggcatttaggctttgatgagagggcacagtttgagttaggtttacctccccctttctgtgcctgggaactgtttggtccagctttagaactgtggttttgacttccttatctcttgggagaagcttctgttttaaggaatttctcttccttcttctcctgcctctagcctctcctggaaaggcctggatatggtttctaaaatctcagctgagaacttcagaaaacagcagcagtattttccttttcctagtgctaaaatccctttccctagaaattggctcaccttgggaaacccagggaaagaatcagcaggttctctgccctccctaggggttggggaaggacccaccccggtcagcacagtgccttttcctctcctgctctgagccagggtggggcattccctctagattcaggtttgggcaggggtcctatagtccctgccatggggctgcttccctgtcccttccctcccctttgctggcctactctggcataattcaagtgtcttcttgccttggggatccttagtggcatcaaatggcaacatggaatattgtcctccatgcccctccagaaggacctaggagagtaggtgagctttccaaagtgagagacgaatctttctttctttttttttttaaagggcaggatgggtatgctttgggctttctccttctgtggccccggaggaaggagagactgaggcaaggcaaagtgatagtacacggaagcagaaccggaaacacccaggaactgttcagaaatctcagaagaaatctgcttctcttcgatggaaagatataattaacgatcaaagagctctaagaaaattgcaaagaagccttaatgttcaagctttagaaagatcagagcaatttttctctttcagtccaaactaagactctctgtatttaaatctctctggggcaagagggctagatttcctcattttgttatgagactagattggtaccagtagatcagctgcctagcgagggcaggtttcttctttgcatctgtgtggcttgcttccagtctggcctgtcctttccagctgccttttgtctagcctgctatggggggccagattatcttgataagagcaggtgatttggggactagctgggttggcaggaaaagagcaggatggatctcttgggacaggttcccccaggagtataaacacaaggagccaggattgtgctggcagccaaggaaacagtagtgcctgtttgagttggcagagagggccttggcacctcttgcatccaggcagtcttgtgagatgggggcacatagcactggggaaagcagaactccattctcacctctattttgagcttcagtgctttatttcagtatgaggaaaaacaacaacaaactgaagtgcgctttccgtcctttcaaaggacaactgtcgggaagggagagccgagttgcgaggtaggaggggagcactggcagggagagacattcttgactcctctcttccctggtgtgttgtgatccagggaatgaaaagaaatttgaccctggattggttctctccttggacttaaggaatcttaccttttccttccacaaagttctcccaggcaaggaccagctgcccattctgagcccagggcagcctcttcaaccattattggtctaacctggcttgtcaggaaaccaagcccacccttccacattgggcctggctgctctattctgtaccaagtactggagaaaaagcatcaagttcttagcccttgtagcttctaccctagtttcccatcctctctctgtggaggccaaaccaactctttgccagcagccacaacatgcattgacagcggcacagtgagatataactgatgggctttgaacctggttggccggggaagctgtaggggtggatagagctggctttccttctgggctgtctccatctgaccctaccccttccatgtcccaccccactcccaccaaaaagtacaaaatcaggatgtttttcactgtccattgctttgtgttttaataaacaatttgcagtgacactctg

SEQ ID NO: 181886 - DNA, 879 bp, Artificial Sequence
  derived and/or modified sequence
atgctgggcgcctgggccgtggagggcaccgccgtggccctgctgaggttgcttctcctgttgttgccccctgcaattcgcgggcccggcctgggcgtggccggcgtggctggagcagccggcgccgggctgcctgagtctgttatttgggccgttaacgcggggggagaagcccacgttgatgtgcacggcattcattttcggaaggatcctctcgaaggaagagtgggaagggcaagcgactacggtatgaaactgccgatcctgcgctctaatcctgaagatcagattctgtaccagacggaacggtacaacgaggagacattcggctacgaggtacccattaaggaggagggtgactacgttttagtacttaaatttgcggaggtctatttcgcccagagccaacaaaaagtcttcgacgttagattaaacgggcatgtagtggtgaaggatctggacatattcgatagagtggggcattctactgcacacgatgagattattcctatgagtataaggaaagggaaactgtcagttcagggagaggtctctactttcacaggtaagctctatattgagttcgtaaaagggtactacgataatcccaaggtgtgtgccctctatatcatggccggcactgtagacgacgttcccaagttgcagccgcacccaggactggagaagaaggaagaagaggaagaggaggaagaatacgacgagggcagtaatttgaaaaagcaaaccaacaagaatcgcgtgcagtccggacccaggacccccaacccctacgcatcggataactcttccttaatgttccccattctcgtggcatttggcgtcttcatacccacactgttctgcctatgtagactctag

SEQ ID NO: 181887 - DNA, 879 bp, Artificial Sequence
  derived and/or modified sequence
atgctaggggcttgggctgtggagggcactgccgtggcccttctgagacttttgctgctcctgctgccccctgccattagaggccctggactgggagtagcaggtgttgccggtgccgctggtgccggtctgcccgagtccgtgatttgggccgtgaacgcaggtggggaggctcatgttgatgtgcatgggattcacttccggaaagacccacttgaaggcagagtgggaagagcatctgattacggtatgaagttgcccattttgagatcaaatccagaggatcagatcctgtatcaaaccgaacgctataatgaggagaccttcggttacgaagttccaatcaaagaggaaggcgattatgtgttggttctcaagttcgcagaggtctactttgctcagagccaacagaaggtctttgacgtacgattgaatggtcacgtggtggtcaaagatcttgatatattcgaccgcgttgggcattccaccgcccatgatgagatcatcccaatgagtatccgcaagggcaaactatccgtacagggggaggtctctacctttaccggcaaactgtatatagagttcgtcaaaggctactatgataatcctaaggtgtgtgctctgtacattatggctggcacagtggacgatgtgccgaagctgcagccgcacccagggctggagaaaaaggaagaggaggaggaagaagaggagtacgacgaagggtctaacctcaagaagcagacaaacaaaaaccgtgttcagtcaggcccacgaacccccaatccatacgctagtgacaacagttcactcatgtttcccatcttggtagccttcggggttttcatccccactctcttttgtctttgccggttgtag

SEQ ID NO: 181888 - DNA, 879 bp, Artificial Sequence
  derived and/or modified sequence
atgctgggcgcctgggccgtggagggcaccgccgtggccctgctgagactgctgctgctgctgctgccccccgccatcagaggccccggcctgggcgtggccggcgtggccggcgccgccggcgccggcctgcccgagagcgtgatctgggccgtgaacgccggcggcgaggcccacgtggacgtgcacggcatccacttcagaaaggaccccctggagggcagagtgggcagagccagcgactacggcatgaagctgcccatcctgagaagcaaccccgaggaccagatcctgtaccagaccgagagatacaacgaggagaccttcggctacgaggtgcccatcaaggaggagggcgactacgtgctggtgctgaagttcgccgaggtgtacttcgcccagagccagcagaaggtgttcgacgtgagactgaacggccacgtggtggtgaaggacctggacatcttcgacagagtgggccacagcaccgcccacgacgagatcatccccatgagcatcagaaagggcaagctgagcgtgcagggcgaggtgagcaccttcaccggcaagctgtacatcgagttcgtgaagggctactacgacaaccccaaggtgtgcgccctgtacatcatggccggcaccgtggacgacgtgcccaagctgcagccccaccccggcctggagaagaaggaggaggaggaggaggaggaggagtacgacgagggcagcaacctgaagaagcagaccaacaagaacagagtgcagagcggccccagaacccccaacccctacgccagcgacaacagcagcctgatgttccccatcctggtggccttcggcgtgttcatccccaccctgttctgcctgtgcagactgtag

SEQ ID NO: 181889 - protein, 303 aa, Artificial Sequence
  derived and/or modified sequence
MCHGRIAPKSTSVFAVASVGHGVFLPLVILCTLLGDGLASVCPLPPEPENGGYICHPRPCRDPLTAGSVIEYLCAEGYMLKGDYKYLTCKNGEWKPAMEISCRLNEDKDTHTSLGVPTLSIVASTASSVALILLLVVLFVLLQPKLKSFHHSRRDQGVSGDQVSIMVDGVQVALPSYEEAVYGSSGHCVPPADPRVQIVLSEGSGPSGRSVPREQQLPDQGACSSAGGEDEAPGQSGLCEAWGSRASETVMVHQATTSSWVAGSGNRQLAHKETADSENSDIQSLLSLTSEEYTDDIPLLKEA

SEQ ID NO: 181890 - DNA, 912 bp, Artificial Sequence
  derived and/or modified sequence
atgtgccacggcagaatcgcccccaagagcaccagcgtgttcgccgtggccagcgtgggccacggcgtgttcctgcccctggtgatcctgtgcaccctgctgggcgacggcctggccagcgtgtgccccctgccccccgagcccgagaacggcggctacatctgccaccccagaccctgcagagaccccctgaccgccggcagcgtgatcgagtacctgtgcgccgagggctacatgctgaagggcgactacaagtacctgacctgcaagaacggcgagtggaagcccgccatggagatcagctgcagactgaacgaggacaaggacacccacaccagcctgggcgtgcccaccctgagcatcgtggccagcaccgccagcagcgtggccctgatcctgctgctggtggtgctgttcgtgctgctgcagcccaagctgaagagcttccaccacagcagaagagaccagggcgtgagcggcgaccaggtgagcatcatggtggacggcgtgcaggtggccctgcccagctacgaggaggccgtgtacggcagcagcggccactgcgtgccccccgccgaccccagagtgcagatcgtgctgagcgagggcagcggccccagcggcagaagcgtgcccagagagcagcagctgcccgaccagggcgcctgcagcagcgccggcggcgaggacgaggcccccggccagagcggcctgtgcgaggcctggggcagcagagccagcgagaccgtgatggtgcaccaggccaccaccagcagctgggtggccggcagcggcaacagacagctggcccacaaggagaccgccgacagcgagaacagcgacatccagagcctgctgagcctgaccagcgaggagtacaccgacgacatccccctgctgaaggaggcctag

SEQ ID NO: 181891 - DNA, 912 bp, Artificial Sequence
  derived and/or modified sequence
atgtgccatggccgcattgcacctaagagcacctctgtgtttgctgtggcctctgttggacacggcgttttcctcccgctcgttattctgtgtacattgctcggagatggtctcgcatccgtttgtcctctcccaccagagccagaaaatggtggatatatttgtcacccgcggccctgtagggaccccctgactgctggctccgtgattgagtatctctgcgcagaaggctacatgctgaagggcgactacaaatacctgacctgtaagaacggtgaatggaaacctgcaatggagatttcatgtcgattaaacgaggacaaagatacacacacttccctgggcgtccccaccctgtctattgtcgcctccacagcaagttctgtcgcacttatcctattgttagtcgtcctgtttgtcctgctccagcctaagttaaagtctttccatcattctcggagggatcagggcgtcagcggcgaccaggtttcaattatggtagatggagttcaagtggcattgccctcatatgaggaggcagtgtatggaagcagtgggcactgtgtcccaccggcagatcccagagtccaaatagtgctgagcgagggaagcgggccctccggaagatcggtgccgcgtgagcagcagttaccagaccagggtgcatgcagcagtgccggcggggaggacgaagcacccggccagtccggactttgcgaggcctgggggagccgggccagcgagactgtcatggtacaccaggctacaacctcttcatgggttgcagggtccgggaatcgccagctcgcccataaggagaccgcagattctgagaacagcgatatacagagcctgctgagcctgacttccgaagagtacactgacgatatccccctgcttaaagaagcctag

SEQ ID NO: 181892 - DNA, 5388 bp, Artificial Sequence
  derived and/or modified sequence
agtgacgcgggcgctgcagccgtcgctaccgccgcgttctattctccgaagccggcgaccgccccacctcctccctccctcccgcccgcttcctctgcccacagcgccggccagagcgagctagacaagggcacgcggggcctcgcctagacccgagaagactgcgggcgcgcgcaagcggcggcgtggaagctgtgagcgcccccatcccggaggtctccgccggctcccgggtgaatcagctcccggccgactttaggattcttctggattttaaattttttctttttaaaaaaacttggacggataaaagatgtgccatggcaggatagcaccaaagagcacctcagtgtttgccgtggcctccgtgggacatggagtgttccttccgctagtgatcctttgcaccctgcttggagacggacttgcttccgtgtgccccctaccaccggagccagagaatggtggctacatctgccacccccggccctgcagagaccccctgacagcaggcagtgtcatcgaatacctgtgtgctgaaggctacatgttgaagggcgattacaaatacctgacgtgtaagaatggcgagtggaaaccagccatggagattagctgccgtctcaacgaggataaagacacccacacatcacttggggtccccacgctgtctatagtggcttctactgccagctccgtggcgctcattctcctcctcgtggtgctgtttgtgctgctgcagccaaagctgaagtctttccatcatagcaggcgtgaccagggggtatctggggaccaggtctccatcatggtggatggagtccaggttgcactaccatcatacgaggaggctgtatatggcagttctggtcactgtgtgccacctgctgaccccagagtacagattgtgctgtcagaagggtctgggcccagtgggaggagcgtgccaagggagcaacagctgccggaccaaggggcctgctcctctgcaggtggagaagatgaggccccaggccagtctggactatgtgaagcctggggctctcgggcctcagagactgtgatggtgcatcaggcaaccacctcttcctgggtggccggctcagggaaccgccaactggcacacaaagaaactgcagattcagagaacagtgacatacaaagccttttatccctcacgtcagaggagtacacagatgatattccactgttgaaagaagcatgagggcagcggccagcctttcctctctgcgaggttctctcagcccttcctccctctccctgtgggattgagcaccctgtactctccagccaccttacctggatacctgagctgccacctgtgtatctgtgtatctctgagggccctataggcccaccttgctggaaactcaaggaagattctcgccatctgcctgttggacagctggaggagctggctctttgcctggccccgccttcccatctgtcagagacatatttgaatgtgctggatcaaaccctcccttttcctaagcctctgggtcccctccagccagctctttggcggcagcccccaccagctcctgtgggcctgagtgctgctgtgtttacttgtgcctttcccccaccctgtccagtttccctgtcatgcagacttgttgctgtccacaagccttagtggctgcactgctgccccctgccacacagggggccgggcctgggtctgtcctgtttcctttgagggttgcccctactgccctttgcaggaacagatccaggtgtgagagctcttgagtcaagagtggcagaagtggctctaattggggtgagagtgtagtccctgggcttgccctgggttgaccctggtggcatatttccttggctgaggatggaagatttggagaatcatgtccatgctggcccaggacccagccatctggcccaaaggcacaagctcctggccctgttgagttgagagtttccaagaagcatccagaagatcccaagggagagaaggaaaatggctgataatgattgtcttcctaatatgcaagttctcacttcctacttccagcatcggccttcctggccttgtcttttttttgtttccctggagtataatgggaagttgcatgctgcctcctgggttttatcccagatagctctggctttcttgctgcccacaggggcctggggcaggaaggagacttgctgagatgccatggagtgcccatctggtcactggcagtctgggcaggttgcccctttctgggtttgtggtgacggaggggaggccgagaggcacagaccaagtccccgggtggctgcaggcagctccagcccggtcctgaggatcctcctcaccatggtcacgtgccttagtaactgtgcccaggaagtggcctgctgcttgctgtgctgctgcttttcctacttctgcccttccctgccacccctcgcatgtcacagctgacaagcaattccttgtcttccctggccccctgggggaagggctgagaaacagtccgtgtgcaccccaaccttaatggcctgaggtgggcagaggggtgtggagcagcctggagtacagggccctgggggaggagcccactgatgaggggcgctctcccatagccatgtgttgaatgctaactaggctggggtggacgaactctgccaactgctgtcatcttagaagatagatgcagcagtaaggaatgtttgttttgcttttttctgaaattttctgaagcactgtggctgggaaacttcgaagcggaccctgtgctgcatgtctgctcctcccctgagcctgtctgcttgggggtggtaaaaataaaaatcccagtttattttcagtaccttacctaacagggttggctccaggcgtgggtggcctagaagatgaggggagtggtcttctcccagccttttaccctcttgcctcctgcctccgcgcttacacacgcactttaccacccggtcattccctggcctcttgctgccacttgtagtcttccttccttcctctcagggtaagggcagtgcctgctgtgcctgttggccactcccacacttcccctcccccaggagccctcatctgctgtgctgagtccaggaaagcatagttaggtagggagctggttggagaaggtgctagaactagaaggcagatgagactagcatgggcccacctggagggctgtccctaatggccccagtcgccttacctcacccacagcagtgcccttgtcttcctccaaaacagaaagcagtgacaaaagggggaggggtggtaatctgaagtctcactgctgagccttcagcttttatttttcactgtttcaaaacccgcattctattctagaatggtttttaaaatggaagatcttacctttttctatcttgttactctggggttttgtccccctaagagattgcactttttgtttggggtttattcagctgcatagatgaccagcttgatccctggtgaaatgaaaagccttccttctcctgaagcctctttccgccctgccctccactaacaacactgaggagcacaagcccaggcttgcccacctggtaggaaaggaagaaattagaacaatgggagccttggctcccctctcgtctcctcccctccttcttgtcactggctttgatgaggcccacttcccagaggctcctgggcctgtgagtgcaggagctcattctcccctcactgctgaagtctgtgacagcttcttcctccagttatgtctttcttccaaagcaatttcttaaccatcagccatgtgctgctatttctagggcttctgggctttgtcccttactgagagattagggactccacagctgccttgaggtagggcctggctgagagacaagggtagcagcaggtggcaggctgttaaaagacaggctgcctgaggagcctggagcaggtggaaacaggtggaagaaaccggccacagccctgctttaccgggctcacctctagggcattccagcaagaggctgatgcaggagaatggccagcaccaaaggacatttaaaagagtttttgggtttttttgtttgtttgttgttggtgtttgtttttttttttttttttttggcacacttgagctgactcagtgcaggtttaatatcctggtgacttgcagtcacattctaatgactttcaagggccagaatatggtgaaaatcacttaaaatatccgtcccttccatgccttagtttagcaggtaggctctatcttttgccatttctgtattttatgtgctgtgttcccgtttcactgggtatgaactgtgaaatcgactgaatcctggccactttatgagtttgtttggttttataaggcatttcaatgtacattctataaatacaagcactccatttgcaaacagatcttaagctaatattttctttcccattcatcttgccctccccctcctcccgccagctttaaagttcagtggagaagccagatggcaattcagacaaaggtatactcttcctgcttcatgggtggtggcacgggaatagatagcccttagccctttccctcccagtcccagctgagccctcagaccacttgcttcccacataacaatgtcgcctccatttccgaggaacatccttgcgtagagaatgaaatatgctgcaatcatttctgcatccttactcctcacccccaaagaaaaaaaaaaggcctagcagggaagcagcatgcaggcttcacagcttaatgccaaggacagcgagtgaggctgggagcttctcttgggcctgctgggtctgtcagctctcggaatagggacagtccttactggtgccccaaggtgggacttggagaatattttgcttggcatatgtttggtctgaatggtgtagttgctggttccctagagaggaaaaggtggcaggcccagctttgctgggaaatggctcttaatttccagttgaaaccctagtagaattgtgaatgaaaacctcaaggttgagcccctctgccaagcagcagagctagtagaaggggatgcaggggcaaagcactcagttgccaagcaaggaggagagatgtacgtgggctgtgtggcagtccccacaccctgccctggcttcttcaggttatcgcaccactatggaatcctttgcagaatggtactcatataatggtttaaaacaacacattcataattgactctgtgcaggatgtcactcaatcagtttgggtttgctttattttattttatatatatattttttggtatcctgtacattgcagtgggtgtgaagatagtattttaatatttgtacaaagtttaatttaattttaattgttctatgtatataactgcatttctaaataattaaaaaaaagttcttatgaaggc

SEQ ID NO: 181893 - DNA, 912 bp, Artificial Sequence
  derived and/or modified sequence
atgtgccacggccgcatcgcccccaagagcacctctgtgtttgctgtggcctctgtgggccatggagtcttcctgcccctggtgatcctgtgcaccctgctgggagatggcctggcctctgtgtgccccctgcccccagagccagaaaatggaggctacatctgccacccccggccctgccgggaccccctgacagctggcagcgtcatcgagtacctgtgtgccgagggctacatgctgaagggggactacaagtacctgacctgcaagaatggagagtggaagccagccatggagatcagctgccgcctgaatgaagacaaggacacccacaccagcctgggcgtgcccaccctgagcatcgtggccagcacagccagctctgtggccctgatcctgctgctggtggtgctgtttgtgctgctgcagcccaagctgaagagcttccaccacagcagaagagaccagggcgtgtctggggaccaggtgtccatcatggtggatggagtgcaggtggccctgcccagctatgaggaggccgtgtatggcagcagcggccactgtgtgcccccagctgacccccgggtgcagatcgtgctgtctgagggcagcggccccagcggccgctctgtgccccgggagcagcagctgcctgaccagggcgcctgcagcagcgctggaggagaagatgaggcccctggccagagcggcctgtgtgaggcctggggcagccgggccagcgagaccgtgatggtgcaccaggccaccaccagctcctgggtggccggcagcggcaaccggcagctggcccacaaggagacagctgacagcgagaacagcgacatccagagcctgctgagcctgaccagcgaggagtacacagatgacatccccctgctgaaggaggcctag

SEQ ID NO: 181894 - DNA, 912 bp, Artificial Sequence
  derived and/or modified sequence
atgtgccacggccggatcgcccccaagagcaccagcgtgttcgccgtggccagcgtgggtcacggggtttttttgccactggttattctctgtacactactgggagatggcctcgccagcgtgtgtccacttcctccagaacctgagaacggtggctacatctgtcacccccggccttgtagggacccgttgacagcagggagtgtcatcgagtacctgtgtgctgagggatatatgcttaaaggggattacaaatacctgacctgtaagaacggggaatggaagcccgcgatggagatctcctgcaggttgaatgaagataaagacacccacacgtctctgggagtgccgactctgtccatcgtggcgagtacagctagctctgtagcgctgatcctcctcctcgtagttctgtttgtgttgttgcagcccaagctcaaatcctttcatcactcccggagggatcagggagtgagcggcgaccaggtgtctattatggttgatggcgtccaggtggctttgccctcttacgaggaggccgtgtatggatcgagtgggcactgtgtccccccagctgatccacgggttcaaattgtgctgtctgaagggagtggcccctcaggaagatccgttccgagggaacagcagctgccagaccagggtgcttgttctagcgcgggcggggaggacgaagctcccggacagagcgggctgtgcgaggcctgggggagtagagcctccgagaccgtgatggtgcatcaggccaccacttcaagctgggtcgctggaagcgggaaccggcagctggctcacaaggagacagctgacagtgagaactccgacatacaatccctcctgagtttgacatcagaggagtacaccgatgacatcccactgctcaaagaggcttag

SEQ ID NO: 181895 - DNA, 912 bp, Artificial Sequence
  derived and/or modified sequence
atgtgccatggtaggattgcccctaagtcaacgagtgtttttgctgtagcttccgtgggtcatggagtattccttccactggtgattttgtgcacgctgcttggcgacggtctcgcgtcagtgtgtccactgccccctgaacctgagaatgggggatacatttgccatccacggccatgccgtgacccactgaccgcgggtagtgtgattgaatacttatgtgcggaaggatacatgctcaagggggattacaagtacctaacctgcaagaacggtgaatggaaacccgctatggaaatctcttgtcgccttaacgaggacaaagatacgcatacatccttgggcgttcccactctgtccattgtggcctccactgcctcatctgtggccctgattctcttacttgttgtgctttttgtgctactgcagcctaagctaaaatcattccaccattccagacgggaccagggtgtgtctggagatcaggtttcaattatggttgacggcgtgcaggtggctctcccaagctatgaagaggcagtgtacgggtcttctgggcattgcgtgccacctgcagacccccgagtacagatcgttctgtccgagggcagcggcccttccgggcgaagcgttcctagagaacagcagctccctgaccagggagcatgctcctccgcaggaggtgaggatgaggcacccggacaatccggtttatgcgaggcctggggaagtagagccagcgagacagtgatggtgcaccaggcaaccacctcatcatgggtggccggttctggtaacagacagctggcccacaaggagacagcagattccgaaaacagcgatatccagagcctgctgagcctgactagcgaggagtatactgatgatatccctcttctgaaagaggcctag

SEQ ID NO: 181896 - protein, 111 aa, Artificial Sequence
  derived and/or modified sequence
MVRTKADSVPGTYRKVVAARAPRKVLGSSTSATNSTSVSSRKAENKYAGGNPVCVRPTPKWQKGIGEFFRLSPKDSEKENQIPEEAGSSGLGKAKRKACPLQPDHTNDEKE

SEQ ID NO: 181897 - DNA, 336 bp, Artificial Sequence
  derived and/or modified sequence
atggtccgcacaaaggcggactcagtgccaggcacttatcggaaggtcgtagccgcccgagcccctcgcaaagtacttggctcgagtacttctgctactaactctacctctgtgtcttcccggaaagcagaaaacaaatacgctggcggaaatccagtgtgtgttcgacctacccctaagtggcagaaaggaataggagagttcttccggctgtctcccaaggactcagagaaggagaatcagatccctgaggaggctggaagtagtggtctgggcaaggccaaacggaaggcctgtcctttacaacctgatcacactaatgacgaaaaggagtag

SEQ ID NO: 181898 - DNA, 336 bp, Artificial Sequence
  derived and/or modified sequence
atggtgaggaccaaggctgacagcgtgcccggcacctacaggaaggtggtggccgcccgggcccccaggaaggtgctgggcagcagcaccagcgccaccaacagcacctctgtgagcagcaggaaggccgagaacaagtatgctgggggcaaccctgtgtgtgtgcggcccacccccaagtggcagaagggcattggagagttcttccggctgagccccaaggacagcgagaaggagaaccagatccctgaggaggccggcagcagcggcctgggcaaggccaagaggaaggcctgccccctgcagcctgaccacaccaatgatgagaaggagtag

SEQ ID NO: 181899 - DNA, 336 bp, Artificial Sequence
  derived and/or modified sequence
atggtgcggaccaaggccgacagcgtgcccggcacctaccggaaggtcgtggctgcaagagctccccggaaggttttggggtcttcaacatcagctaccaactcaacatcagtgtctagccggaaagctgaaaataagtacgccggagggaacccagtgtgtgtgagaccaacccctaagtggcaaaagggcatcggggagttttttaggttgtcacctaaagactcagagaaagagaaccagataccagaggaggccggtagctcaggcctcggtaaagcaaaaaggaaagcatgtccactgcaaccggaccacacaaatgacgagaaggaatag

SEQ ID NO: 181900 - DNA, 336 bp, Artificial Sequence
  derived and/or modified sequence
atggtgcgaaccaaggctgatagcgtgccagggacctaccgcaaggttgtcgccgctagagctccgcgtaaagtccttgggtctagcacatcagccactaacagtacgtctgttagcagccggaaagctgagaacaagtatgccggaggaaacccagtgtgcgtaagacccacacctaaatggcagaagggcattggtgagttctttaggttgtcaccaaaggattcagagaaagagaatcagatcccagaggaggccggttcttctgggctgggcaaagccaagaggaaggcttgcccattgcaaccagatcacacaaacgatgagaaggagtag

SEQ ID NO: 181901 - DNA, 1511 bp, Artificial Sequence
  derived and/or modified sequence
ggctcgggagagaccttggagcgcgcgggaaagagaccaatataaactgtggcgggatagttttcgggtccttgtccagtgaaacaccctcggctgggaagtcagttcgttctctcctctcctctcttcttgtttgaacatggtgcggactaaagcagacagtgttccaggcacttacagaaaagtggtggctgctcgagcccccagaaaggtgcttggttcttccacctctgccactaattcgacatcagtttcatcgaggaaagctgaaaataaatatgcaggagggaaccccgtttgcgtgcgcccaactcccaagtggcaaaaaggaattggagaattctttaggttgtcccctaaagattctgaaaaagagaatcagattcctgaagaggcaggaagcagtggcttaggaaaagcaaagagaaaagcatgtcctttgcaacctgatcacacaaatgatgaaaaagaatagaactttctcattcatctttgaataacgtctccttgtttaccctggtattctagaatgtaaatttacataaatgtgtttgttccaattagctttgttgaacaggcatttaattaaaaaatttaggtttaaatttagatgttcaaaagtagttgtgaaatttgagaatttgtaagactaattatggtaacttagcttagtattcaatataatgcattgtttggtttcttttaccaaattaagtgtctagttcttgctaaaatcaagtcattgcattgtgttctaattacaagtatgttgtatttgagatttgcttagattgttgtactgctgccatttttattggtgtttgattattggaatggtgccatattgtcactccttctacttgctttaaaaagcagagttagatttttgcacattaaaaaattcagtattaattaaacattacttattctaccctcttttttggcaaggaggacaaatacgcaatgttggaaaaccttggatggatatcttctctttaaaaaaatgtaaagataatttggtcttgagggtttaaacggttgataatgcctctacaacaacaagaaaaaagataaaatactaggatagaatcatggtgggcacagtggcttctcaggaggctgaggagggaggtttgcttgagtccaggagttggagaccagcccaggcaacatagcgtaaaccctatctctaaaacaatttttagccgggtgcggtggctcacgcctgtaatcccagcactctgggaggccgaggcgggtggatcatgaggtcaggagatcgagaccatcctgcctaacaaggtgaaaccccgtctctactaaaaatacaaaaaattagccgggcgcggtggcgggcgcctgtagtcccagctactcgggaggctgaggcaggagaatggcgtgaacccgggaagtggagcttgcagtgagccgagattgcgccactgcagtcggcagtccggcttgggcgacagagcgagactccgtctcaaaaaaaaaaaaaaaaaaaa

SEQ ID NO: 181902 - DNA, 336 bp, Artificial Sequence
  derived and/or modified sequence
atggtgagaaccaaggccgacagcgtgcccggcacctacagaaaggtggtggccgccagagcccccagaaaggtgctgggcagcagcaccagcgccaccaacagcaccagcgtgagcagcagaaaggccgagaacaagtacgccggcggcaaccccgtgtgcgtgagacccacccccaagtggcagaagggcatcggcgagttcttcagactgagccccaaggacagcgagaaggagaaccagatccccgaggaggccggcagcagcggcctgggcaaggccaagagaaaggcctgccccctgcagcccgaccacaccaacgacgagaaggagtag

SEQ ID NO: 181903 - protein, 326 aa, Artificial Sequence
  derived and/or modified sequence
MDYSHQTSLVPCGQDKYISKNELLLHLKTYNLYYEGQNLQLRHREEEDEFIVEGLLNISWGLRRPIRLQMQDDNERIRPPPSSSSWHSGCNLGAQGTTLKPLTVPKVQISEVDAPPEGDQMPSSTDSRGLKPLQEDTPQLMRTRSDVGVRRRGNVRTPSDQRRIRRHRFSINGHFYNHKTSVFTPAYGSVTNVRINSTMTTPQVLKLLLNKFKIENSAEEFALYVVHTSGEKQKLKATDYPLIARILQGPCEQISKVFLMEKDQVEEVTYDVAQYIKFEMPVLKSFIQKLQEEEDREVKKLMRKYTVLRLMIRQRLEEIAETPATI

SEQ ID NO: 181904 - DNA, 981 bp, Artificial Sequence
  derived and/or modified sequence
atggactacagccaccagaccagcctggtgccctgcggccaggacaagtacatcagcaagaacgagctgctgctgcacctgaagacctacaacctgtactacgagggccagaacctgcagctgagacacagagaggaggaggacgagttcatcgtggagggcctgctgaacatcagctggggcctgagaagacccatcagactgcagatgcaggacgacaacgagagaatcagacccccccccagcagcagcagctggcacagcggctgcaacctgggcgcccagggcaccaccctgaagcccctgaccgtgcccaaggtgcagatcagcgaggtggacgccccccccgagggcgaccagatgcccagcagcaccgacagcagaggcctgaagcccctgcaggaggacaccccccagctgatgagaaccagaagcgacgtgggcgtgagaagaagaggcaacgtgagaacccccagcgaccagagaagaatcagaagacacagattcagcatcaacggccacttctacaaccacaagaccagcgtgttcacccccgcctacggcagcgtgaccaacgtgagaatcaacagcaccatgaccaccccccaggtgctgaagctgctgctgaacaagttcaagatcgagaacagcgccgaggagttcgccctgtacgtggtgcacaccagcggcgagaagcagaagctgaaggccaccgactaccccctgatcgccagaatcctgcagggcccctgcgagcagatcagcaaggtgttcctgatggagaaggaccaggtggaggaggtgacctacgacgtggcccagtacatcaagttcgagatgcccgtgctgaagagcttcatccagaagctgcaggaggaggaggacagagaggtgaagaagctgatgagaaagtacaccgtgctgagactgatgatcagacagagactggaggagatcgccgagacccccgccaccatctag

SEQ ID NO: 181905 - DNA, 981 bp, Artificial Sequence
  derived and/or modified sequence
atggattacagtcaccagacctccctggttccctgtgggcaggacaagtacatcagcaaaaacgaactgctgctccacctgaaaacttataatttatactatgagggccagaacctccagctcaggcacagagaggaggaagacgaattcatcgtggaagggctgctgaacatcagttggggcttacgcagacctattaggctgcagatgcaggacgacaacgaaagaattagaccacccccgtcctcttcttcatggcactcaggatgtaacttgggggctcagggtaccacacttaaaccgcttaccgtcccaaaggtacaaatttcagaggtcgatgcacctccagaaggcgaccagatgccgagttccacggattccagagggcttaaacctttgcaggaggataccccgcagctgatgagaacccgctcagatgtgggagtgaggcgacgtggcaacgtgcgtaccccaagcgaccagaggaggatccggcgccatagattctcgatcaatgggcatttttacaaccataagacgagtgtgtttacacccgcctatggaagcgttaccaacgtacgcatcaattccaccatgacgacacctcaagtgctgaagcttcttttgaataagtttaaaatcgaaaactccgctgaagagtttgcactgtacgtggtccatacaagtggagaaaaacagaaactgaaggctacggactacccactgattgcaaggattctgcaaggaccttgtgagcagatctcaaaggtcttcctcatggagaaagaccaggtcgaagaagtaacctacgacgttgcccagtacattaaattcgaaatgcccgttctcaagagctttatccagaagctgcaggaggaagaggatcgtgaagttaagaagctaatgagaaagtatactgtgttgcggctgatgatccgccagcgcttagaagaaatcgcagaaactcctgctactatctag

SEQ ID NO: 181906 - DNA, 981 bp, Artificial Sequence
  derived and/or modified sequence
atggattatagccaccagacaagtctagtgccctgcgggcaggacaagtacattagcaagaacgagctgttgctgcacttgaaaacttacaatctgtattacgaaggacagaatctgcagttgaggcatagggaggaggaagatgagtttatagtcgaggggcttctgaatatcagctgggggttgcggcgccccatcagactgcagatgcaagacgataacgagagaatcagacctccacccagtagcagctcatggcatagtggctgcaacttgggggcacagggtaccacacttaagcccctcacggtgcccaaagtccagatcagcgaggtggatgctcctcccgagggggatcagatgccaagtagtactgacagtcggggattgaagcctctacaagaagataccccccaattaatgaggacacggtctgatgttggagtccgcaggcgggggaacgtacgaactccctcggaccagagaagaatccggagacacagattttctattaacggtcacttttacaatcataagacatccgtgtttactccagcttacgggtcggtaactaacgtacgaattaattcaaccatgacgacccctcaggttctgaaactgctgctgaataagtttaagatcgagaattcagctgaagagtttgctctgtacgtggtgcacacctctggagagaaacagaagctgaaagccacggattacccactgatagcaaggattctacagggcccctgcgaacagatctctaaagtattcttaatggagaaagatcaggtggaggaagtcacgtacgatgtggcacagtacatcaagttcgagatgcctgttctgaagtcatttatacagaaactccaagaggaggaggaccgcgaggtgaagaaactgatgcgcaagtataccgtgctgagactgatgatccgtcagagattggaggaaatcgctgaaacacctgcaaccatctag

SEQ ID NO: 181907 - DNA, 981 bp, Artificial Sequence
  derived and/or modified sequence
atggactacagccaccagaccagcctggtgccctgtggccaggacaagtacatcagcaagaatgagctgctgctgcacctgaagacctacaacctgtactatgagggccagaacctgcagctgcggcaccgggaggaggaggatgagttcatcgtggagggcctgctgaacatctcctggggcctgcggcggcccatccggctgcagatgcaggatgacaatgaaagaatccggcccccacccagcagcagctcctggcacagcggctgcaacctgggcgcccagggcaccaccctgaagcccctgactgtgcccaaggtgcagatcagcgaggtggatgcccctcctgagggggaccagatgcccagcagcacagacagccggggcctgaagcccctgcaggaggacaccccccagctgatgaggaccaggagtgatgtgggcgtgagaagaagaggaaatgtgaggacccccagcgaccagaggcgcatcagaagacaccgcttcagcatcaatggccacttctacaaccacaagacctctgtgttcaccccagcctacggctctgtgaccaacgtgcgcatcaacagcaccatgaccaccccccaggtgctgaagctgctgctgaacaagttcaagattgaaaattctgctgaggagtttgccctgtatgtggtgcacaccagcggggagaagcagaagctgaaggccacagactaccccctgattgcccgcatcctgcagggcccctgtgagcagatcagcaaggtgttcctgatggagaaggaccaggtggaggaggtgacctatgatgtggcccagtacatcaagtttgagatgcctgtgctgaagagcttcatccagaagctgcaggaggaggaggaccgggaggtgaagaagctgatgaggaagtacacagtgctgcggctgatgatccggcagaggctggaggagattgctgagaccccagccaccatctag

SEQ ID NO: 181908 - DNA, 981 bp, Artificial Sequence
  derived and/or modified sequence
atggactacagccaccagaccagcctggtgccctgcggccaggacaagtacattagcaaaaacgaactgctgttacatcttaaaacctacaacctctattacgaaggccagaaccttcagctcaggcaccgagaagaagaggacgagtttatcgtggaaggccttctgaacataagctggggcctgcgtagaccaatccgtcttcagatgcaagatgataacgaacgaattcgcccccccccaagcagtagtagctggcactcaggctgtaacctgggtgcccaaggaactacactgaagccgctgaccgtgcctaaagtgcagatctccgaggtggacgctcccccagagggcgaccagatgccttcctctacggattctaggggtcttaagcctctgcaggaagacacgcctcagctgatgagaactagatcagacgttggggtgcgacgcagaggtaacgttcgtacccctagtgaccagcggcggatacgccggcatcggttttcaatcaatgggcacttttataaccataagacctccgtgtttactccagcttatgggagtgtcaccaacgttcgaatcaacagcactatgaccacacctcaagtgttaaagttactgctgaacaagttcaaaatcgagaacagtgctgaggaattcgctctttatgtcgtgcacacttcaggtgaaaaacagaaactgaaggcaaccgactatccacttatagctcgcatcctgcagggtccctgtgaacagatcagcaaagtctttctcatggagaaggaccaggttgaggaggtgacctacgacgtcgcccagtacattaagtttgaaatgcctgtgcttaaatcttttatccagaaactacaagaggaggaggatagagaagtgaaaaaattgatgagaaaatacacggtactgaggctgatgatccggcagaggctggaggagatagcagagacgcccgccacaatctag

SEQ ID NO: 181909 - DNA, 981 bp, Artificial Sequence
  derived and/or modified sequence
atggactacagccaccagaccagcctggtgccctgcggccaggacaaatatatctctaaaaatgagttactcctacacctgaaaacgtataatctatattatgaggggcagaatctgcagctgcggcacagggaggaagaggatgaatttatcgtggaggggctgttgaatatttcttgggggctccgccggccgatcaggttgcagatgcaggacgacaatgagcgtattagacctccgccctcctcctccagctggcacagcgggtgcaatttgggggcccagggtacaaccttgaaaccactaacggtgccaaaggttcagatatcagaggtagacgccccacctgaaggcgatcagatgcccagcagtaccgactctcgaggactgaagcccctgcaggaggacacccctcaactgatgaggactaggtcagacgtcggagttaggcggcgggggaatgttaggacgccaagcgatcagaggcggatccggcgccaccggttcagtatcaacggccacttttataaccacaaaaccagcgtgttcacaccggcctatggctcagtgacaaacgtgagaatcaactccactatgaccacccctcaagtgctgaagctgttactgaataaatttaaaatcgagaactcagccgaagagtttgctctgtatgtggtgcacacatcaggcgagaagcagaagctgaaggcgacagactaccctctcatcgcacggattttgcagggaccgtgcgaacagatttccaaggttttccttatggagaaagatcaggttgaggaagtgacttacgatgttgcccaatacattaaattcgagatgcctgtgttgaagtcattcattcaaaagctgcaggaggaggaggaccgagaagttaagaagctcatgcgcaaatataccgtgcttcggctgatgattcgacaaagactggaagaaatagcagagactcctgccactatctag

SEQ ID NO: 181910 - DNA, 981 bp, Artificial Sequence
  derived and/or modified sequence
atggactattcacaccaaacaagcctggttccatgcggtcaagacaaatacatcagtaaaaacgagctccttctgcatctgaaaacttacaacctttactacgagggtcagaatttacagttacggcaccgagaggaggaggatgaattcatcgtggagggtctgctcaacatttcgtggggactgagaagaccaattcgcctccagatgcaggacgacaatgagagaatccgtccccctccttcctctagttcctggcacagcggatgcaatcttggcgctcagggaacaaccctcaaaccattgacggtgccaaaagtgcaaatttcagaagttgatgcaccacctgagggggaccaaatgccctccagcacagacagtcggggactgaagccactccaggaagacacaccgcagttgatgcgcacacggagcgacgtcggcgttagaagacgaggcaacgtccggaccccgtccgatcaacggcgtattcggagacacaggttcagcattaatggccatttttataatcacaagacatcagtttttacacccgcttacggttctgtcaccaatgtgcggattaattctacaatgacaacaccccaggttctgaagctactcctcaataaattcaagatcgaaaatagtgccgaggaatttgctctctacgtggtgcacactagcggcgaaaagcagaagctgaaggcaacagactacccactcatcgcgcgtattctgcagggcccatgcgaacagattagcaaggtgttcctgatggagaaagatcaggtggaagaggtgacctatgatgtcgctcaatatatcaaatttgaaatgcccgtcctgaagtcttttatccagaagctccaggaagaagaagatcgcgaggtcaagaaactgatgagaaaatacacagtcctgcgcctgatgattagacagcggcttgaagagatcgccgaaacacctgcaacaatttag

SEQ ID NO: 181911 - DNA, 981 bp, Artificial Sequence
  derived and/or modified sequence
atggattattcccatcagacctctcttgttccatgtggccaagacaagtatatctctaagaatgagctcctgctgcacctgaaaacttacaatctgtactacgagggtcagaatctacaattgcgacatagagaggaggaggatgagttcatcgttgaagggttactgaacatcagctggggtctgaggagacccatcagattacagatgcaggacgataatgaaagaattaggcccccaccctcctcctctagttggcacagcgggtgcaaccttggggctcagggcaccacactcaaacctcttacagtgccaaaggtgcagatttcagaggttgatgcccctcctgagggtgatcagatgcccagctccaccgatagcaggggtttgaagcccctccaggaagacacacctcagctgatgcgaacaagatcagacgtgggcgtacgtaggcgaggtaacgttcggactccgagtgaccagcggaggattaggcggcaccgattctccatcaacggacatttttacaatcataagacaagcgtgttcacaccagcgtatggctccgtaactaacgtgaggattaactcaacaatgactacacctcaagttttaaagctgcttttgaataaatttaagatagagaacagcgccgaggaatttgcactctatgtggtgcacactagcggtgagaaacagaagctgaaggcaacagactatccactgatagcccgaatcctccagggcccatgtgagcaaatctccaaggttttcctgatggagaaggaccaggtcgaggaagtcacatatgatgtggcacagtatattaagttcgagatgcctgtgcttaagagctttatccagaagctgcaggaagaggaggatcgagaggtcaagaagctgatgagaaaatacacggttctccgtctcatgatcagacagcggctcgaagagatcgcggagacaccagcgacaatctag

SEQ ID NO: 181912 - DNA, 5282 bp, Artificial Sequence
  derived and/or modified sequence
aatgctgtgagttccttgttaggcctctccttccgatgaaaagagaaaggaagaatggactacagccaccaaacgtccctagtcccatgtggacaagataaatacatttccaaaaatgaacttctcttgcatctgaagacctacaacttgtactatgaaggccagaatttacagctccggcaccgggaggaagaagacgagttcattgtggaggggctcctgaacatctcctggggcctgcgccggcccattcgcctgcagatgcaggatgacaacgaacgcattcgaccccctccatcctcctcctcctggcactctggctgtaacctgggggctcagggaaccactctgaagcccctgactgtgcccaaagttcagatctcagaggtggatgccccgccggagggtgaccagatgccaagctccacagactccaggggcctgaagcccctgcaggaggacaccccacagctgatgcgcacacgcagtgatgttggggtgcgtcgccgtggcaatgtgaggacgcctagtgaccagcggcgaatcagacgccaccgcttctccatcaacggccatttctacaaccataagacatccgtgttcacaccagcctatggctctgtcaccaacgtccgcatcaacagcaccatgaccaccccacaggtcctgaagctgctgctcaacaaatttaagattgagaattcagcagaggagtttgccttgtacgtggtccatacgagtggtgagaaacagaagctgaaggccaccgattacccgctgattgcccgaatcctccagggcccatgtgagcagatctccaaagtgttcctaatggagaaggaccaggtggaggaagtcacctacgacgtggcccagtatataaagttcgagatgccggtacttaaaagcttcattcagaagctccaggaggaagaagatcgggaagtaaagaagctgatgcgcaagtacaccgtgctccggctaatgattcgacagaggctggaggagatagccgagaccccagcaacaatctgagccatgagaacgaggggatctgggcaccccaggaaccgccattgcccataagacccccaggaagctaggcactttctttccatggaaacatttagacacaaacctccccagctccggccaagccatcatttgctacctggagctggatgtagaagtcagcagacagctccctatccctggacccctgccctccttttttctgctcacaaggacttttgattttagttataaggaggacccaaaatgtgtgtgtgtacatgtgtgtgcacacatggtacgtgtccatgtgcctacctgatactttcacatgtaattaaattccaggcaaccagcacaagagccgtgagcttggcacatgtgctgctcgtgagcaggaaaatcagaggagccactgatctgagtggtatttaggttgaaggaaagatttctcctctcaagtgccagggagcagccacacgtctgtctgtgtttagagagggaagagggttctccaggttcaccatttgggttgtttatatgttggtagaaattctccctgtatgcctagaaggatcagtgaatgtaagagccttggaaattaacaaaataacagccacataaccttgcggcaagtctgatggaaagaaaaagataaaccatccgtggggtagatgcaataagcccacgtatttttacactggaaacgttgattgttttaaatgacaaagacatatgtgatgttctatgtggaaacctgtgaagagtggattctgcctccatctctgcctccatggctacctttaggagacagagaagatcctgtgtgtttctctgtacccagctgacagcctgtctctatggcgcttccttgagtggaaggaaatgtctcaagaaacaaagatctcgctggtgcgtacacagtgctgaccagctagtgtggccagggcctggtggcctggtggccaggaagtttcaggttgaagggaaatgtcgaggctacctgcagatatgacaggtgccttgaacgcagcccatcttcatgtcatcaaaggtcttcctgcacttgaagctggggcgatgtttgcagtcaagaccattctttccaacctctgggttcttgcaagttgccctcaccttgtgtgtggagatgcattccaagaatgaagcctcatcttgctactgagtgtggggttcagggaagctctttaggccacctggtgaaggtgcatggggaggatggagcttctcctcagctcctctgagcagccacctatgtgatctttaaatccaaccccaatgggagaaaagggcaagaacagtctgtgccctgggactcctatcaggaagcttgacaggcagctgggcatcagtgcagctgatatcgtttgaggagggagacagatgcttggacctgggtgcctggctatggagattgaccaagcaagatcaggagctcctgatagcaggcgtctttgagcctagctggggtagaggcactgcccatctcttctccaccttctctccacagaatgtttgcagagctgggcagttgaggaaaggacagcccctggttggtgcctccaaaggaaggtggacttttttggtggagacgtttctgccctgggcaccctcctgcccccgattcatacctatggcttcttgagaaggctcacagctgtggtcttaacgtagactgcagaaagatggcatgcggcccctggcatttcgccaagggttttatagcaagtctccttcctccatagggacagcagcaccagccctgtggggcatggagtggaagcccagaagggcttctgcaagctgcacagaactggggtaagaagacaaagagtagccaccgggagaggcttcctttgttacagctgggaaagaacagttctgtgaatgcaaacacctcctgagttttgcaattgagaaaatgatttggagaacttctcttctggtaatttttattttgaatgttcagggccttagttggccccagtaattctccttggaggacttgggagaagaatttccacaaagcaaactactaaccactagctcttactggacagcgatttctggcttataagagttctctttgatttgcactagcactacgatagtgttagatggggaaatactgcaacatgtccagttggccagatcactttccaagggagcgatactaaggcagactcagctttttaaagatgggaggtcaggaggtggaagtgagaggagatcccatctcacacaacacacttccacgtaatgcagaccacacttttccattttgtcctgccctcttgagaggtcatttctcacgtcctaagaacctgatcagaaattttggaagggttctttgaaatagcagcagttgaaacagagacactttgccacagtgtggagcagattttctcactggtatcacatggtcttgcagttttgaactcttcgaccgatttgtgggagtttatgtaattgcgtgcaatgaacctgaaattgtgtaaaggacaaaagaccagtttatagggttgggttttttttccaacttgtgaaaagcagtttagctgcatctgtctccccaccacccccaccccgggaggggcttatgttacaaggtgatcaagtgaaggaaaaacctgagcctatctggctgggatggtggaattaagcacaaggtcacattctctgtgatcacatgagagggaaggtgatgacttaaatggcagggggtggggattatcttggggagaggctgaaaagcacaaaagatagtcttccctgtacgtattggtgaagaacgtgcacaaggctggatggacttcaacttggagttgagttgaggcaagaggatttctggatattagtcacccatctgcaagaaaaatgctgaggcctcgggtcaagattttgatctgagacatgctgatgcttcaaggagaaatattttcacaatcctctcttccctcaccagaagagaacagtactctctcctagaaacctctaggtaaacacattttatcctaatatcggtagcatataatgccccccccaaaatatctgttttccatgcaaaaaagtctcaacaagaagtctgtggagttgagtggttacttcaaagtgtcaggagagtgaagaaattggccacagaagagcaagaagctctcttaagaaaagggaattctctttaaagaaaccaccaccaacaacaaaacaaccaaaaaccatgttttatgtcaaagctctgtagcacagagaatgtggtgtcacagatacatcgccgagagaggtttctttctttcttttttttttttttgagacagagtctggttctgtttcccaggctggagtgcagtggtgggatctcagctcactgcaacatccgcctctggggttcaagtgattctcctgtctcagcctcccaagtagctggaattacagggacccgccaccacgcccggctaatttttttgtgtggttttagtagaggtggggtttcaccatcttggccaggctggtcttgaactcctgacctcgtgatccacccgcctaggcctcccaaagtgttgggattacaggcgtgagccactgtgcccagccaaaagagaaatttctacatgaacaaggcaatttcagtgtcttacagcggccaaaccatgacgtgaagaatgagataggagacaggagatcaccataagcgtccctgatatagcagcacacattttcacgtttccacttaaatcgttttgcacaaagtcttgcttcgctcagatgagatgagatatgatttcctagagatgtaaaaataagaatgaatgtggcgcccccttcttccagatgtaatagaaagctctgccctatcacaaggggggtgttgaagcgccccttgtgttttaactgtatttaactgagcacaagatgcacaagctgtggtgggaaaccctcagtttacctttggagtcttccctgcagatcgcagacctgtttccaggctgatgtttctggtgtgtaattgctagcgtttctgaagggttttcccaattgttttagccttgtgaagtattcttaattataacttgcctttcagcgatggtacatgacttgattcaacgtttggttctgaacttacacactgatgcgtttactcatctaacataatctgacagggcctcagcaagggagccatacatttttgtaacattttgatatgttttaatgcatctgacttagatcttactgaaataaagcacttttcaaag

SEQ ID NO: 181913 - DNA, 5427 bp, Artificial Sequence
  derived and/or modified sequence
ggggaggaagaaaggcgaaggcaaggcgaaggggtggagagtgatatgaagagcgagagaaaagagaggacagcggacgagcagatccggtatctggaatcccggcgcctagaacgtgtttttcgggagagcaaaggctgtgtctacggcagcctggggatatagcctctccttccgatgaaaagagaaaggaagaatggactacagccaccaaacgtccctagtcccatgtggacaagataaatacatttccaaaaatgaacttctcttgcatctgaagacctacaacttgtactatgaaggccagaatttacagctccggcaccgggaggaagaagacgagttcattgtggaggggctcctgaacatctcctggggcctgcgccggcccattcgcctgcagatgcaggatgacaacgaacgcattcgaccccctccatcctcctcctcctggcactctggctgtaacctgggggctcagggaaccactctgaagcccctgactgtgcccaaagttcagatctcagaggtggatgccccgccggagggtgaccagatgccaagctccacagactccaggggcctgaagcccctgcaggaggacaccccacagctgatgcgcacacgcagtgatgttggggtgcgtcgccgtggcaatgtgaggacgcctagtgaccagcggcgaatcagacgccaccgcttctccatcaacggccatttctacaaccataagacatccgtgttcacaccagcctatggctctgtcaccaacgtccgcatcaacagcaccatgaccaccccacaggtcctgaagctgctgctcaacaaatttaagattgagaattcagcagaggagtttgccttgtacgtggtccatacgagtggtgagaaacagaagctgaaggccaccgattacccgctgattgcccgaatcctccagggcccatgtgagcagatctccaaagtgttcctaatggagaaggaccaggtggaggaagtcacctacgacgtggcccagtatataaagttcgagatgccggtacttaaaagcttcattcagaagctccaggaggaagaagatcgggaagtaaagaagctgatgcgcaagtacaccgtgctccggctaatgattcgacagaggctggaggagatagccgagaccccagcaacaatctgagccatgagaacgaggggatctgggcaccccaggaaccgccattgcccataagacccccaggaagctaggcactttctttccatggaaacatttagacacaaacctccccagctccggccaagccatcatttgctacctggagctggatgtagaagtcagcagacagctccctatccctggacccctgccctccttttttctgctcacaaggacttttgattttagttataaggaggacccaaaatgtgtgtgtgtacatgtgtgtgcacacatggtacgtgtccatgtgcctacctgatactttcacatgtaattaaattccaggcaaccagcacaagagccgtgagcttggcacatgtgctgctcgtgagcaggaaaatcagaggagccactgatctgagtggtatttaggttgaaggaaagatttctcctctcaagtgccagggagcagccacacgtctgtctgtgtttagagagggaagagggttctccaggttcaccatttgggttgtttatatgttggtagaaattctccctgtatgcctagaaggatcagtgaatgtaagagccttggaaattaacaaaataacagccacataaccttgcggcaagtctgatggaaagaaaaagataaaccatccgtggggtagatgcaataagcccacgtatttttacactggaaacgttgattgttttaaatgacaaagacatatgtgatgttctatgtggaaacctgtgaagagtggattctgcctccatctctgcctccatggctacctttaggagacagagaagatcctgtgtgtttctctgtacccagctgacagcctgtctctatggcgcttccttgagtggaaggaaatgtctcaagaaacaaagatctcgctggtgcgtacacagtgctgaccagctagtgtggccagggcctggtggcctggtggccaggaagtttcaggttgaagggaaatgtcgaggctacctgcagatatgacaggtgccttgaacgcagcccatcttcatgtcatcaaaggtcttcctgcacttgaagctggggcgatgtttgcagtcaagaccattctttccaacctctgggttcttgcaagttgccctcaccttgtgtgtggagatgcattccaagaatgaagcctcatcttgctactgagtgtggggttcagggaagctctttaggccacctggtgaaggtgcatggggaggatggagcttctcctcagctcctctgagcagccacctatgtgatctttaaatccaaccccaatgggagaaaagggcaagaacagtctgtgccctgggactcctatcaggaagcttgacaggcagctgggcatcagtgcagctgatatcgtttgaggagggagacagatgcttggacctgggtgcctggctatggagattgaccaagcaagatcaggagctcctgatagcaggcgtctttgagcctagctggggtagaggcactgcccatctcttctccaccttctctccacagaatgtttgcagagctgggcagttgaggaaaggacagcccctggttggtgcctccaaaggaaggtggacttttttggtggagacgtttctgccctgggcaccctcctgcccccgattcatacctatggcttcttgagaaggctcacagctgtggtcttaacgtagactgcagaaagatggcatgcggcccctggcatttcgccaagggttttatagcaagtctccttcctccatagggacagcagcaccagccctgtggggcatggagtggaagcccagaagggcttctgcaagctgcacagaactggggtaagaagacaaagagtagccaccgggagaggcttcctttgttacagctgggaaagaacagttctgtgaatgcaaacacctcctgagttttgcaattgagaaaatgatttggagaacttctcttctggtaatttttattttgaatgttcagggccttagttggccccagtaattctccttggaggacttgggagaagaatttccacaaagcaaactactaaccactagctcttactggacagcgatttctggcttataagagttctctttgatttgcactagcactacgatagtgttagatggggaaatactgcaacatgtccagttggccagatcactttccaagggagcgatactaaggcagactcagctttttaaagatgggaggtcaggaggtggaagtgagaggagatcccatctcacacaacacacttccacgtaatgcagaccacacttttccattttgtcctgccctcttgagaggtcatttctcacgtcctaagaacctgatcagaaattttggaagggttctttgaaatagcagcagttgaaacagagacactttgccacagtgtggagcagattttctcactggtatcacatggtcttgcagttttgaactcttcgaccgatttgtgggagtttatgtaattgcgtgcaatgaacctgaaattgtgtaaaggacaaaagaccagtttatagggttgggttttttttccaacttgtgaaaagcagtttagctgcatctgtctccccaccacccccaccccgggaggggcttatgttacaaggtgatcaagtgaaggaaaaacctgagcctatctggctgggatggtggaattaagcacaaggtcacattctctgtgatcacatgagagggaaggtgatgacttaaatggcagggggtggggattatcttggggagaggctgaaaagcacaaaagatagtcttccctgtacgtattggtgaagaacgtgcacaaggctggatggacttcaacttggagttgagttgaggcaagaggatttctggatattagtcacccatctgcaagaaaaatgctgaggcctcgggtcaagattttgatctgagacatgctgatgcttcaaggagaaatattttcacaatcctctcttccctcaccagaagagaacagtactctctcctagaaacctctaggtaaacacattttatcctaatatcggtagcatataatgccccccccaaaatatctgttttccatgcaaaaaagtctcaacaagaagtctgtggagttgagtggttacttcaaagtgtcaggagagtgaagaaattggccacagaagagcaagaagctctcttaagaaaagggaattctctttaaagaaaccaccaccaacaacaaaacaaccaaaaaccatgttttatgtcaaagctctgtagcacagagaatgtggtgtcacagatacatcgccgagagaggtttctttctttcttttttttttttttgagacagagtctggttctgtttcccaggctggagtgcagtggtgggatctcagctcactgcaacatccgcctctggggttcaagtgattctcctgtctcagcctcccaagtagctggaattacagggacccgccaccacgcccggctaatttttttgtgtggttttagtagaggtggggtttcaccatcttggccaggctggtcttgaactcctgacctcgtgatccacccgcctaggcctcccaaagtgttgggattacaggcgtgagccactgtgcccagccaaaagagaaatttctacatgaacaaggcaatttcagtgtcttacagcggccaaaccatgacgtgaagaatgagataggagacaggagatcaccataagcgtccctgatatagcagcacacattttcacgtttccacttaaatcgttttgcacaaagtcttgcttcgctcagatgagatgagatatgatttcctagagatgtaaaaataagaatgaatgtggcgcccccttcttccagatgtaatagaaagctctgccctatcacaaggggggtgttgaagcgccccttgtgttttaactgtatttaactgagcacaagatgcacaagctgtggtgggaaaccctcagtttacctttggagtcttccctgcagatcgcagacctgtttccaggctgatgtttctggtgtgtaattgctagcgtttctgaagggttttcccaattgttttagccttgtgaagtattcttaattataacttgcctttcagcgatggtacatgacttgattcaacgtttggttctgaacttacacactgatgcgtttactcatctaacataatctgacagggcctcagcaagggagccatacatttttgtaacattttgatatgttttaatgcatctgacttagatcttactgaaataaagcacttttcaaagaga

SEQ ID NO: 181914 - protein, 920 aa, Artificial Sequence
  derived and/or modified sequence
MGRSNSRSHSSRSKSRSQSSSRSRSRSHSRKKRYSSRSRSRTYSRSRSRDRMYSRDYRRDYRNNRGMRRPYGYRGRGRGYYQGGGGRYHRGGYRPVWNRRHSRSPRRGRSRSRSPKRRSVSSQRSRSRSRRSYRSSRSPRSSSSRSSSPYSKSPVSKRRGSQEKQTKKAEGEPQEESPLKSKSQEEPKDTFEHDPSESIDEFNKSSATSGDIWPGLSAYDNSPRSPHSPSPIATPPSQSSSCSDAPMLSTVHSAKNTPSQHSHSIQHSPERSGSGSVGNGSSRYSPSQNSPIHHIPSRRSPAKTIAPQNAPRDESRGRSSFYPDGGDQETAKTGKFLKRFTDEESRVFLLDRGNTRDKEASKEKGSEKGRAEGEWEDQEALDYFSDKESGKQKFNDSEGDDTEETEDYRQFRKSVLADQGKSFATASHRNTEEEGLKYKSKVSLKGNRESDGFREEKNYKLKETGYVVERPSTTKDKHKEEDKNSERITVKKETQSPEQVKSEKLKDLFDYSPPLHKNLDAREKSTFREESPLRIKMIASDSHRPEVKLKMAPVPLDDSNRPASLTKDRLLASTLVHSVKKEQEFRSIFDHIKLPQASKSTSESFIQHIVSLVHHVKEQYFKSAAMTLNERFTSYQKATEEHSTRQKSPEIHRRIDISPSTLRKHTRLAGEERVFKEENQKGDKKLRCDSADLRHDIDRRRKERSKERGDSKGSRESSGSRKQEKTPKDYKEYKSYKDDSKHKREQDHSRSSSSSASPSSPSSREEKESKKEREEEFKTHHEMKEYSGFAGVSRPRGTFFRIRGRGRARGVFAGTNTGPNNSNTTFQKRPKEEEWDPEYTPKSKKYFLHDDRDDGVDYWAKRGRGRGTFQRGRGRFNFKKSGSSPKWTHDKYQGDGIVEDEEETMENNEEKKDRRKEEKE

SEQ ID NO: 181915 - protein, 411 aa, Artificial Sequence
  derived and/or modified sequence
MATTATMATSGSARKRLLKEEDMTKVEFETSEEVDVTPTFDTMGLREDLLRGIYAYGFEKPSAIQQRAIKQIIKGRDVIAQSQSGTGKTATFSISVLQCLDIQVRETQALILAPTRELAVQIQKGLLALGDYMNVQCHACIGGTNVGEDIRKLDYGQHVVAGTPGRVFDMIRRRSLRTRAIKMLVLDEADEMLNKGFKEQIYDVYRYLPPATQVVLISATLPHEILEMTNKFMTDPIRILVKRDELTLEGIKQFFVAVEREEWKFDTLCDLYDTLTITQAVIFCNTKRKVDWLTEKMREANFTVSSMHGDMPQKERESIMKEFRSGASRVLISTDVWARGLDVPQVSLIINYDLPNNRELYIHRIGRSGRYGRKGVAINFVKNDDIRILRDIEQYYSTQIDEMPMNVADLI

SEQ ID NO: 181916 - DNA, 1236 bp, Artificial Sequence
  derived and/or modified sequence
atggctaccacagcgacgatggcaacgtcaggctctgctcgaaaacgcctacttaaggaggaggacatgactaaggtggaattcgagacctctgaggaagttgacgtgacacccacattcgacacaatgggtcttcgggaggacctgctgcggggaatctatgcctatgggtttgagaagcccagcgctattcagcagcgggctatcaaacagatcattaagggcagggatgtcattgcccagtctcagagcggcactgggaagaccgcaaccttcagcatcagtgtgttgcagtgcttggatatccaagttagagaaactcaggctctgattctggcccctacccgggaactcgccgtgcagatccagaaggggttactggcgctgggcgactacatgaacgttcagtgccacgcttgcatcggcggcactaacgtgggtgaggacattcgcaagctggactatggacagcacgtggtggctggcaccccggggagggtttttgacatgatccgtagacgatcgctgagaacccgggccataaaaatgttagtacttgacgaagccgatgagatgttaaataagggcttcaaagagcaaatatacgatgtgtacagatacttgccacccgcaacacaagtggttctcatttcagcaactctcccccacgagatcctggaaatgacaaacaagttcatgactgacccaatacgaatcctagtgaaaagagatgagttgacacttgaggggattaagcagttctttgtcgccgtagaaagggaagagtggaaattcgatacactgtgtgatctgtatgacacactcaccatcacacaggcggttatattctgcaatacgaagcgcaaagttgattggttgacggagaaaatgcgggaggccaactttacggtgtcaagcatgcacggcgatatgccgcagaaggagcgagagtcgattatgaaggagtttagatcaggcgcctctcgagtcctcattagcaccgacgtctgggcacgggggcttgatgtgcctcaggtgagcctcatcatcaactacgacctgccaaataaccgcgaactgtatatacaccgtattggcagatctggccgctatggaaggaaaggagtggccataaacttcgttaagaacgacgatatccggatactgcgggacatagaacagtactacagcactcaaatcgatgagatgcctatgaatgtggccgacctaatctag

SEQ ID NO: 181917 - DNA, 1236 bp, Artificial Sequence
  derived and/or modified sequence
atggccaccacagccaccatggccaccagcggcagcgccaggaagaggctgctgaaggaggaggacatgaccaaggtggagtttgagaccagcgaggaggtggatgtgacccccacctttgacaccatgggcctgcgggaggacctgctgcggggcatctatgcctacggctttgagaagcccagcgccatccagcagagggccatcaagcagatcatcaagggcagagatgtgattgcccagagccagagcggcaccgggaagacagccaccttcagcatctctgtgctgcagtgcctggacatccaggtgcgggagacccaggccctgatcctggcccccacccgggagctggccgtgcagatccagaagggcctgctggccctgggggactacatgaatgtgcagtgccacgcctgcattggaggcaccaacgtgggggaggacatcaggaagctggactatggccagcacgtggtggccggcaccccaggccgggtgtttgacatgatcagaagaagaagcctgcggacccgggccatcaagatgctggtgctggatgaagcagatgagatgctgaacaagggcttcaaggagcagatctatgatgtgtaccgctacctgcccccagccacccaggtggtgctgatcagcgccaccctgccccatgagatcctggagatgaccaacaagttcatgacagaccccatccgcatcctggtgaagagagatgagctgaccctggagggcatcaagcagttctttgtggccgtggagcgggaggagtggaagtttgacaccctgtgtgacctgtatgacaccctgaccatcacccaggccgtcatcttctgcaacaccaagaggaaggtggactggctgacagagaagatgagggaggccaacttcaccgtgtcctccatgcacggggacatgccccagaaggagcgggagagcatcatgaaggagttccgcagcggggccagccgggtgctgatcagcacagatgtgtgggcccggggcctggatgtgccccaggtgtccctcatcatcaactatgacctgcccaacaaccgggagctgtacatccacagaattggccgcagcggccgctatggcaggaagggcgtggccatcaactttgtgaagaatgatgacatccgcatcctgcgggacatcgagcagtactacagcacccagattgatgagatgcccatgaatgtggccgacctgatctag

SEQ ID NO: 181918 - DNA, 1236 bp, Artificial Sequence
  derived and/or modified sequence
atggccaccaccgccaccatggccaccagcggcagcgcccggaagcgcctgctgaaggaggaggatatgacaaaggtagagtttgagacgtccgaggaggttgacgtcacccccactttcgatacaatgggcttaagagaagatctgctcagagggatttacgcatatgggtttgagaaacccagcgccatccagcagcgggccataaagcagatcatcaagggtcgtgacgtgattgcgcagtctcaatccggcactggaaagaccgcaactttttcaatttctgtgctgcagtgcctggatattcaggtgcgggagacacaggccctcattctcgctccgacccgggagctggcagtacaaatccaaaaaggacttctggctcttggcgattatatgaatgtgcagtgccacgcctgtatcggtgggacgaacgtaggagaggatatcaggaagttggattacgggcagcatgtggtggccggtactccaggacgggtgttcgacatgattagacggaggagcctgagaacaagggctattaaaatgttggtgctagacgaggcagacgagatgctgaataagggtttcaaggaacagatttacgacgtatatcgttatttgccacccgcgacacaagtggtccttatcagcgccactctgcctcacgagatcctcgagatgacaaacaaattcatgacggatcctatccggattctcgtcaaaagggatgaactgacccttgaagggattaagcagttctttgtggcagtggaaagggaggagtggaagttcgataccttatgcgacctgtacgatacactgaccattactcaggccgtgattttctgcaatacgaagaggaaggttgactggctgaccgaaaaaatgagggaggctaattttactgtcagtagcatgcacggggacatgccccagaaagagagagagagtataatgaaagagttcaggtccggtgcctcacgcgtgctgattagcactgacgtttgggcccgcgggctcgacgtcccccaagtttctctgatcatcaattacgatctgcccaacaatagggagctgtatattcaccggataggcaggagcggcaggtatgggagaaaaggagtcgcgatcaacttcgttaagaacgatgacatccgaattctgcgtgatatcgagcaatattactcaacgcagatagatgaaatgccaatgaatgtcgccgaccttatttag

SEQ ID NO: 181919 - DNA, 1236 bp, Artificial Sequence
  derived and/or modified sequence
atggccacgacagctaccatggcaacttcagggtctgccagaaagaggctcctcaaggaagaggatatgacgaaggtggaatttgaaacaagcgaggaggtggacgtgaccccgacattcgacactatgggcctccgcgaagatttattacggggtatttatgcatacggattcgaaaaaccttctgcgatacagcagcgggctataaaacagatcatcaaaggcagagatgtgattgctcagtcacagagtggcactggaaaaaccgcaaccttctccattagtgtcctccaatgtttggacatccaggtccgcgagacccaggcactgatcctagctcccacaagggagctggcagttcagattcagaagggcttactagccctgggtgactatatgaacgttcagtgccacgcctgtatcggtggaacaaacgtcggcgaggacatccgcaagctagattatgggcagcacgttgttgcaggcacccctggccgtgtcttcgatatgatccgccgaagaagcttaagaactagggctatcaagatgttggttttggacgaggcggacgaaatgcttaacaaaggattcaaagagcaaatctacgatgtttatcgctatttgccgccagcaactcaggtggtgttgattagtgcaacccttccacatgaaatcttggaaatgaccaataagttcatgacggaccccattagaattcttgtgaaaagagatgagctcacgctcgaagggatcaagcagttctttgtagcagtggagagagaagaatggaagttcgatacactgtgcgatttgtacgacacactaaccatcacacaggcggtcattttttgcaatacgaagcggaaagtggattggctgacggagaagatgagggaagctaacttcactgtgtcatctatgcatggagatatgccacagaaggagcgagagtccatcatgaaggagttccggtctggtgcatcaagagtgctgatctcaaccgatgtttgggccagggggctggatgtaccacaagtcagtttaatcatcaattacgaccttcccaataatagggaactgtacattcatcggatcggtagatccggtaggtatggtcgcaaaggggtagccataaatttcgtgaagaacgatgacatcagaattctgagagatattgagcaatattactctacccagattgatgaaatgccaatgaacgtggctgatctcatttag

SEQ ID NO: 181920 - DNA, 1734 bp, Artificial Sequence
  derived and/or modified sequence
acgcacgcacgtctctcgctttcgcatacttaaggcgtctgttctcggcagcggcacagcgaggtcggcagcggcacagcgaggtcggcagcggcacagcgaggtcggcagcggcacagcgaggtcggcagcggcagcgaggtcggcagcggcacagcgaggtcggcagcggcagcgaggtcggcagcggcgcgcgctgtgctcttccgcggactctgaatcatggcgaccacggccacgatggcgacctcgggctcggcgcgaaagcggctgctcaaagaggaagacatgactaaagtggaattcgagaccagcgaggaggtggatgtgacccccacgttcgacaccatgggcctgcgggaggacctgctgcggggcatctacgcttacggttttgaaaaaccatcagcaatccagcaacgagcaatcaagcagatcatcaaagggagagatgtcatcgcacagtctcagtccggcacaggaaaaacagccaccttcagtatctcagtcctccagtgtttggatattcaggttcgtgaaactcaagctttgatcttggctcccacaagagagttggctgtgcagatccagaaggggctgcttgctctcggtgactacatgaatgtccagtgccatgcctgcattggaggcaccaatgttggcgaggacatcaggaagctggattacggacagcatgttgtcgcgggcactccagggcgtgtttttgatatgattcgtcgcagaagcctaaggacacgtgctatcaaaatgttggttttggatgaagctgatgaaatgttgaataaaggtttcaaagagcagatttacgatgtatacaggtacctgcctccagccacacaggtggttctcatcagtgccacgctgccacacgagattctggagatgaccaacaagttcatgaccgacccaatccgcatcttggtgaaacgtgatgaattgactctggaaggcatcaagcaatttttcgtggcagtggagagggaagagtggaaatttgacactctgtgtgacctctacgacacactgaccatcactcaggcggtcatcttctgcaacaccaaaagaaaggtggactggctgacggagaaaatgagggaagccaacttcactgtatcctcaatgcatggagacatgccccagaaagagcgggagtccatcatgaaggagttccggtcgggcgccagccgagtgcttatttctacagatgtctgggccagggggttggatgtccctcaggtgtccctcatcattaactatgatctccctaataacagagaattgtacatacacagaattgggagatcaggtcgatacggccggaagggtgtggccattaactttgtaaagaatgacgacatccgcatcctcagagatatcgagcagtactattccactcagattgatgagatgccgatgaacgttgctgatcttatctgaagcagcagatcagtgggatgagggagactgttcacctgctgtgtactcctgtttggaagtatttagatccagattctacttaatggggtttatatggactttcttctcataaatggcctgccgtctcccttcctttgaagaggatatggggattctgctctcttttcttatttacatgtaaataatacattgttctaagtctttttcattaaaaatttaaaacttttcccataaactctatacttctaaggtgccaccaccttctctagtaactta

SEQ ID NO: 181921 - DNA, 1236 bp, Artificial Sequence
  derived and/or modified sequence
atggccaccaccgccaccatggccaccagcggcagcgccagaaagagactgctgaaggaggaggacatgaccaaggtggagttcgagaccagcgaggaggtggacgtgacccccaccttcgacaccatgggcctgagagaggacctgctgagaggcatctacgcctacggcttcgagaagcccagcgccatccagcagagagccatcaagcagatcatcaagggcagagacgtgatcgcccagagccagagcggcaccggcaagaccgccaccttcagcatcagcgtgctgcagtgcctggacatccaggtgagagagacccaggccctgatcctggcccccaccagagagctggccgtgcagatccagaagggcctgctggccctgggcgactacatgaacgtgcagtgccacgcctgcatcggcggcaccaacgtgggcgaggacatcagaaagctggactacggccagcacgtggtggccggcacccccggcagagtgttcgacatgatcagaagaagaagcctgagaaccagagccatcaagatgctggtgctggacgaggccgacgagatgctgaacaagggcttcaaggagcagatctacgacgtgtacagatacctgccccccgccacccaggtggtgctgatcagcgccaccctgccccacgagatcctggagatgaccaacaagttcatgaccgaccccatcagaatcctggtgaagagagacgagctgaccctggagggcatcaagcagttcttcgtggccgtggagagagaggagtggaagttcgacaccctgtgcgacctgtacgacaccctgaccatcacccaggccgtgatcttctgcaacaccaagagaaaggtggactggctgaccgagaagatgagagaggccaacttcaccgtgagcagcatgcacggcgacatgccccagaaggagagagagagcatcatgaaggagttcagaagcggcgccagcagagtgctgatcagcaccgacgtgtgggccagaggcctggacgtgccccaggtgagcctgatcatcaactacgacctgcccaacaacagagagctgtacatccacagaatcggcagaagcggcagatacggcagaaagggcgtggccatcaacttcgtgaagaacgacgacatcagaatcctgagagacatcgagcagtactacagcacccagatcgacgagatgcccatgaacgtggccgacctgatctag

SEQ ID NO: 181922 - protein, 642 aa, Artificial Sequence
  derived and/or modified sequence
MATAMDWLPWSLLLFSLMCETSAFYVPGVAPINFHQNDPVEIKAVKLTSSRTQLPYEYYSLPFCQPSKITYKAENLGEVLRGDRIVNTPFQVLMNSEKKCEVLCSQSNKPVTLTVEQSRLVAERITEDYYVHLIADNLPVATRLELYSNRDSDDKKKEKDVQFEHGYRLGFTDVNKIYLHNHLSFILYYHREDMEEDQEHTYRVVRFEVIPQSIRLEDLKADEKSSCTLPEGTNSSPQEIDPTKENQLYFTYSVHWEESDIKWASRWDTYLTMSDVQIHWFSIINSVVVVFFLSGILSMIIIRTLRKDIANYNKEDDIEDTMEESGWKLVHGDVFRPPQYPMILSSLLGSGIQLFCMILIVIFVAMLGMLSPSSRGALMTTACFLFMFMGVFGGFSAGRLYRTLKGHRWKKGAFCTATLYPGVVFGICFVLNCFIWGKHSSGAVPFPTMVALLCMWFGISLPLVYLGYYFGFRKQPYDNPVRTNQIPRQIPEQRWYMNRFVGILMAGILPFGAMFIELFFIFSAIWENQFYYLFGFLFLVFIILVVSCSQISIVMVYFQLCAEDYRWWWRNFLVSGGSAFYVLVYAIFYFVNKLDIVEFIPSLLYFGYTALMVLSFWLLTGTIGFYAAYMFVRKIYAAVKID

SEQ ID NO: 181923 - DNA, 1929 bp, Artificial Sequence
  derived and/or modified sequence
atggccaccgccatggactggctgccctggagcctgctgctgttcagcctgatgtgcgagaccagcgccttctacgtgcccggcgtggcccccatcaacttccaccagaacgaccccgtggagatcaaggccgtgaagctgaccagcagcagaacccagctgccctacgagtactacagcctgcccttctgccagcccagcaagatcacctacaaggccgagaacctgggcgaggtgctgagaggcgacagaatcgtgaacacccccttccaggtgctgatgaacagcgagaagaagtgcgaggtgctgtgcagccagagcaacaagcccgtgaccctgaccgtggagcagagcagactggtggccgagagaatcaccgaggactactacgtgcacctgatcgccgacaacctgcccgtggccaccagactggagctgtacagcaacagagacagcgacgacaagaagaaggagaaggacgtgcagttcgagcacggctacagactgggcttcaccgacgtgaacaagatctacctgcacaaccacctgagcttcatcctgtactaccacagagaggacatggaggaggaccaggagcacacctacagagtggtgagattcgaggtgatcccccagagcatcagactggaggacctgaaggccgacgagaagagcagctgcaccctgcccgagggcaccaacagcagcccccaggagatcgaccccaccaaggagaaccagctgtacttcacctacagcgtgcactgggaggagagcgacatcaagtgggccagcagatgggacacctacctgaccatgagcgacgtgcagatccactggttcagcatcatcaacagcgtggtggtggtgttcttcctgagcggcatcctgagcatgatcatcatcagaaccctgagaaaggacatcgccaactacaacaaggaggacgacatcgaggacaccatggaggagagcggctggaagctggtgcacggcgacgtgttcagacccccccagtaccccatgatcctgagcagcctgctgggcagcggcatccagctgttctgcatgatcctgatcgtgatcttcgtggccatgctgggcatgctgagccccagcagcagaggcgccctgatgaccaccgcctgcttcctgttcatgttcatgggcgtgttcggcggcttcagcgccggcagactgtacagaaccctgaagggccacagatggaagaagggcgccttctgcaccgccaccctgtaccccggcgtggtgttcggcatctgcttcgtgctgaactgcttcatctggggcaagcacagcagcggcgccgtgcccttccccaccatggtggccctgctgtgcatgtggttcggcatcagcctgcccctggtgtacctgggctactacttcggcttcagaaagcagccctacgacaaccccgtgagaaccaaccagatccccagacagatccccgagcagagatggtacatgaacagattcgtgggcatcctgatggccggcatcctgcccttcggcgccatgttcatcgagctgttcttcatcttcagcgccatctgggagaaccagttctactacctgttcggcttcctgttcctggtgttcatcatcctggtggtgagctgcagccagatcagcatcgtgatggtgtacttccagctgtgcgccgaggactacagatggtggtggagaaacttcctggtgagcggcggcagcgccttctacgtgctggtgtacgccatcttctacttcgtgaacaagctggacatcgtggagttcatccccagcctgctgtacttcggctacaccgccctgatggtgctgagcttctggctgctgaccggcaccatcggcttctacgccgcctacatgttcgtgagaaagatctacgccgccgtgaagatcgactag

SEQ ID NO: 181924 - DNA, 1929 bp, Artificial Sequence
  derived and/or modified sequence
atggcaaccgccatggactggttaccttggtcactgctgctctttagtctcatgtgcgagacctctgcattttacgtgcctggtgtggcccccatcaatttccaccagaatgatcctgtggagattaaagccgtgaaattaacatcttctcggactcagctgccgtacgagtattattcactgcctttttgccagccttctaaaataacctacaaggcagagaatttgggggaggtgctgcgcggcgaccgcatcgtcaacaccccttttcaggtactgatgaactccgaaaagaaatgtgaggtgttgtgtagtcagagtaacaagccagtcaccctcaccgtggaacagtccaggctggtcgccgagaggattaccgaagattactacgtgcatttgatagcagataaccttcccgtggccacccggctggaactctactccaatagagatagcgacgacaaaaaaaaggaaaaagatgtgcagttcgagcatggataccgcctaggattcaccgacgttaacaaaatctatctgcataatcaccttagcttcatcctctattaccatcgggaagacatggaggaggaccaggagcatacatacagagtcgtgcgttttgaagttattccgcaatccattaggctggaggatctgaaagccgacgaaaaatcgagctgtacgctccccgaaggtaccaactcttccccccaagaaattgacccaactaaggaaaaccagctgtacttcacttactccgtgcattgggaggagtctgatataaaatgggcgagccgatgggatacatacctaacaatgagtgacgttcagattcattggttctctatcatcaatagtgtggtggtcgttttcttcctgagcgggattttatccatgattattatccggaccctacgcaaggatatcgcaaattacaacaaggaggatgatattgaagacaccatggaagaatcaggatggaagttggttcatggggatgtgttccgccccccccagtaccccatgattttatccagcttgctgggatctggaatccaattattctgcatgatcctgatcgtgatttttgtggcaatgttgggcatgctgtcaccctcttccaggggagctcttatgaccactgcttgcttccttttcatgttcatgggcgtgtttggcggcttctcagctggcaggttatatagaaccctaaaaggacacagatggaagaaaggagctttttgcacagcgaccctataccccggcgtggtattcggaatatgtttcgtgctcaattgttttatctggggaaaacattctagtggagccgttcccttccctaccatggttgccctgctgtgcatgtggttcgggatttcattgcctttggtctaccttggatattacttcgggtttaggaaacagccgtacgacaatccagtccgaactaatcagattcctaggcagatacccgagcagagatggtacatgaatagattcgtgggaatactgatggcgggcattctgccttttggcgctatgtttattgaactcttttttattttctccgcgatatgggagaaccagttttattatctctttggctttctgttcctggtgttcataatactggttgtatcatgcagccagatatctatagttatggtgtattttcagctctgcgcagaagactatcggtggtggtggcggaatttcctggtatctggagggtccgcattttacgtgctagtgtatgctatattttatttcgtcaataaactggatatcgtggagtttatcccgagtctcctgtactttggttatacagccctgatggtactgtcattctggctgcttaccggcacaatcggcttttacgcggcgtacatgttcgtccggaaaatttatgccgccgtgaagatcgactag

SEQ ID NO: 181925 - DNA, 1929 bp, Artificial Sequence
  derived and/or modified sequence
atggccacagccatggactggctgccctggagcctgctgctcttcagcctgatgtgtgagaccagcgccttctacgtgcctggggtggcccccatcaacttccaccagaatgaccctgtggagatcaaggctgtgaagctgaccagcagcaggacccagctgccctatgagtactacagcctgcccttctgccagcccagcaagatcacctacaaggccgagaacctgggggaggtgctgcggggggacagaattgtgaacacccccttccaggtgctgatgaacagcgagaagaagtgtgaggtgctgtgcagccagagcaacaagcctgtgaccctgactgtggagcagagccggctggtggccgagcgcatcacagaggactactacgtgcacctgattgctgacaacctgcctgtggccacccggctggagctgtacagcaacagagacagtgatgacaagaagaaggagaaggatgtgcagtttgaacatggctaccgcctgggcttcacagatgtgaacaagatctacctgcacaaccacctgtccttcatcctgtactaccaccgggaggacatggaggaggaccaggagcacacctacagagtggtgcgctttgaagtcatcccccagagcatccggctggaggacctgaaggcagatgagaagagcagctgcaccctgcctgagggcaccaacagcagcccccaggagattgaccccaccaaggagaaccagctgtacttcacctacagcgtgcactgggaggagagtgacatcaagtgggccagccgctgggacacctacctgaccatgtctgatgtgcagatccactggttcagcatcatcaacagcgtggtggtggtgttcttcctgagcggcatcctgtccatgatcatcatccgcaccctgaggaaggacatcgccaactacaacaaggaggatgacatcgaggacaccatggaggagagcggctggaagctggtgcatggagatgtgttccggcccccccagtaccccatgatcctgagcagcctgctgggcagcggcatccagctgttctgcatgatcctgattgtcatctttgtggccatgctgggcatgctgagccccagcagcagaggagccctgatgaccacagcctgcttcctgttcatgttcatgggcgtgtttggaggcttctctgctggccgcctgtaccgcaccctgaagggccaccgctggaagaagggggccttctgcacagccaccctgtacccaggagtggtgtttggcatctgctttgtgctgaactgcttcatctggggcaagcacagcagtggagctgtgcccttccccaccatggtggccctgctgtgcatgtggtttggcatcagcctgcccctggtgtacctgggctactacttcggcttcaggaagcagccctatgacaaccctgtgaggaccaaccagatcccccggcagatccctgagcagcgctggtacatgaacagatttgtgggcatcctgatggccggcatcctgccctttggagccatgttcatcgagctgttcttcatcttcagcgccatctgggagaaccagttctactacctgtttggcttcctgttcctggtgttcatcatcctggtggtgtcctgcagccagatcagcatcgtgatggtgtacttccagctgtgtgccgaggactaccgctggtggtggaggaacttcctggtgtctgggggcagcgccttctacgtgctggtgtatgccatcttctactttgtgaacaagctggacatcgtggagttcatccccagcctgctgtacttcggctacacagccctgatggtgctgtccttctggctgctgaccggcaccatcggcttctatgctgcctacatgtttgtgaggaagatctatgctgctgtgaagattgattag

SEQ ID NO: 181926 - DNA, 1929 bp, Artificial Sequence
  derived and/or modified sequence
atggccaccgccatggactggctgccctggagcctgctgctgttcagcctcatgtgtgaaacctccgctttctacgtccccggtgtggctcctatcaatttccatcaaaacgacccagtggagatcaaggcagttaaactaacatctagtaggactcagttaccatatgaatactacagtctgcccttctgccaacctagcaagatcacctataaagccgaaaatctgggcgaggtcttgcggggagatagaatagtgaacacaccatttcaggtcctgatgaactcagagaagaagtgcgaagtgctgtgctcccagtcaaataagcctgtgacattgaccgttgagcagtcccgcctagtcgctgagcggatcaccgaagattactacgttcacctgatcgcagacaatttgccagtggccacacggctggaactgtattcgaatcgagactctgatgataaaaagaaggagaaggacgtacagttcgagcacggataccgcctgggctttacagacgttaacaaaatttacctgcacaaccatttgagcttcatcctgtactaccaccgtgaggacatggaggaagatcaggagcatacatatagagttgttcgctttgaagtgatcccccagtcaattaggttggaggacctgaaggccgacgagaagtccagctgcacattacccgaaggcacaaactccagtccccaggagattgatccaaccaaagaaaaccagctgtatttcacatactccgtgcactgggaggaatcagacatcaaatgggctagtagatgggacacatatctcactatgtcagatgttcagattcactggttttctattattaacagtgttgtggtagtcttcttcctcagcggtatattatccatgattattattaggaccctgcgtaaagacatcgcaaactataataaggaggatgatatcgaggacactatggaggaaagtggctggaaactggtgcatggagatgttttccgcccaccgcagtatcccatgattctgtcatcattgttaggaagcggtatccaactgttttgcatgatcctgattgtgatttttgtcgctatgttggggatgttgtccccatcatcccgaggcgctctcatgaccactgcctgctttctgttcatgttcatgggcgtcttcggcggattttccgccggacgcctgtacaggacgctaaaggggcatcggtggaaaaaaggggcattttgcaccgctacactctatcctggtgttgtattcggcatttgcttcgttctcaactgctttatatggggaaaacactcatcaggcgccgtaccattccctacaatggttgccctgctgtgtatgtggttcggcatatcgctgcccttggtttacctgggatactattttgggttccgaaaacagccttatgataaccctgtgcgcacgaatcagatcccacgccagattcctgaacagcggtggtatatgaatcgatttgtcggaatactgatggccggaattctgccattcggggccatgtttattgaactgttcttcatattctcagctatttgggagaatcagttctattatttgtttggtttcctgtttctggtgtttatcatactcgtagtgtcttgtagtcagatttctattgtgatggtttatttccaactgtgcgccgaagattaccgctggtggtggagaaatttcttggtatcaggcggaagtgcgttctatgtgttagtgtatgccatcttttattttgttaataagctggacatagtggagtttattccaagcctgttgtatttcggatatacagcactgatggtgctcagtttttggctactcacgggcaccatcggcttctacgcggcctacatgtttgttagaaaaatctatgccgcggttaaaattgactag

SEQ ID NO: 181927 - DNA, 1929 bp, Artificial Sequence
  derived and/or modified sequence
atggccaccgctatggattggctgccatggagtttacttttgttttctttgatgtgtgaaacatccgcattttatgtgccaggggtcgctcccattaactttcatcagaatgatccggtggagattaaagcggtgaagctaacctctagcagaacacagctgccctacgaatattacagcctgcctttttgtcaaccatctaagattacttacaaggctgagaatctgggggaagttctgagaggtgacaggattgtcaacactccctttcaagtgctcatgaattctgaaaagaaatgcgaagtactgtgcagtcaaagtaacaagcctgtaacattaacagttgagcagagccggctggtggccgagagaattacggaggattattatgtccaccttatagctgacaatttaccagtggcaacccggctggagctctactcgaacagggactctgatgacaaaaaaaaggaaaaagacgtgcagtttgaacacggctatcgtctcggcttcacagatgttaacaaaatatatttacacaatcatctgtcttttatactctattatcacagagaagatatggaggaggatcaagagcatacgtaccgagtggtgcgctttgaggtaatccctcagagcattagattggaggatctgaaagcagacgaaaaaagttcgtgtacgctgccagagggaaccaactccagtccccaggaaatagaccccactaaagaaaaccagctgtactttacctactccgtgcactgggaagagagcgacattaaatgggcatcaagatgggacacatatctgaccatgtccgatgtccagatccactggttttctatcattaacagtgtggtggtcgtgttctttctttccgggattctgtccatgatcatcataaggaccctcaggaaggacatagcaaattacaataaggaggacgatatagaagatacaatggaagaaagcggctggaaactcgtgcatggggatgtttttagacccccacagtaccccatgatattaagctctttgctgggttctgggatacaattgttttgcatgatcctcatcgtgatcttcgtcgcaatgctggggatgctcagcccctcatcaaggggcgcactcatgacaaccgcgtgcttcttgtttatgttcatgggagtgtttggaggattctccgccggaaggctctacagaacactcaaaggccaccggtggaaaaagggtgcattttgcactgccacattatatccaggggtggtatttggaatctgtttcgtgctcaattgtttcatctgggggaagcacagctcaggagccgttccatttcccacaatggttgcactgctgtgcatgtggtttgggatctcactgcctcttgtgtacctaggctactattttggctttcgcaagcagccatatgataatcctgttaggaccaatcagatacctcgccagatccctgaacagcgctggtacatgaatcggttcgttggaattctgatggctggcattttaccttttggcgcaatgttcattgagctttttttcattttttcagccatctgggagaatcagttctattatctcttcggctttctcttcctcgtatttatcattctggtggtctcatgtagtcaaatttctatagtgatggtatatttccagctatgtgccgaagactaccgctggtggtggcgcaacttcctcgtgagtggtggtagcgctttttacgtgctggtgtacgcaatcttttattttgtcaataagcttgacatcgtggaatttatcccaagtctcctgtatttcggatacacagccttgatggtacttagtttctggctcctcactggtaccattggtttctacgcggcttatatgttcgtgaggaagatctatgctgccgtgaaaattgactag

SEQ ID NO: 181928 - DNA, 4032 bp, Artificial Sequence
  derived and/or modified sequence
ccaagatggcgacggcgatggtgagtgaaggagactccgggagcgggagctggagcggggccctccggggtatcccaggatcttccagcaccccatgcctggccctgagccacctccgggacccctgactcaggcctgagggctacctctgactgggcttgtcttccccgaaatccacctccctggccctgcccctgcactcaggcttgtgaaggccccgagttttgggggaggcgccgtttcggaggaagacctcggctgctgccttcgccggttcccattctacttttggtctccgcccactgattggttgccgtggtctttactgcttttctccctgatgtgtgaaacaagcgccttctatgtgcctggggtcgcgcctatcaacttccaccagaacgatcccgtagaaatcaaggctgtgaagctcaccagctctcgaacccagctaccttatgaatactattcactgcccttctgccagcccagcaagataacctacaaggcagagaatctgggagaggtgctgagaggggaccggattgtcaacacccctttccaggttctcatgaacagcgagaagaagtgtgaagttctgtgcagccagtccaacaagccagtgaccctgacagtggagcagagccgactcgtggccgagcggatcacagaagactactacgtccacctcattgctgacaacctgcctgtggccacccggctggagctctactccaaccgagacagcgatgacaagaagaaggaaaaagatgtgcagtttgaacacggctaccggctcggcttcacagatgtcaacaagatctacctgcacaaccacctctcattcatcctttactatcatcgggaggacatggaagaggaccaggagcacacgtaccgtgtcgtccgcttcgaggtgattccccagagcatcaggctggaggacctcaaagcagatgagaagagttcgtgcactctgcctgagggtaccaactcctcgccccaagaaattgaccccaccaaggagaatcagctgtacttcacctactctgtccactgggaggaaagtgatatcaaatgggcctctcgctgggacacttacctgaccatgagtgacgtccagatccactggttttctatcattaactccgttgttgtggtcttcttcctgtcaggtatcctgagcatgattatcattcggaccctccggaaggacattgccaactacaacaaggaggatgacattgaagacaccatggaggagtctgggtggaagttggtgcacggcgacgtcttcaggcccccccagtaccccatgatcctcagctccctgctgggctcaggcattcagctgttctgtatgatcctcatcgtcatctttgtagccatgcttgggatgctgtcgccctccagccggggagctctcatgaccacagcctgcttcctcttcatgttcatgggggtgtttggcggattttctgctggccgtctgtaccgcactttaaaaggccatcggtggaagaaaggagccttctgtacggcaactctgtaccctggtgtggtttttggcatctgcttcgtattgaattgcttcatttggggaaagcactcatcaggagcggtgccctttcccaccatggtggctctgctgtgcatgtggttcgggatctccctgcccctcgtctacttgggctactacttcggcttccgaaagcagccatatgacaaccctgtgcgcaccaaccagattccccggcagatccccgagcagcggtggtacatgaaccgatttgtgggcatcctcatggctgggatcttgcccttcggcgccatgttcatcgagctcttcttcatcttcagtgctatctgggagaatcagttctattacctctttggcttcctgttccttgttttcatcatcctggtggtatcctgttcacaaatcagcatcgtcatggtgtacttccagctgtgtgcagaggattaccgctggtggtggagaaatttcctagtctccgggggctctgcattctacgtcctggtttatgccatcttttatttcgttaacaagctggacatcgtggagttcatcccctctctcctctactttggctacacggccctcatggtcttgtccttctggctgctaacgggtaccatcggcttctatgcagcctacatgtttgttcgcaagatctatgctgctgtgaagatagactgattggagtggaccacggccaagcttgctccgtcctcggacaggaagccaccctgcgtgggggactgcaggcacgcaaaataaaataactcctgctcgtttggaatgtaactcctggcacagtgttcctggatcctggggctgcgtggggggcgggagggcctgtagataatcttgcgtttttcgtcatcttattccagttctgtgggggatgagtttttttgtgggttgctttttcttcagtgctaagaaagttccctccaacaggaactctctgacctgtttattcaggtgtatttctggtttggatttttttttccttctttgttttaacaaatggatccaggatggataaatccaccgagataagggttttggtcactgtctccacctcagttcctcagggctgttggccaccctatgactaactggaagaggacacgccagagcttcagtgaggtttccgagcctctccctgcccatcctcaccactgaggccacgacaaagcacagctccagctcggacagcaccctcagtgccagccagcctctgccagacctctctttccctcttctccccagcctcctccagggctgcccaaggcagggtttccagccaggcctcggggtcatcttttcaccaggagcaaacccaagtcttagttgctacaagaaaatcccctggaagtactgggggccaggttccccagacagcaggaattgcccctgttcagagcagccggagtttgctggaccacaaggaagaagagaagagacttgcagtgaactgtttttgtgccaagaaaccctggacctggggccaagtatttcccaagccaagcatccacttgtctgtgtctgggaagggatggccaaggccgctagggtccttacccctcaggatcactccccagccctttcctcaggaggtaccgctctccaaggtgtgctagcagtgggccctgcccaacttcaggcagaacagggaggcccagagattacagatcccctcctgtaagtggccaggcattctctccctgccctctctggcctctggggtcatactcacttctttagccagccccatcccctccaccccacacctgagttcttgcctcctccttttggggacacccaaaacactgcttgtgagaaggaagatggaaggtaagttctgtcgttctttccccaatccccaggaatggacaagaagccaacttagaaagaagggtctcacgtggctggcctggctcctccgtagacccctgttcttttcaacctctgcccacccgtgcatgtcatcacaaacatttgctcttaagttacaagagaccacatccacccagggattagggttcaagtagcagctgctaacccttgcaccagcccttgtgggactcccaacacaagacaaagctcaggatgctggtgatgctaggaagatgtccctcccctcactgccccacattctcccagtggctctaccagcctcacccatcaaaccagtgaatttctcaatcttgcctcacagtgactgcagcgccaagcggcatccaccaagcatcaagttggagaaaagggaacccaagcagtagagagcgatattggagtcttttgttcattcaaatcttggatttttttttttccctaagagattctctttttagggggaatgggaaacggacacctcataaagggttcaaagatcatcaatttttctgactttttaaatcattatcattattatttttaattaaaaaaatgcctgtatgcctttttttggtcggattgtaaataaatataccattgtcctactg

SEQ ID NO: 181929 - DNA, 3978 bp, Artificial Sequence
  derived and/or modified sequence
agtttctgccaggagctaatatggcttccttagttacaccgttctctctcttcacctaatcagcgaccttactttcccagaccagactgtcgagcaggagctaagactccttttcccctctgctgaccgccactacaggagcggttgaagccagacgaccaccttgtggagttaaactccgtaaccagggagcaccacttccgctgacgtcattacggcgacacgtggatccaagatggcgacggcgatggattggttgccgtggtctttactgcttttctccctgatgtgtgaaacaagcgccttctatgtgcctggggtcgcgcctatcaacttccaccagaacgatcccgtagaaatcaaggctgtgaagctcaccagctctcgaacccagctaccttatgaatactattcactgcccttctgccagcccagcaagataacctacaaggcagagaatctgggagaggtgctgagaggggaccggattgtcaacacccctttccaggttctcatgaacagcgagaagaagtgtgaagttctgtgcagccagtccaacaagccagtgaccctgacagtggagcagagccgactcgtggccgagcggatcacagaagactactacgtccacctcattgctgacaacctgcctgtggccacccggctggagctctactccaaccgagacagcgatgacaagaagaaggaaaaagatgtgcagtttgaacacggctaccggctcggcttcacagatgtcaacaagatctacctgcacaaccacctctcattcatcctttactatcatcgggaggacatggaagaggaccaggagcacacgtaccgtgtcgtccgcttcgaggtgattccccagagcatcaggctggaggacctcaaagcagatgagaagagttcgtgcactctgcctgagggtaccaactcctcgccccaagaaattgaccccaccaaggagaatcagctgtacttcacctactctgtccactgggaggaaagtgatatcaaatgggcctctcgctgggacacttacctgaccatgagtgacgtccagatccactggttttctatcattaactccgttgttgtggtcttcttcctgtcaggtatcctgagcatgattatcattcggaccctccggaaggacattgccaactacaacaaggaggatgacattgaagacaccatggaggagtctgggtggaagttggtgcacggcgacgtcttcaggcccccccagtaccccatgatcctcagctccctgctgggctcaggcattcagctgttctgtatgatcctcatcgtcatctttgtagccatgcttgggatgctgtcgccctccagccggggagctctcatgaccacagcctgcttcctcttcatgttcatgggggtgtttggcggattttctgctggccgtctgtaccgcactttaaaaggccatcggtggaagaaaggagccttctgtacggcaactctgtaccctggtgtggtttttggcatctgcttcgtattgaattgcttcatttggggaaagcactcatcaggagcggtgccctttcccaccatggtggctctgctgtgcatgtggttcgggatctccctgcccctcgtctacttgggctactacttcggcttccgaaagcagccatatgacaaccctgtgcgcaccaaccagattccccggcagatccccgagcagcggtggtacatgaaccgatttgtgggcatcctcatggctgggatcttgcccttcggcgccatgttcatcgagctcttcttcatcttcagtgctatctgggagaatcagttctattacctctttggcttcctgttccttgttttcatcatcctggtggtatcctgttcacaaatcagcatcgtcatggtgtacttccagctgtgtgcagaggattaccgctggtggtggagaaatttcctagtctccgggggctctgcattctacgtcctggtttatgccatcttttatttcgttaacaagctggacatcgtggagttcatcccctctctcctctactttggctacacggccctcatggtcttgtccttctggctgctaacgggtaccatcggcttctatgcagcctacatgtttgttcgcaagatctatgctgctgtgaagatagactgattggagtggaccacggccaagcttgctccgtcctcggacaggaagccaccctgcgtgggggactgcaggcacgcaaaataaaataactcctgctcgtttggaatgtaactcctggcacagtgttcctggatcctggggctgcgtggggggcgggagggcctgtagataatcttgcgtttttcgtcatcttattccagttctgtgggggatgagtttttttgtgggttgctttttcttcagtgctaagaaagttccctccaacaggaactctctgacctgtttattcaggtgtatttctggtttggatttttttttccttctttgttttaacaaatggatccaggatggataaatccaccgagataagggttttggtcactgtctccacctcagttcctcagggctgttggccaccctatgactaactggaagaggacacgccagagcttcagtgaggtttccgagcctctccctgcccatcctcaccactgaggccacgacaaagcacagctccagctcggacagcaccctcagtgccagccagcctctgccagacctctctttccctcttctccccagcctcctccagggctgcccaaggcagggtttccagccaggcctcggggtcatcttttcaccaggagcaaacccaagtcttagttgctacaagaaaatcccctggaagtactgggggccaggttccccagacagcaggaattgcccctgttcagagcagccggagtttgctggaccacaaggaagaagagaagagacttgcagtgaactgtttttgtgccaagaaaccctggacctggggccaagtatttcccaagccaagcatccacttgtctgtgtctgggaagggatggccaaggccgctagggtccttacccctcaggatcactccccagccctttcctcaggaggtaccgctctccaaggtgtgctagcagtgggccctgcccaacttcaggcagaacagggaggcccagagattacagatcccctcctgtaagtggccaggcattctctccctgccctctctggcctctggggtcatactcacttctttagccagccccatcccctccaccccacacctgagttcttgcctcctccttttggggacacccaaaacactgcttgtgagaaggaagatggaaggtaagttctgtcgttctttccccaatccccaggaatggacaagaagccaacttagaaagaagggtctcacgtggctggcctggctcctccgtagacccctgttcttttcaacctctgcccacccgtgcatgtcatcacaaacatttgctcttaagttacaagagaccacatccacccagggattagggttcaagtagcagctgctaacccttgcaccagcccttgtgggactcccaacacaagacaaagctcaggatgctggtgatgctaggaagatgtccctcccctcactgccccacattctcccagtggctctaccagcctcacccatcaaaccagtgaatttctcaatcttgcctcacagtgactgcagcgccaagcggcatccaccaagcatcaagttggagaaaagggaacccaagcagtagagagcgatattggagtcttttgttcattcaaatcttggatttttttttttccctaagagattctctttttagggggaatgggaaacggacacctcataaagggttcaaagatcatcaatttttctgactttttaaatcattatcattattatttttaattaaaaaaatgcctgtatgcctttttttggtcggattgtaaataaatataccattgtcctactg

SEQ ID NO: 181930 - DNA, 1044 bp, Artificial Sequence
  derived and/or modified sequence
acgtggatccaagatggcgacggcgatggattggttgccgtggtctttactgcttttctccctgatgtgtgaaacaagcgccttctatgtgcctggggtcgcgcctatcaacttccaccagaacgatcccgtagaaatcaaggctgtgaagctcaccagctctcgaacccagctaccttatgaatactattcactgcccttctgccagcccagcaagataacctacaaggcagagaatctgggaaggagaaaggagagaactggttcttgagcaagcccctgaaagggctgccttctccgtcagggctacgcatggctcagatgtttctggaacctctagctgacaaatttatctactgccaggttctcatgaacagcgagaagaagtgtgaagttctgtgcagccagtccaacaagccagtgaccctgacagtggagcagagccgactcgtggccgagcggatcacagaagactactacgtccacctcattgctgacaacctgcctgtggccacccggctggagctctactccaaccgagacagcgatgacaagaagaaggaaaaagatgtgcagtttgaacacggctaccggctcggcttcacagatgtcaacaagatctacctgcacaaccacctctcattcatcctttactatcatcgggaggacatggaagaggaccaggagcacacgtaccgtgtcgtccgcttcgaggtgattccccagagcatcaggctggaggacctcaaagcagatgagaagagttcgtgcactctgcctgagggtaccaactcctcgccccaagaaattgaccccaccaaggagaatcagctgtacttcacctactctgtccactgggaggaaagtgatatcaaatgggcctctcgctgggacacttacctgaccatgagtgacgtccagatccactggttttctatcattaactccgttgttgtggtcttcttcctgtcaggtatcctgagcatgattatcattcggaccctccggaaggacattgccaactacaacaaggaggatgacatt

SEQ ID NO: 181931 - protein, 795 aa, Artificial Sequence
  derived and/or modified sequence
MYHSLSETRHPLQPEEQEVGIDPLSSYSNKSGGDSNKNGRRTSSTLDSEGTFNSYRKEWEELFVNNNYLATIRQKGINGQLRSSRFRSICWKLFLCVLPQDKSQWISRIEELRAWYSNIKEIHITNPRKVVGQQDLMINNPLSQDEGSLWNKFFQDKELRSMIEQDVKRTFPEMQFFQQENVRKILTDVLFCYARENEQLLYKQGMHELLAPIVFVLHCDHQAFLHASESAQPSEEMKTVLNPEYLEHDAYAVFSQLMETAEPWFSTFEHDGQKGKETLMTPIPFARPQDLGPTIAIVTKVNQIQDHLLKKHDIELYMHLNRLEIAPQIYGLRWVRLLFGREFPLQDLLVVWDALFADGLSLGLVDYIFVAMLLYIRDALISSNYQTCLGLLMHYPFIGDVHSLILKALFLRDPKRNPRPVTYQFHPNLDYYKARGADLMNKSRTNAKGAPLNINKVSNSLINFGRKLISPAMAPGSAGGPVPGGNSSSSSSVVIPTRTSAEAPSHHLQQQQQQQRLMKSESMPVQLNKGLSSKNISSSPSVESLPGGREFTGSPPSSATKKDSFFSNISRSRSHSKTMGRKESEEELEAQISFLQGQLNDLDAMCKYCAKVMDTHLVNIQDVILQENLEKEDQILVSLAGLKQIKDILKGSLRFNQSQLEAEENEQITIADNHYCSSGQGQGRGQGQSVQMSGAIKQASSETPGCTDRGNSDDFILISKDDDGSSARGSFSGQAQPLRTLRSTSGKSQAPVCSPLVFSDPLMGPASASSSNPSSSPDDDSSKDSGFTIVSPLDI

SEQ ID NO: 181932 - DNA, 2388 bp, Artificial Sequence
  derived and/or modified sequence
atgtaccacagcctgagcgagaccagacaccccctgcagcccgaggagcaggaggtgggcatcgaccccctgagcagctacagcaacaagagcggcggcgacagcaacaagaacggcagaagaaccagcagcaccctggacagcgagggcaccttcaacagctacagaaaggagtgggaggagctgttcgtgaacaacaactacctggccaccatcagacagaagggcatcaacggccagctgagaagcagcagattcagaagcatctgctggaagctgttcctgtgcgtgctgccccaggacaagagccagtggatcagcagaatcgaggagctgagagcctggtacagcaacatcaaggagatccacatcaccaaccccagaaaggtggtgggccagcaggacctgatgatcaacaaccccctgagccaggacgagggcagcctgtggaacaagttcttccaggacaaggagctgagaagcatgatcgagcaggacgtgaagagaaccttccccgagatgcagttcttccagcaggagaacgtgagaaagatcctgaccgacgtgctgttctgctacgccagagagaacgagcagctgctgtacaagcagggcatgcacgagctgctggcccccatcgtgttcgtgctgcactgcgaccaccaggccttcctgcacgccagcgagagcgcccagcccagcgaggagatgaagaccgtgctgaaccccgagtacctggagcacgacgcctacgccgtgttcagccagctgatggagaccgccgagccctggttcagcaccttcgagcacgacggccagaagggcaaggagaccctgatgacccccatccccttcgccagaccccaggacctgggccccaccatcgccatcgtgaccaaggtgaaccagatccaggaccacctgctgaagaagcacgacatcgagctgtacatgcacctgaacagactggagatcgccccccagatctacggcctgagatgggtgagactgctgttcggcagagagttccccctgcaggacctgctggtggtgtgggacgccctgttcgccgacggcctgagcctgggcctggtggactacatcttcgtggccatgctgctgtacatcagagacgccctgatcagcagcaactaccagacctgcctgggcctgctgatgcactaccccttcatcggcgacgtgcacagcctgatcctgaaggccctgttcctgagagaccccaagagaaaccccagacccgtgacctaccagttccaccccaacctggactactacaaggccagaggcgccgacctgatgaacaagagcagaaccaacgccaagggcgcccccctgaacatcaacaaggtgagcaacagcctgatcaacttcggcagaaagctgatcagccccgccatggcccccggcagcgccggcggccccgtgcccggcggcaacagcagcagcagcagcagcgtggtgatccccaccagaaccagcgccgaggcccccagccaccacctgcagcagcagcagcagcagcagagactgatgaagagcgagagcatgcccgtgcagctgaacaagggcctgagcagcaagaacatcagcagcagccccagcgtggagagcctgcccggcggcagagagttcaccggcagcccccccagcagcgccaccaagaaggacagcttcttcagcaacatcagcagaagcagaagccacagcaagaccatgggcagaaaggagagcgaggaggagctggaggcccagatcagcttcctgcagggccagctgaacgacctggacgccatgtgcaagtactgcgccaaggtgatggacacccacctggtgaacatccaggacgtgatcctgcaggagaacctggagaaggaggaccagatcctggtgagcctggccggcctgaagcagatcaaggacatcctgaagggcagcctgagattcaaccagagccagctggaggccgaggagaacgagcagatcaccatcgccgacaaccactactgcagcagcggccagggccagggcagaggccagggccagagcgtgcagatgagcggcgccatcaagcaggccagcagcgagacccccggctgcaccgacagaggcaacagcgacgacttcatcctgatcagcaaggacgacgacggcagcagcgccagaggcagcttcagcggccaggcccagcccctgagaaccctgagaagcaccagcggcaagagccaggcccccgtgtgcagccccctggtgttcagcgaccccctgatgggccccgccagcgccagcagcagcaaccccagcagcagccccgacgacgacagcagcaaggacagcggcttcaccatcgtgagccccctggacatctag

SEQ ID NO: 181933 - DNA, 552 bp, Artificial Sequence
  derived and/or modified sequence
atgtaccacagcctgagcgagaccagacaccccctgcagcccgaggagcaggaggtgggcatcgaccccctgagcagctacagcaacaagagcggcggcgacagcaacaagaacggcagaagaaccagcagcaccctggacagcgagggcaccttcaacagctacagaaaggagtgggaggagctgttcgtgaacaacaactacctggccaccatcagacagaagggcatcaacggccagctgagaagcagcagattcagaagcatctgctggaagctgttcctgtgcgtgctgccccaggacaagagccagtggatcagcagaatcgaggagctgagagcctggtacagcaacatcaaggagatccacatcaccaaccccagaaaggtggtgggccagcaggacctgatgatcaacaaccccctgagccaggacgagggcagcctgtggaacaagttcttccaggacaaggagctgagaagcatgatcgagcaggacgtgaagagaaccttccccgagatgcagttcttccagcaggagaacgtgagatag

SEQ ID NO: 181934 - DNA, 267 bp, Artificial Sequence
  derived and/or modified sequence
atgtaccacagcctgagcgagaccagacaccccctgcagcccgaggagcaggaggtgggcatcgaccccctgagcagctacagcaacaagagcggcggcgacagcaacaagaacggcagaagaaccagcagcaccctggacagcgagggcaccttcaacagctacagaaaggagtgggaggagctgttcgtgaacaacaactacctggccaccatcagacagaagggcatcaacggccagctgagaagcagcagattcagaagctag

SEQ ID NO: 181935 - DNA, 2388 bp, Artificial Sequence
  derived and/or modified sequence
atgtaccactctctgtccgagacaagacatcccctgcagccagaagagcaggaagtgggcatcgaccccttgagttcctactctaacaaatccggaggagactcaaataaaaacggacggaggacaagcagcaccttggactccgagggaaccttcaattcgtatcgaaaggagtgggaagaactgttcgttaataacaactatctcgccaccatcaggcaaaagggcatcaacggacagctgcggagttctcggtttcgttccatttgctggaagttgttcctgtgcgttctgccgcaggacaagtctcagtggatcagccgcatcgaggagctgcgggcttggtactctaacattaaggagatccacatcactaatcccaggaaagtagtcgggcaacaagacctcatgatcaataatccattatcccaggacgagggatcactttggaacaagtttttccaggacaaggagttacggagcatgatagaacaggacgtgaagaggacattcccagagatgcagttttttcagcaagagaacgtgaggaagattttgactgacgtccttttttgttacgccagggagaatgaacagctattatacaagcagggtatgcacgagctgctcgcccccattgtcttcgtgcttcattgtgatcaccaggcttttttgcacgcttctgaatctgctcagccatccgaagaaatgaagacagtactgaaccctgagtatctggaacacgacgcctacgcagtgttttcacagctgatggagacagctgagccctggttcagtacctttgaacacgatggacagaagggaaaagaaacactgatgacgcctattccctttgcaagaccccaagacctcggtcccaccattgcgatcgtgacgaaggtaaatcagattcaggatcacctgctcaaaaagcacgacatcgagctctatatgcatctcaacagactggaaatagcaccacaaatctacggcttgagatgggtaaggttgctgttcgggagggagtttcccctgcaggatctgttggtggtgtgggatgctctgttcgctgacggcttgtccctagggctcgtagactacattttcgtcgctatgcttttgtatatcagggacgcactaatatcgtccaattaccagacctgcttgggcctgcttatgcattacccttttataggcgatgtgcacagcctaatcctgaaagcattgttccttcgagaccccaaacgaaatccccgaccagtgacttaccagttccaccccaacctggactactataaagcccgaggggccgatttaatgaataaatccaggactaacgctaaaggagcgccactgaacatcaacaaagtgtccaattcactgattaacttcggccgtaagttaattagtccggccatggctcccggtagcgctggcgggcccgtgcccggaggaaacagtagcagcagtagtagcgtggtaattccaacaagaactagtgcagaagcgccctctcatcatctgcagcagcaacagcaacagcaacgcctgatgaaaagtgagagcatgcccgtgcagttaaataagggactgagctccaagaacatatcctcttcgccttccgttgagtctctgcccggcgggcgcgagttcaccggcagccctcccagctctgcaaccaaaaaggattcctttttcagcaatataagcaggagccggtcccactctaaaacaatgggtaggaaggaatctgaggaagagttggaggcccagatctccttcctgcagggccagcttaacgacttagacgctatgtgcaaatattgtgctaaagtgatggacacacatctagtgaacattcaggatgtgatactgcaggagaatctcgaaaaagaagaccaaattttagtctctttagccggtcttaagcagattaaggatatactcaaggggtccttgcggttcaatcagtcacagctggaggctgaagaaaacgagcagatcaccattgcagataatcattactgctcttccggccaaggacaaggcaggggacaggggcagtctgttcagatgtccggagctattaagcaggcaagttccgaaacacctggttgcacagaccggggaaacagcgacgattttatcctgatttcaaaggacgatgatgggtcttctgcaagagggagctttagcggccaagctcagcctctccggaccttgcggtccaccagcgggaagagccaggcccccgtttgctctcccctcgtcttcagcgacccattgatgggccccgcaagcgccagctcaagtaacccctcaagttcaccagacgacgactctagcaaagacagcggattcaccattgtgtcacccttggatatttag

SEQ ID NO: 181936 - DNA, 552 bp, Artificial Sequence
  derived and/or modified sequence
atgtatcactctctgtccgaaactaggcaccctctccagccggaagaacaggaagttggaatcgacccattgtcttcctacagcaataagtcaggcggggatagcaataagaatgggagaagaacctcatcaactctcgacagcgagggcacttttaacagctaccgcaaagagtgggaggagctgtttgtgaacaacaactacttggcaacaattcgtcaaaagggcatcaatggacagttgaggagcagtcggtttcggagtatttgctggaagttattcctctgtgtactacctcaagacaagagtcagtggatcagccggattgaagaactgagggcttggtactccaacatcaaagaaattcacatcacaaatcctaggaaagtggttgggcagcaggatctcatgatcaataatccattgtcccaggatgagggtagcctatggaacaagttcttccaggataaggagttacgcagtatgatcgagcaagatgtgaagaggacttttcctgagatgcagtttttccaacaggagaatgtgcgatag

SEQ ID NO: 181937 - DNA, 2388 bp, Artificial Sequence
  derived and/or modified sequence
atgtatcactcattgtcagaaactcggcaccccctgcagccagaggagcaggaggtcggtatcgatcctctttcctcatattcaaataaaagcgggggggactcaaacaaaaacggcaggagaacgtctagcaccctggattccgaggggacctttaattcatatcggaaggaatgggaagagctgtttgtaaataacaattacctagccactatccgccagaaaggtataaacggacagcttaggtcaagcaggttccgtagtatttgctggaaactgttcctgtgcgtgctgccccaggacaaatcacagtggattagtcgtatagaagaattgcgtgcctggtactctaatattaaagaaatccatatcaccaacccacggaaagtcgttgggcaacaggacctcatgatcaacaaccctttgagtcaggatgaggggagcctgtggaacaaatttttccaagacaaagaacttaggtctatgattgagcaggatgtgaaacgcacctttcctgagatgcagtttttccagcaggagaatgtccggaagattttgacagacgtattgttttgttacgcccgcgagaatgagcagcttctttacaaacagggcatgcacgagttgctggcccccatcgtgttcgttctgcactgtgaccaccaggcattcctgcatgcctctgaatctgcacaaccatccgaagagatgaagaccgtcctgaatcccgagtacctcgaacatgatgcctatgcagttttctcacagcttatggagaccgcagaaccatggttcagcaccttcgagcatgatggccaaaagggtaaggaaaccctgatgaccccaatcccctttgcccgtccacaagatcttgggcccacaatagccatcgtgacaaaagtgaaccagatccaagaccacctccttaaaaagcacgatatcgaattgtatatgcacttgaaccggttggaaatcgccccacaaatctatggattgcgctgggtcagacttctgttcgggcgtgagttccctttgcaggacttactggtggtttgggacgcactgtttgcagacggcttgtctttgggacttgtcgattacatcttcgtagccatgctactgtacattcgcgacgcactgatctcctccaactaccaaacatgtttaggactgctgatgcattaccccttcatcggcgatgtgcacagcctgatcctcaaggcactgtttctaagggaccctaaacgcaatcctagaccagttacctaccaatttcacccaaacttggattactataaggctcggggcgccgacctcatgaacaagagtcgaactaatgcaaaaggcgcaccccttaatataaataaggtctcaaattctctgataaactttggtaggaagctcatatcgccagccatggcaccgggatctgccggagggcctgtcccaggtgggaattcaagctcctccagctctgtggtgatccctacacgaacttctgcggaggcaccttcacatcacctgcagcaacagcagcaacagcagaggttgatgaaaagtgaatccatgccggtgcagctgaacaagggactctcgtctaaaaatatcagcagcagcccatccgtggagagcttgcctggcgggagagaatttactggatctcccccgagtagcgccaccaagaaagacagtttcttcagtaacattagtcggtcccggagccatagcaagacaatggggcgcaaagaaagcgaggaggagttggaagcccagatttctttcctacaaggccagctcaatgacctggacgcaatgtgcaaatattgtgcaaaggtgatggacacacatttagtcaacatacaggatgtaatcttacaagagaacctggaaaaagaggatcaaatcctggtctccctagccggactgaagcagatcaaggatatactgaaaggatctctgagatttaaccagtcgcagctggaggccgaagagaatgagcaaatcaccatagcggataaccactattgcagttctgggcaagggcagggacgcggtcagggacagagtgtgcagatgagcggcgcaattaaacaggcctctagtgaaactcctggctgcacggataggggcaacagcgacgatttcattctaatttcaaaggatgatgacgggagttctgccaggggatccttttccggacaagcccagcctctgaggacccttcgtagcaccagtggcaagtcacaggcgcctgtgtgttccccactcgtgttctccgacccactgatggggccagcatctgcctcaagttccaatccatcaagctctcccgacgatgatagcagcaaggatagtggattcactatcgtttctccgctcgacatttag

SEQ ID NO: 181938 - DNA, 267 bp, Artificial Sequence
  derived and/or modified sequence
atgtaccattctctctcagaaacacgccaccccctccagcccgaggagcaggaagtgggaattgacccattgtcctcatattccaataaatccggaggagactcgaataaaaatggtagaaggacttctagcacactcgattcagaggggaccttcaattcatataggaaggaatgggaggaactgtttgtcaataacaactatctggcaacgatccggcagaaaggtataaacggccagcttagaagtagcagatttagaagctag

SEQ ID NO: 181939 - DNA, 2388 bp, Artificial Sequence
  derived and/or modified sequence
atgtaccacagcctgtctgagaccaggcaccccctgcagcctgaggagcaggaggtgggcatcgaccccctgagcagctacagcaacaagtctggaggagacagcaacaagaatggccgccgcaccagcagcaccctggacagcgagggcaccttcaacagctacaggaaggagtgggaggagctgtttgtgaacaacaactacctggccaccatccggcagaagggcatcaatggccagctgcggagcagccgcttccgcagcatctgctggaagctgttcctgtgtgtgctgccccaggacaagagccagtggatcagcagaattgaggagctgcgggcctggtacagcaacatcaaggagatccacatcaccaaccccaggaaggtggtgggccagcaggacctgatgatcaacaaccccctgagccaggatgagggcagcctgtggaacaagttcttccaggacaaggagctgcgctccatgattgagcaggatgtgaagaggaccttccctgagatgcagttcttccagcaggagaatgtgaggaagatcctgacagatgtgctcttctgctacgcccgggagaatgagcagctgctgtacaagcagggcatgcatgagctgctggcccccatcgtgtttgtgctgcactgtgaccaccaggccttcctgcacgccagcgagagcgcccagcccagcgaggagatgaagacagtgctgaaccctgagtacctggagcatgatgcctatgctgtgttcagccagctgatggagacagctgagccctggttcagcacctttgaacatgatggccagaagggcaaggagaccctgatgacccccatcccctttgcccggccccaggacctgggccccaccatcgccatcgtgaccaaggtgaaccagatccaggaccacctgctgaagaagcatgacatcgagctgtacatgcacctgaaccggctggagatcgccccccagatctacggcctgcgctgggtgcggctgctgtttggccgggagttccccctgcaggacctgctggtggtgtgggatgccctgtttgctgatggcctgagcctgggcctggtggactacatctttgtggccatgctgctgtacatcagagatgccctgatcagcagcaactaccagacctgcctgggcctgctgatgcactaccccttcatcggagatgtgcacagcctcatcctgaaggccctcttcctgcgggaccccaagaggaaccccaggcctgtgacctaccagttccaccccaacctggactactacaaggcccggggagctgacctgatgaacaagagcaggaccaatgccaagggggcccccctgaacatcaacaaggtgagcaacagcctcatcaactttggaaggaagctgatcagccctgccatggcccctggcagcgctgggggccctgtgcctgggggcaacagcagcagcagcagctctgtggtgatccccaccaggaccagcgctgaggcccccagccaccacctgcagcagcagcagcagcagcagaggctgatgaagtctgagagcatgcctgtgcagctgaacaagggcctgagcagcaagaacatcagcagcagccccagcgtggagagcctgcccggcggccgggagttcaccggcagcccccccagcagcgccaccaagaaggacagcttcttcagcaacatcagccgcagccgcagccacagcaagaccatgggcaggaaggagagcgaggaggagctggaggcccagatctccttcctgcagggccagctgaatgacctggatgccatgtgcaagtactgtgccaaggtgatggacacccacctggtgaacatccaggacgtcatcctgcaggagaacctggagaaggaggaccagatcctggtgtccctggccggcctgaagcagatcaaggacatcctgaagggcagcctgcgcttcaaccagagccagctggaggccgaggagaatgagcagatcaccatcgctgacaaccactactgcagcagcggccagggccagggccggggccagggccagagcgtgcagatgtctggggccatcaagcaggccagcagcgagaccccaggctgcacagaccggggcaacagtgatgacttcatcctgatcagcaaggatgatgatggcagcagcgcccggggcagcttcagcggccaggcccagcccctgcggaccctgcggagcaccagcggcaagagccaggcccctgtgtgcagccccctggtgttcagtgaccccctgatgggccctgccagcgccagcagcagcaaccccagcagcagcccagatgatgacagcagcaaggacagcggcttcaccatcgtgagccccctggacatctag

SEQ ID NO: 181940 - DNA, 552 bp, Artificial Sequence
  derived and/or modified sequence
atgtaccacagcctgtctgagaccaggcaccccctgcagcctgaggagcaggaggtgggcatcgaccccctgagcagctacagcaacaagtctggaggagacagcaacaagaatggccgccgcaccagcagcaccctggacagcgagggcaccttcaacagctacaggaaggagtgggaggagctgtttgtgaacaacaactacctggccaccatccggcagaagggcatcaatggccagctgcggagcagccgcttccgcagcatctgctggaagctgttcctgtgtgtgctgccccaggacaagagccagtggatcagcagaattgaggagctgcgggcctggtacagcaacatcaaggagatccacatcaccaaccccaggaaggtggtgggccagcaggacctgatgatcaacaaccccctgagccaggatgagggcagcctgtggaacaagttcttccaggacaaggagctgcgctccatgattgagcaggatgtgaagaggaccttccctgagatgcagttcttccagcaggagaatgtgaggtag

SEQ ID NO: 181941 - DNA, 267 bp, Artificial Sequence
  derived and/or modified sequence
atgtaccacagcctgtctgagaccaggcaccccctgcagcctgaggagcaggaggtgggcatcgaccccctgagcagctacagcaacaagtctggaggagacagcaacaagaatggccgccgcaccagcagcaccctggacagcgagggcaccttcaacagctacaggaaggagtgggaggagctgtttgtgaacaacaactacctggccaccatccggcagaagggcatcaatggccagctgcggagcagccgcttccgctcctag

SEQ ID NO: 181942 - DNA, 2388 bp, Artificial Sequence
  derived and/or modified sequence
atgtaccacagcctgagcgagacccggcaccccctgcagcccgaggaacaggaggtgggtatcgaccccctttctagttacagcaacaaatcaggtggtgatagtaataagaatggtcgccggacaagctctactcttgattcagagggaacattcaatagctaccgaaaagagtgggaagaactctttgtgaacaacaactatttggctaccataaggcagaaagggataaacggtcagttgaggagctcaaggtttaggagtatctgctggaaactctttctgtgtgtcttgcctcaagacaagagtcagtggattagtcgtatcgaggaacttcgggcttggtattccaatataaaggagatccacataaccaatccaaggaaagtagtcggccagcaggatctgatgattaataaccccctgagccaggatgaggggtccttgtggaataagttcttccaggacaaggaattgcgctcaatgatagaacaggatgttaagcggactttccccgaaatgcagtttttccaacaggaaaatgtgcgcaagatcctgaccgacgttttgttctgctatgctcgtgagaacgagcagttgttgtataagcaggggatgcacgaactcttggcaccaatcgtgtttgtactccactgcgatcaccaggcctttctccatgcctccgaatccgcacagcccagcgaagagatgaagaccgtgctcaaccctgaatatctggaacacgatgcatatgctgtgttctctcaactcatggagactgccgagccatggttcagcactttcgagcatgacggccagaagggcaaggagaccctcatgacaccaattccattcgcgagaccacaggacctcggaccaaccattgctattgtgactaaagttaatcagattcaggatcatctgctcaagaaacacgatattgagctctatatgcatcttaacagactggagattgccccccaaatctacgggctgcggtgggtaagactcctctttggtcgggagttcccattgcaggatttgcttgttgtgtgggatgcgctttttgctgacgggctcagcctgggactcgtcgactacatatttgtggccatgctcctgtatatcagagatgccctgatctcctcaaattatcagacatgcctgggactattaatgcattacccattcatcggtgacgtgcatagtctgattttaaaggcactctttttacgcgaccccaaaagaaatcctaggcctgtgacatatcagtttcatcctaatctggactattacaaggcgcgcggtgctgatttgatgaataagtcaagaaccaacgctaaaggagcccctctaaacattaataaggtgagtaatagcctgattaatttcggtagaaaactgatcagcccggccatggcacctggcagcgcgggcgggcccgtgcctggtggcaactcgtcttcctcttcatctgttgtaattcccacccgtacatccgccgaagcgccttctcatcacctgcaacagcagcagcagcagcagcgactgatgaagtccgagtcaatgccagttcaactgaacaagggcctgtcctccaagaatatcagctcatctccatccgtggaatctctgcctggaggcagagaattcacaggtagcccaccctcctctgctactaaaaaagatagcttcttttccaacatcagtcgtagccgctcccactctaagaccatgggcaggaaggaaagtgaggaggaactggaggctcagatctctttccttcaaggtcagctgaacgacctagatgcaatgtgcaaatattgcgctaaagtgatggatactcacctcgtgaacatccaggatgttatcctgcaggagaaccttgaaaaggaagatcaaatactcgttagcttggccgggctcaaacagataaaggatattctcaaaggttcactgaggtttaaccagtcccagctcgaggccgaggagaatgaacagataactattgcggataatcattattgctcctccggtcagggtcaaggacggggacagggccagagtgtccagatgagcggcgccatcaaacaggctagtagcgagacgcctggttgcacagataggggcaactcagacgactttatcctcatctcaaaggacgatgacggaagcagcgcacggggttctttctcaggacaggcacaacccctgcggacactccggtccaccagtgggaagtcccaagccccagtgtgctcccctctcgtcttctccgatccactgatgggacctgcgtccgcatcatccagtaatcccagcagcagcccagatgacgattcctcgaaagattcaggcttcacgattgtcagccccctggatatctag

SEQ ID NO: 181943 - DNA, 552 bp, Artificial Sequence
  derived and/or modified sequence
atgtaccacagcctgagcgagacccggcaccccctgcagcccgaggagcaggaagtaggaatcgatcctctgtcctcatatagcaataagtccggaggagatagtaacaagaacgggagaagaaccagttccactttggactccgaggggactttcaatagctataggaaggagtgggaggaactattcgtgaataacaactacttggccaccattcgccagaaaggaatcaacggccagctgcggtctagtaggttcaggagcatctgttggaagcttttcctttgtgtcctgccccaggacaaatctcagtggatctctcgcattgaggaactgcgagcgtggtacagtaatatcaaagaaattcacattacgaaccctaggaaagtagtgggacaacaggacctcatgatcaataatccattgtctcaggatgagggtagtctctggaacaagttttttcaggacaaggagcttcggtccatgatcgagcaagacgtaaaacgtacattcccggaaatgcagttcttccaacaggaaaatgttcgatag

SEQ ID NO: 181944 - DNA, 2388 bp, Artificial Sequence
  derived and/or modified sequence
atgtaccacagcctgagcgagacccggcaccccctgcagcccgaggagcaagaggtggggatagatcccctgtcgtcctactccaacaagtccggcggagatagcaataaaaacggtcgaaggaccagctcgacccttgattccgaggggacttttaatagttaccggaaagagtgggaagaactgttcgtcaataacaactacctcgcaacaatccgccagaagggcataaacgggcagctgcgcagctcgaggttcagatccatctgttggaagctgttcctctgtgtgttaccccaggacaagagccagtggatcagccgcattgaggagctgcgggcttggtacagtaatattaaggagattcacattaccaaccctagaaaagtagtgggccagcaggatctgatgatcaataacccactgtctcaagatgaagggagtttgtggaacaaatttttccaggataaagaattgaggtcgatgatcgaacaggatgtaaagaggacgttccccgagatgcagttttttcagcaggaaaacgtgagaaaaattctgactgatgtactgttctgttatgcccgcgagaatgaacaattgctgtataaacaggggatgcatgaattgcttgcgcctatagtcttcgtattgcactgcgatcaccaggccttcctgcacgcaagcgagtccgcccagcctagcgaggaaatgaaaaccgtgctcaaccccgaataccttgagcatgacgcttacgccgttttcagccaactcatggagaccgcagagccttggttttctacctttgaacacgatggtcagaaagggaaagaaaccttaatgactcctattcccttcgcccgcccacaggatttggggcccactatcgctatcgtgaccaaagtgaatcagatacaagaccacctgttaaagaagcatgatattgagctgtacatgcacttgaaccgcttagagattgctccccaaatttatggtctccgctgggttaggctgttattcggccgcgagtttcccttacaggacttgttagtggtgtgggacgcccttttcgccgacggactgtcactgggactcgtcgattacatcttcgtagcaatgctgctgtacatcagggacgctctgatcagctccaattaccaaacctgcctggggttgctgatgcactaccctttcataggggacgtgcactccctgatcctcaaagcactgtttttgcgcgatccaaagaggaacccacggcccgttacctaccagttccatccaaatctagactactataaggctcggggagctgatctgatgaacaaatctaggactaatgccaagggggccccattgaacatcaataaggtctcaaactcccttatcaacttcgggcggaaattgataagccctgctatggctccaggaagtgccggtggccctgttcctggaggcaatagcagttcatccagctctgtggtaattcccacccgcacttccgccgaggcacctagccaccatcttcaacaacagcagcagcagcagcgcctcatgaagtccgaatcaatgcctgtgcagctgaacaaaggactgagttccaagaatatttcatcaagccctagcgtggaatcactcccaggaggtagggaattcactgggtccccaccgtcaagtgccacgaagaaggacagttttttcagcaacatctccaggtcacggagtcattcaaaaaccatgggcagaaaggaaagtgaagaagaattggaagctcagatctcgttcctgcagggacaactcaacgaccttgacgcaatgtgtaaatattgcgccaaagtgatggacacccatttggttaacatccaggatgtgatcctccaggagaacctggagaaggaggaccagattctggtttctcttgcagggctgaaacagatcaaggatatcctgaagggaagcctgagatttaaccaaagtcagctggaagcagaggaaaacgagcaaattacgatagctgataatcattactgcagttcaggccagggccaggggcgaggacaaggccagtcagtgcagatgagtggcgccattaagcaggcctcctccgagactccagggtgtactgatcgaggaaatagtgatgatttcatcttaattagcaaggacgacgacggttccagtgccagggggtcgtttagcggccaggcccagcctctgcgaacgttgagatcgacatctggaaagagtcaggcaccagtgtgcagtcccctcgtgttttccgatcccctcatgggacctgcgtccgcgtcatcgtccaacccatcctcatccccagatgatgactcctcaaaggacagtggcttcaccatcgtctccccattagatatttag

SEQ ID NO: 181945 - DNA, 267 bp, Artificial Sequence
  derived and/or modified sequence
atgtaccacagcctgagcgagacccggcaccccctgcagcccgaggagcaagaagtgggcattgacccgctatcttcatacagtaacaagtcaggaggggactctaacaaaaatggtaggcgcacgagtagcactctggacagtgaagggacgtttaattcctatagaaaggaatgggaagaactttttgttaacaacaattacctcgctacaattcgtcaaaagggaatcaatggtcagctaaggtcgagccgctttcgaagctag

SEQ ID NO: 181946 - DNA, 2388 bp, Artificial Sequence
  derived and/or modified sequence
atgtaccactccttgtcagaaacgagacacccactgcaacccgaagagcaggaggtaggaattgatcccctctcctcctacagcaataaatccggtggcgactcaaataaaaacgggcgtcgcacctcttcaacattggattccgagggcacctttaactcatacagaaaagagtgggaagagctgtttgtcaataacaactatctggccaccatccggcagaaggggatcaatggccagctgcgctcatcccggttccgcagcatctgctggaagctattcctttgcgtcttgcctcaagacaagagccaatggatctctcgtatcgaagagctacgggcatggtactcaaacataaaagaaatccacattaccaatccacgaaaagtggtaggccagcaggacctgatgattaataaccccttatcccaggacgaggggtctctgtggaataagttcttccaagataaggagctcaggtccatgatcgagcaagacgttaagcggaccttccctgagatgcaatttttccagcaggaaaatgtgcgcaaaattcttacggatgtcctgttctgctatgcccgtgaaaacgaacagctcttatataaacagggaatgcacgagttacttgctccgattgtgtttgtgctgcactgtgatcaccaggctttcctgcacgcctcagaaagcgcacagcctagtgaggagatgaaaaccgtgctgaacccggagtaccttgaacatgatgcttacgccgtcttcagtcagctcatggagactgccgaaccatggttctcaacattcgaacacgatgggcaaaaaggtaaggaaacgctgatgacccccattcctttcgcccgtcctcaggacctcggccctactatagccattgtgactaaggtgaaccaaatccaggatcaccttctcaaaaaacacgacattgagctgtacatgcatctgaatcgtctggagatagcccctcaaatttatggcctcaggtgggttcgtttgttattcggcagggagtttcctctgcaggatctgcttgtcgtctgggatgccctgttcgccgatgggctgtccttaggactggtggattacattttcgtggctatgcttctctatattagagacgccctaatctcaagtaactatcagacatgtctgggtttgttgatgcactatccttttatcggagatgtccattctctgatcttgaaggcgctattcctgagggacccaaagcgcaaccctcgccctgttacttaccagtttcacccaaacctggattattacaaggctagaggcgcagacctcatgaataaaagtcggacaaacgccaagggggctcctttaaacattaataaggtcagcaattctctgatcaattttggcagaaaattaatcagccctgctatggcaccaggctccgctggcggaccagtgcccggtgggaacagctcaagctcctcctcggtcgtgatcccaaccagaacgagtgccgaagccccttcccaccacctccagcaacagcagcagcagcaaaggttgatgaagagcgaaagtatgccagtgcaactgaataagggcctgtcaagcaaaaatatctccagctccccttcagttgaatccctaccaggaggacgtgagtttacaggcagtccaccttccagcgcgacgaagaaagattcgttctttagcaacattagccgctcaaggtcacacagcaagacgatggggcgtaaggaaagtgaagaagagctggaagcccagatttcgtttctacaaggacaactgaatgacctggacgctatgtgtaaatattgtgctaaagtgatggacactcatctggtaaacattcaggatgtcatcctgcaggaaaatcttgagaaagaggatcagattctggttagcctggccggtctgaagcagataaaggatattctgaaaggaagcttacgcttcaaccagtcccagctggaagccgaggagaacgaacagattacaatcgctgataaccactattgtagttccgggcaaggccagggcagaggtcaggggcaatctgtgcagatgtccggcgcaatcaagcaggcctcatccgagacccccggatgtacagatagagggaattctgacgactttatcctgatttcaaaggacgacgacggatcgagtgccagaggcagtttctctggacaggcccaacctctacgcacactgagaagcacaagcggtaagagccaggcgccagtgtgttctcctctggtgttcagtgatcccctcatgggtccggcatcggccagttccagcaatcccagctcctctccggacgacgactcgtccaaagattctggctttaccattgtgtctcctctggacatatag

SEQ ID NO: 181947 - DNA, 552 bp, Artificial Sequence
  derived and/or modified sequence
atgtaccactcattgtccgagactcggcaccctcttcagcctgaggagcaagaggtggggatcgatcctttaagttcatactcaaacaagagcggaggtgactcaaacaagaacggaaggcggacctcttcgaccctggatagcgaaggcaccttcaactcttaccgtaaggaatgggaagaactcttcgtcaacaacaactacctggcgaccattcgccaaaagggtatcaacggacaattgcggtcttccaggtttcggagcatctgctggaaactcttcctgtgcgtgttacctcaggacaagtcgcaatggataagtcgcattgaggagttaagggcttggtactccaacatcaaagagattcacattaccaatcctcggaaggtggtgggacagcaggacttaatgatcaataatcctttgtcgcaggatgaaggaagcctgtggaataagttctttcaggacaaggaactgaggtcaatgatagaacaggacgttaaaagaactttccccgagatgcaatttttccagcaagagaacgtgaggtag

SEQ ID NO: 181948 - DNA, 2388 bp, Artificial Sequence
  derived and/or modified sequence
atgtaccacagcctctccgagacacggcaccctctgcagcccgaggagcaggaggtggggatcgacccacttagctcttattctaataagtccggaggcgactccaataaaaatgggcgtcggaccagttccacactagactccgagggcacatttaacagttatcgcaaagagtgggaagagctgtttgttaataacaactacctggcaaccatacgtcagaagggcattaacggacagttacgctcatcaaggtttcgttctatttgttggaagctatttctgtgtgtgctaccacaggacaagagccagtggatcagccgcattgaggaactccgcgcatggtactcaaatataaaggagattcacattaccaatcctcggaaggtcgtggggcaacaggatctcatgattaacaatccactgtcgcaagacgagggctctctctggaataaattttttcaagacaaagagctacgttcaatgatcgaacaggacgtgaaaaggacattccccgagatgcagttcttccagcaagaaaacgtgcggaagatcctgactgacgtactgttttgttacgcacgtgagaatgaacagctcctttacaaacagggcatgcatgaattgttggctcccatcgtcttcgtattgcactgtgatcaccaggctttcttacacgctagtgagagcgcccagccttctgaagaaatgaagactgtcctgaaccctgagtacctggaacatgatgcatatgccgtgttctctcaactgatggaaacagctgagccatggtttagcacattcgaacacgatggtcaaaagggcaaggagaccttgatgactcctattccatttgctcgccctcaggacctcggccctactatcgctatagttactaaagttaaccaaatccaggatcatttgctgaagaagcatgatatcgaactttacatgcacctaaatcggcttgagattgccccacagatttatggactgcggtgggtccggctgttgttcggaagagagtttccactccaggacttgttggtcgtgtgggacgctctgttcgccgacggcctgagcctcggactggtggactacatcttcgtggccatgctcctctatattagagacgcattaatctcctccaattatcagacttgcctgggccttcttatgcattatccctttataggagatgtccatagcctgatcctcaaagcgctgttcctccgcgaccctaaacgtaatccccgtccggttacctaccagttccacccaaacctggactattacaaagcaaggggagcggatctcatgaacaaatctcgaactaatgccaaaggcgctcccttgaatattaataaggtgtcgaatagcctgatcaatttcggtcgcaaacttatctcaccagccatggccccaggtagcgcaggaggaccagtccctggcggaaacagtagtagctccagtagcgtggtgattcccacccgcaccagtgccgaagctccatctcaccacctgcagcagcaacagcagcagcagaggttgatgaagagtgagtcaatgcctgtccagctcaacaaggggctctcaagcaaaaatatttccagcagccctagtgtggagagcttgcctggtggaagggaatttaccggatcgccgccatcttctgccactaaaaaggatagtttcttttccaacataagtcgcagccggtcccactccaaaacaatggggagaaaggagtcagaggaggaattggaggcacagattagcttcctgcagggtcagctcaacgacctggacgcaatgtgcaagtactgcgccaaagtgatggatacacatctggtgaatatccaggacgtaattttacaggaaaacttggaaaaggaggaccagatcctcgtatcccttgccggtctcaagcaaatcaaggatattctcaaagggagccttagattcaaccagagtcagctggaggccgaggagaatgagcagattacgattgccgataaccattactgctctagtggccaaggacagggcagaggacagggacagtcagtgcagatgagcggcgcaattaagcaagcctccagcgagactcccggatgtaccgatagaggcaatagtgacgattttattcttatctcaaaggacgatgacggtagcagcgccagaggctcattttctggccaggcacagccattgcgcaccctccgcagcacctctgggaaatctcaagctcctgtgtgtagccccctggttttcagtgaccccctgatgggacctgcttcggcttcctcctcgaatccaagttccagtcctgatgacgattcttcaaaagattcagggtttactatcgtcagtccgcttgatatatag

SEQ ID NO: 181949 - DNA, 267 bp, Artificial Sequence
  derived and/or modified sequence
atgtaccattccctgagcgagactaggcacccattgcagccagaagagcaagaggtgggaatagatccattgtcttcctatagtaataagagcggcggtgattctaataagaacggccgaaggaccagttccactctggatagtgaaggaactttcaatagctatcgtaaagagtgggaagagcttttcgtgaataacaattatttagccactatccgacagaaaggcatcaacggccaactcaggagtagtcgcttccggtcttag

SEQ ID NO: 181950 - DNA, 6609 bp, Artificial Sequence
  derived and/or modified sequence
tgactgcatcacctggtctgtgaattttccattagaagcttggtgtgctgttaggtgaaagacttgctcagctatgcgtcattgggttttatcaacatataggcgaaaaaaatcctggtctctgagtgtacagctgagatgaaaatttcttttattggaggaagtattgagtgtgtgctctcaaatgcggcctcagttgagtagtgcattcctgagttttggaagcaaatttgcaaacaattgagagtcgtacagtgggtgttctaactggattcaggttttttctaatgtaattttttcacacgtaaattaaaaagtttagaaatgtcacacataacttcataacactttatggagaaatggttgtacttttaatttttttctttttatttatactccaactgactgagcagaggttgtacttctaaataactttgtggaagtttttagtaccataatttttataattttcattccagtcctttgatatttatgacagtacttctgaagcgcttactgagtgccggacactgttgtaagtgctttacggaacttgacttttttttttttttgagacggactctcgctctgtcgcccaggctggagtgcagtggtgcagtggctcgatctcggctcactgccacctctccctcatggtttcaaacacttctcctgcctcagcctcccaggtagccaggattatagccgcccgccaccactcccgactaattttattttgtatgttcttttttagtagagacggaggagtttcaccatgttggccaggctggtatcgacctcctgacctcaagtgatgtgtccatctcggcctcccaaggtgctggaattacaggtgtgagccactgtgctcggcctacctttttttttttgttttttgtttttttgaaaaggagtttcgctcttgtccaggctggagtataatggtgcgatctcagctcaccgcaatctccgcctcccagattcaagcgattctcctgcctcagcctcctcaggagctgggattacaggcgcccaccgccatgcccggctaatttttgtatttttagtagagacggggtttcactatattggccaggctggtctcgaactgctgacctcaagtaatccgcctgcctcagcctcccaaagtgctgggattacagacgtgatccaccaggatcacaccaggccgcgcctggcctgctttcattttaaaagtcaaatttgtcatccgcctcagtgcttgtaatcttttctgagtgagatactgaaatttgcagtttcgttttgcttgcacttgttcactggaccagtagtcactgttaaatgtaaaagtatctacttcctctgaaagttttttattcctttatttcctgcctgggcttgtcctccaccctacatgtatgcgtagtagatttagtgtttgttatcctaacctttaggtttagggattgactgggtttctgactttttatttggccaatgaggacgatacagaaaatgaagcattggtcattatcacattttaacgctgaaaaagtaagaaggacaaccccggaataaaatgatatcagtatcaagataaaagtttggaatgggagaaaaattctcaaagcctgaaagaaaatctgtagttacttttggtgacgctgtccagttcccacaatgtatcattccttatctgaaactagacatcctctgcagccagaagaacaagaagtaggcattgaccccttgtccagttactctaacaagtctggaggagattcaaataaaaatggaagaagaacaagttctactttagactctgaagggacttttaattcctataggaaagaatgggaagaactatttgtaaacaacaattacttggcaacaataaggcagaaggggattaatgggcagctgagaagcagcaggttccgcagcatttgctggaagctatttctttgtgttcttcctcaagacaaaagtcaatggataagtagaattgaagaattaagagcatggtatagcaacattaaagaaatacatattaccaacccgaggaaggttgttggccaacaagatttgatgatcaataatcctctttcacaggatgaagggagtctttggaacaaattcttccaagataaagaacttcgatcaatgattgaacaagatgtcaaaagaacgtttcctgaaatgcagtttttccagcaagaaaatgtgagaaaaattcttacagatgttcttttctgttatgccagagaaaacgagcagttgctttataaacagggcatgcacgaactgttagcacctatagtctttgtccttcactgtgaccaccaagcttttctacatgccagtgagtctgcacagcccagtgaggaaatgaaaactgtcttgaaccctgagtatctggaacatgatgcctatgcagtgttctcacaacttatggaaactgctgaaccttggttttcaacttttgagcatgatggtcagaaggggaaagaaacactgatgactcccattccctttgctagaccacaagatttagggccaacaattgctattgttactaaagtcaaccagatccaggatcatctactgaagaagcatgatattgagctttacatgcacttgaacagactagaaattgcaccacagatatatgggttaaggtgggtgcggctgctatttggacgagagttccccctgcaggaccttctggtggtctgggatgccttgtttgcagacggcctcagcctgggtttagtagattatatcttcgtagccatgttactttacatccgagatgctttgatctctagtaactaccagacctgtctcggccttctgatgcattacccattcatcggggatgtacactcactgattcttaaggctctgttccttagagatccaaagagaaatccaagaccagtgacttatcaattccatccaaatttagattattacaaagcacgaggagcagacctcatgaataaaagccggaccaatgccaaaggtgctcccctgaatataaataaggtctctaatagcctgattaattttggaagaaagttgatttccccagcaatggctccaggcagtgcaggtggccctgtacctggaggcaacagcagtagctcctcctctgttgtaattcctaccaggacctcagcagaggccccaagccatcacttgcaacagcaacagcagcagcagaggctgatgaaatcagaaagcatgcctgtgcaattgaacaaagggctaagttctaaaaacatcagttcatctccaagcgttgagagtttgcctggaggaagagaattcactggctctccaccttcatctgctactaaaaaagattccttttttagcaacatctcacgttctcgctcacacagcaaaactatgggcagaaaagaatctgaagaagaattagaagcccaaatttccttccttcaagggcagttgaatgacctggatgccatgtgcaaatactgtgcaaaggtgatggacactcatcttgtaaatattcaagatgtgatattacaagaaaatttggaaaaagaagatcaaattctggtttccctggcaggattaaaacagatcaaagacattctaaaaggttccctgcgttttaaccagagccagctagaggccgaagagaacgaacagatcaccattgcggacaaccactactgctccagcggccagggccagggccgaggccaaggccagagcgttcaaatgtcaggggccattaaacaggcctcttcagaaacgccagggtgcactgatagagggaattccgatgacttcatcctgatttccaaagatgatgatgggagcagtgccaggggctccttctccggccaggcccagcctcttcgcaccctcagaagcacctctgggaaaagccaggccccagtctgctccccactggtgttctcagatccactgatgggcccagcctcagcttcctccagcaaccccagctccagtcctgatgacgacagcagcaaggactctggcttcaccattgtgagtcccctggacatctgaccacagtgcccagtcctgccccacagggatctagccacccttcagtggccccaaggccagactgaggctcatccagtggagaaccttcttaaaccactgcttccttcccggcatgcattttgcattggtccagccctttgaaaccccttagagagaagcatatatggccacaaagcacagaggcttaggtttgccacatgcagacagggctttctgggcccttacctaatccccacccgactcttgctctgagttagagctgagttacgtacccagtatcacactcacagttagaaaagaccgaatcacaatttagaatcacttttcctctgtccccttctccccagctaagaatgtgtggcacctccatcagttatacttagaaggagcagaaatagttattttcgtatcttctatccctcaaagcatcagacatgggaaaattggtttataccaagaaagcttcctctgtggaaatctgtctcagcctactttattcctgcattgggaagccatatcgcagagctaaatgcaatagaatgaaccagaactagtggattccagggctgggggaaaaaaaaaaagaaaaaacctcattactgacctctcaaagttataaggatctctgcaaacaggatctaagcttaggaataatatttaggtgtgatatagtgttagatttttttgatgtattaaagaatgcatctccaatccttaggccatatcaactttggccatcaatatctctccttaaacaattatatttcaccttttagaatctttcatagccagaaaacaagattactgtaagccagttttagctgcactgatttcaaaagatataagaatattactatccttcaaatggaaaatgcgaccttgactttatgggataaacatctttcagacagtcagttttctagtcaggtttctctggtttcagagctgtatatacctgtcaactgaggaataaagggaaaaacccaagttcattcccacccaaagtcagaatccctcattggccttaaggtagcagtcataagacagagaattggacctagagtcccttctgtggggaataaggatacctagagaacattccacatgccaagaggatgcaggatttctacacaaccccttcccttcttggaagtcaagtgtaggtactgcagggcctgtgctcagctgtgaaccccgtatcctgggccccactgccgggaccgggtctgacatgccagtgccttcctgggctgagcacagattagagactctcccccttgtcagtcagcaccttaggaaaccatgatgggcacagagcatcacatgagctgtttctctccttaaagaagatccctggaaaggatgcttttcctctcctttgcctgcgcaggaattctaacaggagtgggtgaggatggcagagggacacagtgcctgtctcgcctccatcagggagagcagccatgccagggatgactagctctttgagcctgtcctcagaggatggcgaggcagccgggcagtggaggccttcatggtaacaaatgaaagctcagtatagaggaacagacactgtttacgtccctcccactgctaaccttatatatctctatagacaaatgtgataatgacatgatttcccacctgccctccaagaaaatggtgactcactctcaagtcagctactgtagagagggttctaattggttctgcaatttgctcttaaactctagcagggaactctcctcttaccacatcagcatgtaaggtgaataataactggttttgccagacagcaggttgtctgaccttcaaccactgggcaattgcctggcagatgcacacagtagctccctggcttctggctctgagtgttcctctcagcacctctgagtaagctgctgccaagcacatatccctatgacaacactttgtaaaagccgcggggcccccatacagcgagtgaccttgcaactgtgcagggttgccattggtcactttctcaccttgggaaggtgtcagtgttttcagttctaaggtaagaggtgtagagctgttcccaccagggctctgggacagactggaaaggaccacagacctggccatccctgggcagcagggccagtgtcacctgctgacctctagtatttcctttgccctagagctagagtcatgatagctgagggtcactcgccctgcaagagtcactaggcacccaccatgccaataaggctctccgctggctccctgcagttggctgggtgtttaatagtcactgaaaactcccagccctgctgcacactagaggcaggtcctctcggtcctctccatcctgtgcttctgtggcccccagcaagctcaccacctccttggaggagagagacatacaaggacagtgggtcatgggtagtaccagcctcaaattcccacaggctcatactcagacaattgtattactgccttatgttttttaagtgtttttttaaattcttcatagttgagtattatttgcaattttattagttacagtgctattaaagaatatgtgctcctttt

SEQ ID NO: 181951 - DNA, 852 bp, Artificial Sequence
  derived and/or modified sequence
acgtggccgctggtcaccgccgccaccccctcccgccctgttctctttcaggtcgggccgggcccggccgcttccgcgagcgccctgcagactgagggagagagagagaaagaggaggggaggaggaggaggattcagggaataggagctggggagcccttctgcgccacaggagggagcctgcgagcaaacgaggtggaaactggagtgcacaagtgctggaatgggctgtctgccttccacccctcacgggagggagcgcgcaggtagttacttttggtgacgctgtccagttcccacaatgtatcattccttatctgaaactagacatcctctgcagccagaagaacaagaagtaggcattgaccccttgtccagttactctaacaagtctggaggagattcaaataaaaatggaagaagaacaagttctactttagactctgaagggacttttaattcctataggaaagaatgggaagaactatttgtaaacaacaattacttggcaacaataaggcagaaggggattaatgggcagctgagaagcagcaggttccgcagcatttgctggaagctatttctttgtgttcttcctcaagacaaaagtcaatggataagtagaattgaagaattaagagcatggtatagcaacattaaagaaatacatattaccaacccgaggaaggttgttggccaacaagatttgatgatcaataatcctctttcacaggatgaagggagtctttggaacaaattcttccaagataaagaacttcgatcaatgattgaacaagatgtcaaaagaacgtttcctgaaatgcagtttttccagcaagaaaatgtgagaaa

SEQ ID NO: 181952 - DNA, 3156 bp, Artificial Sequence
  derived and/or modified sequence
agcccttctgcgccacagagatggggtctcactctgtcatccaggctggaatatagtggcacaatcatagcccattgtagcctccatctcaaggactcaggggatcctcccttctaggcctcccaagtagctgggattacaggtagttacttttggtgacgctgtccagttcccacaatgtatcattccttatctgaaactagacatcctctgcagccagaagaacaagaagtaggcattgaccccttgtccagttactctaacaagtctggaggagattcaaataaaaatggaagaagaacaagttctactttagactctgaagggacttttaattcctataggaaagaatgggaagaactatttgtaaacaacaattacttggcaacaataaggcagaaggggattaatgggcagctgagaagcagcaggttccgcagcatttgctggaagctatttctttgtgttcttcctcaagacaaaagtcaatggataagtagaattgaagaattaagagcatggtatagcaacattaaagaaatacatattaccaacccgaggaaggttgttggccaacaagatttgatgatcaataatcctctttcacaggatgaagggagtctttggaacaaattcttccaagataaagaacttcgatcaatgattgaacaagatgtcaaaagaacgtttcctgaaatgcagtttttccagcaagaaaatgtgagaaaaattcttacagatgttcttttctgttatgccagagaaaacgagcagttgctttataaacagggcatgcacgaactgttagcacctatagtctttgtccttcactgtgaccaccaagcttttctacatgccagtgagtctgcacagcccagtgaggaaatgaaaactgtcttgaaccctgagtatctggaacatgatgcctatgcagtgttctcacaacttatggaaactgctgaaccttggttttcaacttttgagcatgatggtcagaaggggaaagaaacactgatgactcccattccctttgctagaccacaagatttagggccaacaattgctattgttactaaagtcaaccagatccaggatcatctactgaagaagcatgatattgagctttacatgcacttgaacagactagaaattgcaccacagatatatgggttaaggtgggtgcggctgctatttggacgagagttccccctgcaggaccttctggtggtctgggatgccttgtttgcagacggcctcagcctgggtttagtagattatatcttcgtagccatgttactttacatccgagatgctttgatctctagtaactaccagacctgtctcggccttctgatgcattacccattcatcggggatgtacactcactgattcttaaggctctgttccttagagatccaaagagaaatccaagaccagtgacttatcaattccatccaaatttagattattacaaagcacgaggagcagacctcatgaataaaagccggaccaatgccaaaggtgctcccctgaatataaataaggtctctaatagcctgattaattttggaagaaagttgatttccccagcaatggctccaggcagtgcaggtggccctgtacctggaggcaacagcagtagctcctcctctgttgtaattcctaccaggacctcagcagaggccccaagccatcacttgcaacagcaacagcagcagcagaggctgatgaaatcagaaagcatgcctgtgcaattgaacaaagggctaagttctaaaaacatcagttcatctccaagcgttgagagtttgcctggaggaagagaattcactggctctccaccttcatctgctactaaaaaagattccttttttagcaacatctcacgttctcgctcacacagcaaaactatgggcagaaaagaatctgaagaagaattagaagcccaaatttccttccttcaagggcagttgaatgacctggatgccatgtgcaaatactgtgcaaaggtgatggacactcatcttgtaaatattcaagatgtgatattacaagaaaatttggaaaaagaagatcaaattctggtttccctggcaggattaaaacagatcaaagacattctaaaaggttccctgcgttttaaccagagccagctagaggccgaagagaacgaacagatcaccattgcggacaaccactactgctccagcggccagggccagggccgaggccaaggccagagcgttcaaatgtcaggggccattaaacaggcctcttcagaaacgccagggtgcactgatagagggaattccgatgacttcatcctgatttccaaagatgatgatgggagcagtgccaggggctccttctccggccaggcccagcctcttcgcaccctcagaagcacctctgggaaaagccaggccccagtctgctccccactggtgttctcagatccactgatgggcccagcctcagcttcctccagcaaccccagctccagtcctgatgacgacagcagcaaggactctggcttcaccattgtgagtcccctggacatctgaccacagtgcccagtcctgccccacagggatctagccacccttcagtggccccaaggccagactgaggctcatccagtggagaaccttcttaaaccactgcttccttcccggcatgcattttgcattggtccagccctttgaaaccccttagagagaagcatatatggccacaaagcacagaggcttaggtttgccacatgcagacagggctttctgggcccttacctaatccccacccgactcttgctctgagttagagctgagttacgtacccagtatcacactcacagttagaaaagaccgaatcacaatttagaatcacttttcctctgtccccttctccccagctaagaatgtgtggcacctccatcagttatacttagaaggagcagaaatagttattttcgtatcttctatccctcaaagcatcagacatgggaaaattggtttataccaagaaagcttcctctgtggaaatctgtctcagcctactttattcctgcattgggaagccatatcgcagagctaaatgcaatagaatgaaccagaactagtggattccagggctgggggaaaaaaaaaaagaaaaaa

SEQ ID NO: 181953 - DNA, 578 bp, Artificial Sequence
  derived and/or modified sequence
taagtggacaaggaaggagcttctaacagacttgtgtttggagaactctattgtactgagcctaagtcatttttgatctataacaagaacatgcattttcacatgtcaaccggatttgtggaccagtaaagttctcccacaagaaatcttctatgatattgtctcagggaccacctgcagcaggagcccacaaattgaataaatgcaacataaggagaggattttttttttctgttgttgcttgtttcaaaaatgctactatccagattctctattaaggtagttacttttggtgacgctgtccagttcccacaatgtatcattccttatctgaaactagacatcctctgcagccagaagaacaagaagtaggcattgaccccttgtccagttactctaacaagtctggaggagattcaaataaaaatggaagaagaacaagttctactttagactctgaagggacttttaattcctataggaaagaatgggaagaactatttgtaaacaacaattacttggcaacaataaggcagaaggggattaatgggcagctgagaagcagcaggttccgcagc

SEQ ID NO: 181954 - protein, 1472 aa, Artificial Sequence
  derived and/or modified sequence
MKGSEVSLEKKKKIKMPVKRLREVVSQNHGDHLVLLKDELPCVPPALSANKRLPVGTGTSLNGTSRGSSDLTSARNCYQPLLENPMVSESDFSKDVAVQVLPLDKIEENNKQKANDIFISQYTMGQKDALRTVLKQKAQSMPVFKEVKVHLLEDAGIEKDAVTQETRISPSGIDSATTVAAATAAAIATAAPLIKVQSDLEAKVNSVTELLSKLQETDKHLQRVTEQQTSIQRKQEKLHCHDHEKQMNVFMEQHIRHLEKLQQQQIDIQTHFISAALKTSSFQPVSMPSSRAVEKYSVKPEHPNLGSCNPSLYNTFASKQAPLKEVEDTSFDKQKSPLETPAPRRFAPVPVSRDDELSKRENLLEEKENMEVSCHRGNVRLLEQILNNNDSLTRKSESSNTTSLTRSKIGWTPEKTNRFPSCEELETTKVTMQKSDDVLHDLGQKEKETNSMVQPKESLSMLKLPDLPQNSVKLQTTNTTRSVLKDAEKILRGVQNNKKVLEENLEAIIRAKDGAAMYSLINALSTNREMSEKIRIRKTVDEWIKTISAEIQGLLKATTVIQDEDYMLQVYGKPVYQGHRSTLKKGPYLRFNSPSPKSRPQRPKVIERVKGTKVKSIRTQTDFYATKPKKMDSKMKHSVPVLPHGDQQYLFSPSREMPTFSGTLEGHLIPMAILLGQTQSNSDTMPPAGVIVSKPHPVTVTTSIPPSSRKVETGVKKPNIAIVEMKSEKKDPPQLTVQVLPSVDIDSISNSSADVLSPLSSPKEASLPPVQTWIKTPEIMKVDEEEVKFPGTNFDEIIDVIQEEEKCDEIPDSEPILEFNRSVKADSTKYNGPPFPPVASTFQPTADILDKVIERKETLENSLIQWVEQEIMSRIISGLFPVQQQIAPSISVSVSETSEPLTSDIVEGTSSGALQLFVDAGVPVNSNVIKHFVNEALAETIAVMLGDREAKKQGPVATGVSGDASTNETYLPARVCTPLPTPQPTPPCSPSSPAKECVLVKTPDSSPCDSDHDMAFPVKEICAEKGDDMPAIMLVNTPTVTPTTTPPPAAAVFTPTLSDISIDKLKVSSPELPKPWGDGDLPLEEENPNSPQEELHPRAIVMSVAKDEEPESMDFPAQPPPPEPVPFMPFPAGTKAPSPSQMPGSDSSTLESTLSVTVTETETLDKPISEGEILFSCGQKLAPKILEDIGLYLTNLNDSLSSTLHDAVEMEDDPPSEGQVIRMSHKKFHADAILSFAKQNQESAVSQQAVYHSEDLENSVGELSEGQRPQLTAAAENILMGHSLYMQPPVTNTQSLDQQCDPKPLSRQFDTVSGSIYEDSCASHGPMSLGELELEPNSKLVLPTTLLTAQENDVNLPVAAEDFSQYQLKQNQDVKQVEHKPSQSYLRVRNKSDIAPSQQQVSPGDMDRTQIELNPYLTCVFSGGKAVPLSASQMPPAKMSVMLPSVNLEDCSQSLSLSTMQEDMESSGADTF

SEQ ID NO: 181955 - DNA, 4419 bp, Artificial Sequence
  derived and/or modified sequence
atgaaaggctcagaagtctctctcgaaaagaaaaagaaaattaagatgcccgtcaaacgtctgcgagaggtggtttcacaaaatcatggcgatcacctagttctgctcaaggatgaactgccgtgtgtgcctcctgctctgagcgcgaataagaggctcccagtcgggactggcacctccctcaacggcacctccagaggctcttctgacctcacctccgcccgcaactgctaccaaccacttctggagaatccgatggtgtccgagtctgatttttccaaggatgtcgccgttcaagtgctaccccttgataaaatagaggaaaataataagcaaaaggccaatgacattttcatctctcagtacaccatggggcagaaagacgcgcttcgcacagtactgaagcagaaggcgcagagtatgcctgtgtttaaagaggtgaaggtgcatctgctggaggatgccggaatcgaaaaagatgcagtgacccaagagacgcgaatctcccctagtgggattgactccgctacaactgtggctgctgccacagccgccgcgatagctaccgcagccccactcatcaaagtgcagagcgatcttgaagctaaagtgaactctgtgacagaactcttgtcgaaactgcaggagaccgataaacaccttcagagggttactgagcaacagacgagcatacagagaaaacaggagaagctacattgtcatgatcacgagaaacagatgaatgtatttatggagcagcacatcaggcacttggagaagcttcagcagcagcagatcgacattcagacccacttcattagtgcagccttaaagacttcctccttccaaccagtgtccatgccttccagcagagctgtggagaagtattccgtgaagcccgagcaccccaatttgggctcttgcaatccaagcctgtataacaccttcgcgtcgaagcaggctccactgaaagaggtcgaagacacctcattcgataaacagaagagccctctcgagactcctgccccaaggcgatttgctccagttcccgtaagtagagacgatgaactgagtaagagggaaaaccttctagaagaaaaggaaaatatggaagtctcgtgccatcggggcaatgttagactactggagcagatcctcaataataacgattctttgaccagaaaatccgaaagtagcaataccacttcacttactcgaagcaagattggctggaccccagagaaaacgaaccggtttccatcatgcgaggaactggagaccacaaaggttaccatgcaaaagtccgatgatgtgctgcatgatctgggccagaaagagaaagaaaccaattctatggtgcagccaaaagaatccctgagtatgttaaagctgcctgacttgccgcagaactccgtgaaattgcaaacaacgaataccacacgcagtgtcctcaaagacgctgagaaaatcctccggggcgtgcagaacaacaaaaaggtcctagaagagaacctcgaagctatcatccgcgccaaagatggagccgctatgtacagccttatcaatgcactgtccacgaatcgggaaatgtccgaaaaaattcggatccgcaaaaccgtcgacgaatggattaagacaataagcgccgaaatacaggggctgcttaaggcaacaactgtgattcaggatgaggattacatgttgcaggtgtacggcaagcccgtttatcagggccacaggagcaccctgaaaaaggggccctatttacgttttaacagcccatccccaaagtcacgtccacaaagaccgaaagttattgagagagtaaaaggtactaaagtgaagtccattaggacccagactgacttttacgccactaagcctaagaagatggactccaagatgaagcattccgttcccgtgttgcctcacggcgaccagcagtacttattcagtcctagccgtgaaatgcctaccttttccggaacactggaagggcacttaatccctatggcaatccttctaggtcagacacagagtaatagcgacaccatgcccccagccggcgtaattgtgtctaaacctcaccccgtaacggtcaccacctccatacctccatctagccggaaggtggaaacgggcgtcaagaaacctaatatcgcaattgtcgaaatgaaatctgagaagaaggacccacctcagctgaccgtccaggttctgcccagtgtggacattgactcaatcagtaactcttcagccgacgtgttgtctcccctgagcagccccaaagaggcttcgctgcctccagttcaaacctggatcaaaacgcctgaaataatgaaggtggacgaggaagaggtaaaatttccaggcacgaacttcgatgaaatcattgacgtgatacaggaggaggaaaagtgtgatgagatccccgactccgagcctattctagaattcaatagaagtgtcaaagcagactcaactaagtataatgggcccccgtttcctcccgtggcctctaccttccagcccaccgctgacattctggacaaggtgatcgagcgcaaggagacgctggaaaacagtctgattcaatgggtggagcaggagattatgtccagaatcatttccgggctattcccggtgcaacagcagatcgccccttcgattagcgtgagcgtctcagagactagtgaaccgctgaccagcgacattgtggaggggacttcctccggggcactccagctgttcgtagacgctggcgtgcccgttaattcaaacgtgattaaacatttcgttaacgaggccctggctgaaacaatcgccgtgatgctcggagacagagaagccaagaaacaagggcctgtggcaacaggagtcagcggagacgctagtacgaacgagacctaccttcctgcaagagtatgtaccccactccctacgccccagcctacacctccctgtagtccatccagccccgcgaaggaatgtgtgctcgttaagacgcccgatagctcaccttgtgattcagaccatgacatggcttttccggtcaaagagatatgtgctgaaaagggggatgatatgcccgctattatgctcgtgaacactccaactgtaacaccaacaacaacacctccacccgccgcggccgtgttcaccccaacactgagcgacatcagcattgacaagctcaaagtgtcaagccctgagctgcccaaaccatggggagatggagacttgcctcttgaggaagagaacccaaatagtccacaggaagaactgcacccccgtgccatcgttatgagtgtggctaaggacgaagaacccgaaagcatggacttccctgcccagcctcctccaccggagcctgtgccgttcatgccattccccgcaggaaccaaggccccatctccgtctcagatgcccggttcggacagctctaccctggagtccaccctatctgtgactgttacagagaccgaaaccttggacaagccgatcagcgagggcgaaattctgttctcctgtggccagaagctggcgccaaaaattctggaagatatagggctgtacctaacaaatctgaatgactcactgagctccaccttgcacgacgccgtggaaatggaggacgaccctccgagcgaaggccaagtgataagaatgtcccacaagaagtttcatgcagacgctatcctttcttttgccaaacagaaccaggaatctgcagtgagtcagcaggctgtttatcatagcgaagatctggaaaactctgtaggcgaactctcagaaggccaacggccacagctgacggccgccgccgagaatatccttatgggtcacagcctgtatatgcaaccccctgttacaaatacacagtcactggatcaacaatgtgaccctaagcccctgtcacggcagtttgacaccgtgtccggaagcatttacgaagattcctgtgcctcccacgggcctatgtctctcggggaacttgaactcgaacctaacagtaagttggtcctgcccacaactctcctgacggcacaagagaatgatgtgaacctccccgtcgcggccgaggatttttcacagtaccagctaaaacagaatcaagacgtgaaacaggtcgagcacaagccctcccagagctatctccgggttcgcaataaatccgacattgctccttcgcagcagcaggtgtctccaggagacatggataggacacagatagagttgaacccttacttaacatgtgtgttttccggaggcaaagcagtgccactgtccgccagccagatgccacctgcaaaaatgtccgtgatgctcccctctgtcaatctggaggactgttcacagagcctctctctgagcaccatgcaggaggacatggagtcaagcggcgccgatacattttag

SEQ ID NO: 181956 - DNA, 4419 bp, Artificial Sequence
  derived and/or modified sequence
atgaagggcagcgaggtgtccctggagaagaagaagaagatcaagatgcctgtgaagaggctgcgggaggtggtgtcccagaaccacggggaccacctggtgctgctgaaggatgagctgccctgtgtgcccccagccctgagcgccaacaagaggctgcctgtgggcaccggcaccagcctgaatggcaccagccggggcagcagtgacctgaccagcgccaggaactgctaccagcccctgctggagaaccccatggtgtctgagagtgacttcagcaaggatgtggccgtgcaggtgctgcccctggacaagattgaggagaacaacaagcagaaggccaatgacatcttcatcagccagtacaccatgggccagaaggatgccctgaggacagtgctgaagcagaaggcccagagcatgcctgtgttcaaggaggtgaaggtgcacctgctggaggatgctggcatcgagaaggatgctgtgacccaggagacccgcatcagccccagcggcattgattctgccaccaccgtggccgccgccacagctgctgccatcgccacagctgcccccctcatcaaggtgcagagcgacctggaggccaaggtgaacagcgtgacagagctgctgagcaagctgcaggagacagacaagcacctgcagagggtgacagagcagcagaccagcatccagaggaagcaggagaagctgcactgccacgaccacgagaagcagatgaatgtgttcatggagcagcacatccgccacctggagaagctgcagcagcagcagattgacatccagacccacttcatctctgctgccctgaagaccagcagcttccagcctgtgtccatgcccagcagcagagctgtggagaagtacagcgtgaagccagagcaccccaacctgggcagctgcaaccccagcctgtacaacacctttgccagcaagcaggcccccctgaaggaggtggaggacaccagctttgacaagcagaagagccccctggagaccccagcccccaggagatttgcccctgtgcctgtgtccagagatgatgagctgagcaagcgggagaacctgctggaggagaaggagaacatggaggtgtcctgccacagaggaaatgtgcggctgctggagcagatcctgaacaacaatgacagcctgaccaggaagtctgagagcagcaacaccaccagcctgaccaggagcaagattggctggaccccagagaagaccaaccgcttccccagctgtgaggagctggagaccaccaaggtgaccatgcagaagagtgatgatgtgctgcatgacctgggccagaaggagaaggagaccaacagcatggtgcagcccaaggagagcctgtccatgctgaagctgcctgacctgccccagaacagcgtgaagctgcagaccaccaacaccaccaggtctgtgctgaaggatgctgagaagatcctgcggggcgtgcagaacaacaagaaggtgctggaggagaacctggaggccatcatccgggccaaggatggagctgccatgtacagcctcatcaatgccctgagcaccaaccgggagatgtctgagaagatccgcatcaggaagacagtggatgagtggatcaagaccatctctgctgagatccagggcctgctgaaggccaccaccgtcatccaggatgaggactacatgctgcaggtgtatggcaagcctgtgtaccagggccacaggagcaccctgaagaagggcccctacctgcgcttcaacagccccagccccaagagccggccccagaggcccaaggtgattgaaagagtgaagggcaccaaggtgaagagcatccgcacccagacagacttctacgccaccaagcccaagaagatggacagcaagatgaagcacagcgtgcctgtgctgccccacggggaccagcagtacctgttcagccccagccgggagatgcccaccttcagcggcaccctggagggccacctgatccccatggccatcctgctgggccagacccagagcaacagcgacaccatgcccccagctggggtgattgtgtccaagccccaccctgtgacagtgaccaccagcatcccccccagcagcaggaaggtggagactggagtgaagaagcccaacatcgccatcgtggagatgaagtctgagaagaaggaccccccccagctgactgtgcaggtgctgcccagcgtggacatcgacagcatcagcaacagcagcgcagatgtgctgagccccctgagcagccccaaggaggccagcctgccccctgtgcagacctggatcaagaccccagagatcatgaaggtggatgaggaggaggtgaagtttcctggcaccaactttgatgagatcattgatgtgatccaggaggaggagaagtgtgatgagatcccagattctgagcccatcctggagttcaacagatctgtgaaggctgacagcaccaagtacaatggaccacccttcccccctgtggccagcaccttccagcccacagctgacatcctggacaaggtgattgaaaggaaggagaccctggagaacagcctcatccagtgggtggagcaggagatcatgagccgcatcatcagcggcctcttccctgtgcagcagcagatcgcccccagcatctctgtgtctgtgtctgagaccagcgagcccctgaccagtgacatcgtggagggcaccagcagcggggccctgcagctgtttgtggatgctggggtgcctgtgaacagcaatgtcatcaagcactttgtgaatgaggccctggccgagaccatcgctgtgatgctgggggaccgggaggccaagaagcagggccctgtggccaccggggtgtctggagatgccagcaccaatgagacctacctgcctgcccgggtgtgcacccccctgcccaccccccagcccaccccaccctgcagccccagcagccctgccaaggaatgtgtgctggtgaagaccccagacagcagcccctgtgacagcgaccatgacatggccttccctgtgaaggagatctgtgccgagaagggagatgacatgcctgccatcatgctggtgaacacccccaccgtgacccccaccaccaccccacctcctgctgctgctgtgttcacccccaccctgagtgacatcagcattgacaagctgaaggtgagcagccctgagctgcccaagccctggggagatggagacctgcccctggaggaggagaaccccaacagcccccaggaggagctgcacccccgggccatcgtgatgtctgtggccaaggatgaggagcctgagagcatggacttccctgcccagcccccacctcctgagcctgtgcccttcatgcccttccctgctggcaccaaggcccccagccccagccagatgcctggcagtgacagcagcaccctggagagcaccctgtctgtgacagtgacagaaacagagaccctggacaagcccatcagcgagggggagatcctcttcagctgtggccagaagctggcccccaagatcctggaggacatcggcctgtacctgaccaacctgaatgacagcctgagcagcaccctgcatgatgctgtggagatggaggatgacccccccagcgagggccaggtgatccgcatgagccacaagaagttccacgcagatgccatcctgagctttgccaagcagaaccaggagagcgctgtgtcccagcaggccgtgtaccacagcgaggacctggagaacagcgtgggggagctgtctgagggccagaggccccagctgacagctgctgctgagaacatcctgatgggccacagcctgtacatgcagccccctgtgaccaacacccagagcctggaccagcagtgtgaccccaagcccctgagccggcagtttgacacagtgtctggcagcatctatgaggacagctgtgccagccacggccccatgagcctgggggagctggagctggagcccaacagcaagctggtgctgcccaccaccctgctgacagcccaggagaatgatgtgaacctgcctgtggccgctgaggacttcagccagtaccagctgaagcagaaccaggatgtgaagcaggtggagcacaagcccagccagagctacctgcgggtgaggaacaagagtgacatcgcccccagccagcagcaggtgtcccctggggacatggacaggacccagatcgagctgaacccctacctgacctgtgtgttcagcggcggcaaggctgtgcccctgagcgccagccagatgcccccagccaagatgtctgtgatgctgcccagcgtgaacctggaggactgcagccagagcctgagcctgagcaccatgcaggaggacatggagagcagtggagctgacaccttctag

SEQ ID NO: 181957 - DNA, 4419 bp, Artificial Sequence
  derived and/or modified sequence
atgaagggcagcgaggtgagcctggagaagaagaagaagatcaagatgcccgtgaagcgccttcgggaggttgtctcccagaatcatggagaccatcttgttctcctgaaagacgagctcccttgcgtgccccccgccttgtctgctaacaaacgtttgcctgttggcacaggtaccagtctcaatggtacttcccggggctccagcgacctcacaagcgcgagaaactgctaccagccccttctagagaaccccatggtgtccgagagcgacttttccaaggatgtcgctgttcaggttctccctctggacaagatcgaggaaaacaacaagcaaaaggctaatgacatatttatttcccagtataccatggggcagaaggatgcactgcgcactgtcttgaagcaaaaagctcagagcatgcctgtctttaaggaagtgaaagtacacttattggaagacgctgggatcgaaaaagacgctgtcacacaggaaacgaggatatcaccctccggcatcgactccgctacgactgtggccgcagcaacagcagccgctatcgccaccgctgcccccttgatcaaagtacagagcgacttggaggcgaaggtgaatagtgtcaccgagctgttgagtaagcttcaggagactgacaagcatctgcagagagtgactgagcagcagacatccatacagagaaaacaggaaaagctccactgccacgaccacgaaaagcagatgaatgtgttcatggagcaacacattagacatttagaaaaactccaacaacagcagattgatatccagactcactttattagtgcggccttaaagacttctagtttccagcctgtgtcaatgccgtctagccgtgccgttgaaaagtacagcgtgaagcccgagcatcctaatctcggttcttgcaaccccagcctgtacaacacatttgcatccaaacaggccccattgaaggaggttgaggatacatccttcgacaagcaaaaaagcccgcttgaaacaccggcacctcgtcggtttgccccggtacctgtatcccgtgacgacgagttgtctaagcgcgagaatcttctcgaagagaaagagaacatggaagtgagctgtcaccggggcaacgtgcgccttcttgaacaaattttaaacaataacgactctctgaccagaaaaagcgagagtagtaataccacatccctgacacggagtaaaataggctggacccccgagaaaacgaatagatttccttcctgtgaggaactcgagactacgaaagtcactatgcaaaagtcggacgacgttttacatgatctcggacagaaggaaaaagaaaccaattccatggtgcagcctaaagaatccttgtccatgttgaaactgccagatttgcctcagaactcagttaagctgcagaccacaaataccacaaggagcgtgctaaaagatgcagaaaaaattttgaggggggtgcagaataacaaaaaggtgctagaggagaacctggaggctatcataagagccaaggacggtgccgccatgtattccctcataaacgccctttccaccaatcgcgagatgtccgagaagattcgaatccgcaaaacggtagacgagtggatcaagacgatctccgccgaaattcaaggtttgctgaaagcaaccacagtgatacaggacgaggactacatgctgcaagtgtatggcaagcccgtgtatcagggccatagatctacgttaaagaaaggcccctatttacgctttaacagtccctctcccaaatcccgacctcagaggcctaaggtaattgaacgcgtcaagggcaccaaggtgaagtctatcagaacccagaccgatttctacgctaccaaaccaaagaagatggatagtaaaatgaaacatagtgtgcccgtgctgccacacggggatcagcaatacctcttcagcccatccagggagatgccaaccttctccggaactctagaaggacatctgatcccaatggccattctgctgggtcaaacacaaagtaactctgataccatgccaccagcaggggtcattgtgagtaagcctcaccctgtgacagtaacaaccagcattcctcccagcagtaggaaagttgaaactggggtgaagaagccgaatatagctatcgtggagatgaagtccgaaaaaaaggatcccccacagctgactgtgcaggtgctcccctctgtcgatatcgactctatctccaattcttcagcagacgtgctgagccctttgtccagtcctaaggaagcctctttgccccctgtccaaacctggattaagacccctgagattatgaaggtggacgaagaggaagtgaagttccccggtacaaattttgatgagattatcgatgtaattcaggaggaggaaaagtgtgacgaaatacctgacagcgaaccaatcctggagttcaacagaagtgtgaaggcagacagtaccaaatataacggccccccctttccacctgtggccagcacttttcagccaactgccgatattctggacaaagttatcgagaggaaagagaccctcgagaatagtctcatacagtgggtagagcaggaaattatgtccaggattataagcgggttgtttcccgtgcagcaacagattgctccgagcatttcagttagtgtctcagaaactagcgaacccctcaccagcgatatagtggaagggacctcatcaggcgctctacagctgtttgttgatgcaggtgtgcccgtcaacagtaatgttatcaagcactttgtgaacgaagccctcgccgagacaatagcagttatgctcggtgatagagaagcaaagaagcaggggccggtcgccaccggcgtcagtggcgacgcctctactaacgaaacctacctgcctgctcgagtttgtacccccttacccacaccccagcccactccgccgtgctcaccaagcagtcctgcaaaggagtgcgtgcttgtgaagacacctgacagcagtccatgcgacagcgaccacgacatggcttttccggtgaaggaaatctgcgccgagaaaggcgatgatatgccagccatcatgctggtgaacactcccacggtgaccccgactaccacccccccgccggcggctgcagtgttcactcctaccctcagtgatattagcatcgacaagctcaaggtgtccagccctgagctgcctaagccctggggagatggagaccttccgctcgaagaggaaaatccaaattcgccacaggaggaactgcacccacgggccattgtcatgagtgtggccaaggacgaggaacctgaatcgatggattttcctgctcagccacctcctcctgagcctgtcccttttatgcctttccccgccgggaccaaggccccttctccgtctcagatgccagggtctgattccagtaccttggaatcaacactgtccgtgacggtgaccgagaccgagacccttgataagccaatttcagagggcgagatactgttcagttgtggacagaagttggcacccaaaatccttgaggatattgggctgtatctgactaatcttaatgacagcctgtccagcacactgcacgacgcggttgagatggaggacgaccccccgagcgaaggacaagtgattcgtatgagtcacaagaaattccatgcagatgccatcttgagcttcgcaaaacagaaccaggagagcgctgtttcacagcaagccgtatatcattcagaggatctggagaactctgtcggtgaattatccgaaggccagcgccctcaactcaccgccgccgcagagaacattctcatgggtcatagtctctacatgcagcctcctgttacgaatacacagtctctggaccaacaatgcgaccccaagcccttgtcccgacaatttgacaccgtgtctggctcgatatatgaggacagttgtgcatcccacgggccaatgagcctcggggaactggaattggagcccaattccaagctagtgctcccaaccactctcctgacagctcaagagaacgatgttaatctgcccgtggcggcagaggatttttctcaataccagctgaaacagaatcaggacgtgaagcaagtcgaacataagccctcacagagctacctccgcgttaggaataaaagtgatatcgccccttcacagcaacaggtttcacctggggacatggaccgcacacaaatagaattgaacccttaccttacttgtgtgttctctggcggcaaggccgtaccactgagtgcatctcagatgccacccgcaaaaatgagcgtcatgttgccttctgtaaacctggaagactgttctcagagtctgtcgctttccaccatgcaggaggacatggagtcctcaggggcggataccttctag

SEQ ID NO: 181958 - DNA, 4419 bp, Artificial Sequence
  derived and/or modified sequence
atgaaaggaagcgaggtgagcttggagaaaaaaaaaaagatcaaaatgcccgtcaagcgcctccgagaagtagtgtcacagaatcatggcgatcatctcgtgctgctgaaagacgaattaccctgcgttcctcccgcacttagcgccaataaaaggttgcctgttgggaccggaactagccttaatggtacctccaggggttcttctgacctcacatctgccagaaattgctatcagcccttactcgagaatccaatggtcagtgagtcagattttagtaaggacgtggccgttcaggttctgccgctggataaaattgaagagaacaacaagcagaaggctaacgatatttttatatcacagtatacgatgggccagaaggatgcattgcgaacggttttaaagcagaaagctcaatccatgccagtgttcaaagaagtcaaggtgcatcttttagaagatgctggcattgaaaaggacgcggtgacgcaagagacgcgcatttctccctccggcatcgacagcgccaccacagtggcggctgccactgctgcggctatcgctactgccgctccacttataaaggtacagtctgatttagaagctaaagtgaactcagtgaccgagctcctcagtaaactccaggaaacggacaagcacctacaaagagtcacggaacaacagacatctatccaacgtaaacaagagaagcttcactgccacgaccatgaaaagcagatgaacgtctttatggaacagcatatacggcatttggagaagctccaacagcagcagatagacatccagacgcatttcatcagcgccgcactgaagacttcgtcgttccagccggtgagtatgccgagctctcgtgccgtggaaaaatactcagttaagccagaacacccaaacttaggatcatgtaacccgtcactgtacaatacgttcgctagtaagcaggcgccattaaaggaggtggaagatacatcctttgataaacagaaaagcccgctggaaacacctgctccacgaaggtttgcgccagtccctgtctcacgggacgacgaattaagcaaacgcgagaacctactggaagaaaaggagaacatggaggtctcgtgccatagaggcaatgtaagactgctggaacagattttgaataacaatgactccttgactcggaagagcgaatcgtcgaatactacgagcctcacaaggtccaagatcggttggactcctgagaagacgaatcgtttcccaagctgtgaggaattagaaaccacaaaagtgacgatgcagaagagcgatgacgtgctgcacgatctcggacagaaagagaaagagacaaactcaatggtgcagcccaaggaatcactgtcgatgctcaagctgcccgatcttccacaaaacagtgttaagctccagaccactaatacgacaagaagcgtactgaaagacgcagagaaaattttgaggggtgttcagaacaacaaaaaagtgctggaggaaaacctggaggccatcatacgcgctaaggacggggcagctatgtatagtctgatcaacgctctgtctacgaacagagaaatgtctgagaaaatccggatccgaaaaaccgtggatgagtggataaagacaatcagcgcggagattcaggggctgctaaaggcgactacagtcatccaggacgaagattacatgctgcaggtctatggaaagcctgtgtaccagggtcaccgatcaactctgaagaagggaccatacctgcgatttaattccccaagtccaaaaagcaggccccagcgcccaaaggtgattgaacgagttaagggaacaaaggtgaagagtattcggacgcagactgacttctacgcaaccaagcctaaaaaaatggacagtaaaatgaaacactcggtgccagttctgccacacggagatcaacaatatttattctctccttcccgcgagatgcccacatttagtggtaccctcgaagggcacctgattccaatggccatcctccttggccagacccagtccaacagcgacaccatgccaccagctggcgttattgtttccaaaccgcacccggtcactgttaccacctcaatcccaccgtcctccagaaaggtagagaccggcgtgaaaaagcccaacatcgccattgtcgagatgaagtcggaaaagaaggacccgccacagctgactgtgcaggtcttgcctagcgtagatatcgatagtatctcaaattcatccgctgatgtacttagccctctgtccagtccaaaagaagcttcgcttcccccagtgcaaacatggattaaaacccctgagattatgaaggttgatgaggaagaggtcaaatttcccggtacaaatttcgacgagatcatcgatgtgatacaagaagaggaaaagtgcgacgaaatccccgactccgagccaattttggagttcaaccggtctgtgaaggcggattcaactaagtataacggaccccctttccccccagtggcctccaccttccaaccaactgctgatattctcgacaaggtgatcgagagaaaggaaaccctggagaactctctgatccaatgggtcgaacaggagatcatgagtcggataatttccggactgttccccgtgcagcaacagattgcccctagtattagcgtgtccgtatccgagacatcggaaccacttactagcgatatagtcgaaggaacctcaagtggcgcactgcaattattcgtggatgctggggtcccagtgaactctaacgtcattaaacatttcgtgaatgaggcactcgcagaaacgatcgcagtgatgctcggggatcgtgaggctaagaagcagggcccagtggctacgggggttagcggcgacgccagcaccaacgaaacctacctaccagcaagagtctgcacccccttgcccacgccccagcctactccgccatgttctccttcctcacctgcaaaagagtgtgtgcttgtgaagactcccgacagctccccctgcgattcagaccacgacatggcgtttcctgtgaaggagatatgcgcggaaaaaggggacgatatgccggcaatcatgctagtgaacaccccaaccgtgacccccaccacaacgccccctcccgcagctgccgtgtttacacccacgctgtcagacatatcaatcgataaactgaaggtctcctcccccgagctgccaaaaccatggggcgacggtgaccttcctctggaagaggagaaccctaatagcccccaggaggaactgcacccaagggcaatagtgatgtcagtggcgaaggatgaggagccagaatccatggatttccctgcacagccaccacctcctgagccagtccccttcatgcccttccccgctggcactaaagctccgagcccctcacaaatgcccggttcagatagctctaccctcgagtcaactctgagtgtaacagtgaccgagaccgagaccctggacaaaccaatctcggagggagaaatcctgttctcctgcgggcaaaagctggctcccaaaatattggaagatatcggtctttacctgactaacctgaatgactctttgtcctccactctgcacgacgcagtcgagatggaagatgaccccccatcagaagggcaggtgataagaatgtcgcacaaaaagtttcacgccgacgcaatcctctctttcgccaaacagaatcaggagtcagctgtttcacagcaagcagtataccattcagaggacctggaaaattccgtgggagaactgtccgaaggacaaaggccgcagttgaccgcagctgccgagaacattctaatggggcacagcctatatatgcagccccctgtcactaatacacaaagccttgaccagcagtgtgacccaaagccactaagcagacaattcgatactgtctcaggttctatatatgaggattcctgtgcgtcccatggacctatgtccctaggcgaactggagttggagcctaatagtaagcttgttcttcccaccacgctcctgaccgctcaggagaacgacgtgaatctgccagttgctgctgaggatttttctcagtaccagctgaagcagaatcaagacgtcaagcaggtggaacacaaaccatcccagtcttacctgagggtcaggaacaagtctgacattgccccatcacagcagcaggtgtcccccggtgacatggatcggacccaaattgagctaaacccatatctgacctgcgtttttagtggaggaaaggcagtccccttatcggctagtcagatgcccccagctaaaatgagtgtcatgctcccttccgtgaacctagaagactgtagccagtcactgagcctttccacaatgcaagaagatatggagtccagtggagccgataccttctag

SEQ ID NO: 181959 - DNA, 4807 bp, Artificial Sequence
  derived and/or modified sequence
ggttattgttgctcctgtggccattctcttgtcatccccactttcacattttggcgtggtgtattaatagactgagtgggattaatgggtaaatatgactttatagtcagctctaatcctggattcaatatcagaatttagattttcagctttgtggatgttcgacattttaaaaacagttattgcaaagaggtgaaaattttgttctgaagtcttaaggaaacagagaaagtttttccgtccttaagtgtgggacttgttttgtgaccaacaatatgaaaggctctgaggtcagcttggagaagaaaaaaaagattaagatgccagtgaagagacttcgtgaggtagtttctcaaaatcatggagatcatttggttttgctgaaagatgagttgccctgtgttcctccggcattgtctgcaaataaacgtcttcctgttggaacggggactagtttgaatggaacatcacgtggttcatcagacttaacttctgctagaaattgttaccagcctctattagaaaatcccatggtgtcagaaagtgatttttctaaagacgttgcagtgcaagtgttgcctttggataaaatagaagagaacaacaagcaaaaagcaaatgacatcttcatttctcagtatacaatgggacagaaagatgctctaagaacagttttaaagcaaaaagctcaaagcatgcctgtttttaaggaagtaaaggtacatctgttagaagatgcaggcatagagaaggatgctgttactcaggagactagaatttcacccagtggaattgattcagctacaaccgtggctgcagcaactgctgctgccattgcaaccgcagctccgttgataaaggtgcagagtgatttggaagcaaaagtcaattctgttacagaattacttagtaaattacaggagactgataaacacctgcaacgtgttacagagcagcaaacaagcattcagaggaaacaagagaaattacattgtcatgatcacgaaaagcaaatgaatgtgtttatggagcagcacataaggcatcttgaaaagttacaacaacaacaaatagatattcagactcattttattagtgctgcactcaagactagtagttttcagcctgttagtatgccctcctccagagcagtggaaaagtattccgtaaaaccagaacaccctaatcttggtagctgtaatccatctttatataacacatttgcttccaaacaagcacctttaaaagaagttgaagatacgagttttgataaacagaaatctcctttggagacaccagcacctcgcagatttgctcctgtacctgtttcaagggatgatgaactatcaaagagggaaaatcttttggaagaaaaagaaaatatggaagtgtcgtgtcacagaggaaatgtaagactattggaacaaattttgaataataatgattctttgacaagaaaaagtgaatcatcaaacaccacctcactaactaggtcaaaaataggatggactcctgagaaaacaaacagatttccttcctgtgaagagctagaaacaactaaagtgactatgcagaagtctgatgatgttcttcatgaccttggccaaaaagagaaagaaacaaatagcatggtccagccaaaagaatctctgagtatgttgaagcttccagatcttccacagaattctgttaagcttcaaacaaccaatacaacaagatctgtattgaaagatgctgagaagattttgagaggagtacaaaacaataaaaaagtacttgaagaaaacctggaagctattattcgtgcaaaagatggagctgccatgtattcgcttatcaatgctttatctaccaacagagagatgtcagagaaaattaggatcagaaagacagtggatgaatggattaaaactatttctgcagaaattcaggggcttttgaaagcaaccacagtaatacaagatgaagattatatgttacaagtctatggaaagccagtttatcagggccatcgaagcactcttaaaaaaggaccatatctcagatttaattctccatctcctaagtccagaccacagagaccaaaagtaatagaacgagttaaaggcactaaggtaaagtcaataagaacacagactgacttctatgcaacaaaacctaagaagatggattctaaaatgaaacattctgttcctgtgttacctcatggcgatcagcaatatttgttcagcccaagtagagaaatgcctactttttcaggtacattggaaggtcatctgattcctatggcaattcttttaggacaaacccaaagtaatagtgataccatgccacctgctggagtgattgtcagcaagccacaccctgtaactgtgactacttctattcctccatcatctcgaaaagtagaaactggagtaaagaaacctaacatagccattgtagaaatgaagtcagaaaaaaaggatcctcctcagcttactgtgcaggtattacccagtgtagatattgacagcatttcaaatagtagtgctgatgtcctttcacctctgtctagccccaaagaagcatctcttcctcctgtgcaaacttggataaagactccagaaattatgaaggtagatgaagaagaggtgaagtttccaggaactaactttgatgaaataatcgatgtcatacaggaagaagaaaaatgtgatgaaattccagactctgaaccaattctggagtttaacagaagtgttaaagctgattctacaaaatataatggtcctccatttccgccagttgcttctacttttcagcccactgctgatattctggataaagtaattgagagaaaagaaacactggaaaatagcttaattcaatgggtagagcaagaaataatgtcaagaattatctctgggctctttccagtccagcaacagattgcacctagtatcagtgtttcagtcagtgagacaagtgaaccactgacttctgacattgtggaaggaacaagcagtggcgccctccagctttttgttgatgctggtgttcctgtgaactcaaatgtgattaaacattttgttaacgaagctcttgctgagaccattgctgtcatgctgggtgacagagaagcaaagaagcaaggtcctgttgctacaggtgtttctggggatgcttcaacaaatgaaacatatttgccggcaagagtgtgcaccccactgcctaccccacagcctacgcctccttgctcaccttcatcacctgctaaggagtgtgttttggtaaagactccagattcttctccctgtgattcggatcatgatatggcttttcctgtgaaagaaatatgtgctgaaaaaggagatgatatgcctgccatcatgcttgttaatactccaacagttacccctactactacacctcctccagcggcggcagtttttaccccaactttgtcagatatttccattgataaattgaaggtatcaagcccagagcttcccaagccatggggtgatggagacctgccactggaagaagagaaccctaactcacctcaagaagaacttcatccaagagctattgtaatgtctgtggctaaggatgaagaaccagagagtatggatttccctgctcagcctccacctccagagccagttccctttatgccatttcctgccggcaccaaggccccttccccctcacagatgccaggttctgattcatcaacactggagagcacattgagtgttactgtcactgaaactgaaactttagataaacccatctctgaaggagagattttatttagctgtggtcaaaaattggcccccaagattttagaagatataggactgtacctgacaaaccttaatgatagcttatccagcactctgcatgatgccgttgaaatggaggatgatcctcctagtgaagggcaagtgattaggatgtcccataaaaaatttcatgcagatgcaattctttcttttgctaaacaaaaccaggagtcagcagtttcccagcaagcagtctatcattcagaggacttggaaaacagtgtgggtgaacttagtgaaggacaaagaccccagctaacagcggcagcagagaacatcttaatgggacattctctctatatgcagccacctgtcactaatacacagtctttggatcaacaatgtgatcctaaaccattatctcggcaatttgacacagtttcaggtagtatttatgaagattcatgtgctagtcatggtccaatgagtttgggagaattggagttggagccaaattctaagctggttcttcccacaacacttctgacagcacaagaaaatgatgttaatttaccagtagccgctgaagatttttcccagtaccaactaaagcaaaatcaggatgttaagcaagttgaacacaaaccatcacaaagttacctacgtgttagaaataaatctgatattgcaccttcacagcaacaagtttcaccaggtgatatggatcggacacaaattgagcttaatccgtacctcacatgtgtattttcaggtgggaaagcagtgccactctccgcttcacagatgccccctgccaagatgtcagtgatgctgccgtcagtgaacctcgaggactgctctcagtctctgagtctcagcacaatgcaggaggacatggagtcttcgggggcagataccttctgaacgggaagagacagccagcacagtgtttatgccactggttttaaagtcattttaccttggcttaaaaccctctctcagactgtttggtttttgagcatattctgaaaaaaaaa

SEQ ID NO: 181960 - DNA, 4419 bp, Artificial Sequence
  derived and/or modified sequence
atgaagggcagcgaggtgagcctggagaagaagaagaagatcaagatgcccgtgaagagactgagagaggtggtgagccagaaccacggcgaccacctggtgctgctgaaggacgagctgccctgcgtgccccccgccctgagcgccaacaagagactgcccgtgggcaccggcaccagcctgaacggcaccagcagaggcagcagcgacctgaccagcgccagaaactgctaccagcccctgctggagaaccccatggtgagcgagagcgacttcagcaaggacgtggccgtgcaggtgctgcccctggacaagatcgaggagaacaacaagcagaaggccaacgacatcttcatcagccagtacaccatgggccagaaggacgccctgagaaccgtgctgaagcagaaggcccagagcatgcccgtgttcaaggaggtgaaggtgcacctgctggaggacgccggcatcgagaaggacgccgtgacccaggagaccagaatcagccccagcggcatcgacagcgccaccaccgtggccgccgccaccgccgccgccatcgccaccgccgcccccctgatcaaggtgcagagcgacctggaggccaaggtgaacagcgtgaccgagctgctgagcaagctgcaggagaccgacaagcacctgcagagagtgaccgagcagcagaccagcatccagagaaagcaggagaagctgcactgccacgaccacgagaagcagatgaacgtgttcatggagcagcacatcagacacctggagaagctgcagcagcagcagatcgacatccagacccacttcatcagcgccgccctgaagaccagcagcttccagcccgtgagcatgcccagcagcagagccgtggagaagtacagcgtgaagcccgagcaccccaacctgggcagctgcaaccccagcctgtacaacaccttcgccagcaagcaggcccccctgaaggaggtggaggacaccagcttcgacaagcagaagagccccctggagacccccgcccccagaagattcgcccccgtgcccgtgagcagagacgacgagctgagcaagagagagaacctgctggaggagaaggagaacatggaggtgagctgccacagaggcaacgtgagactgctggagcagatcctgaacaacaacgacagcctgaccagaaagagcgagagcagcaacaccaccagcctgaccagaagcaagatcggctggacccccgagaagaccaacagattccccagctgcgaggagctggagaccaccaaggtgaccatgcagaagagcgacgacgtgctgcacgacctgggccagaaggagaaggagaccaacagcatggtgcagcccaaggagagcctgagcatgctgaagctgcccgacctgccccagaacagcgtgaagctgcagaccaccaacaccaccagaagcgtgctgaaggacgccgagaagatcctgagaggcgtgcagaacaacaagaaggtgctggaggagaacctggaggccatcatcagagccaaggacggcgccgccatgtacagcctgatcaacgccctgagcaccaacagagagatgagcgagaagatcagaatcagaaagaccgtggacgagtggatcaagaccatcagcgccgagatccagggcctgctgaaggccaccaccgtgatccaggacgaggactacatgctgcaggtgtacggcaagcccgtgtaccagggccacagaagcaccctgaagaagggcccctacctgagattcaacagccccagccccaagagcagaccccagagacccaaggtgatcgagagagtgaagggcaccaaggtgaagagcatcagaacccagaccgacttctacgccaccaagcccaagaagatggacagcaagatgaagcacagcgtgcccgtgctgccccacggcgaccagcagtacctgttcagccccagcagagagatgcccaccttcagcggcaccctggagggccacctgatccccatggccatcctgctgggccagacccagagcaacagcgacaccatgccccccgccggcgtgatcgtgagcaagccccaccccgtgaccgtgaccaccagcatcccccccagcagcagaaaggtggagaccggcgtgaagaagcccaacatcgccatcgtggagatgaagagcgagaagaaggaccccccccagctgaccgtgcaggtgctgcccagcgtggacatcgacagcatcagcaacagcagcgccgacgtgctgagccccctgagcagccccaaggaggccagcctgccccccgtgcagacctggatcaagacccccgagatcatgaaggtggacgaggaggaggtgaagttccccggcaccaacttcgacgagatcatcgacgtgatccaggaggaggagaagtgcgacgagatccccgacagcgagcccatcctggagttcaacagaagcgtgaaggccgacagcaccaagtacaacggcccccccttcccccccgtggccagcaccttccagcccaccgccgacatcctggacaaggtgatcgagagaaaggagaccctggagaacagcctgatccagtgggtggagcaggagatcatgagcagaatcatcagcggcctgttccccgtgcagcagcagatcgcccccagcatcagcgtgagcgtgagcgagaccagcgagcccctgaccagcgacatcgtggagggcaccagcagcggcgccctgcagctgttcgtggacgccggcgtgcccgtgaacagcaacgtgatcaagcacttcgtgaacgaggccctggccgagaccatcgccgtgatgctgggcgacagagaggccaagaagcagggccccgtggccaccggcgtgagcggcgacgccagcaccaacgagacctacctgcccgccagagtgtgcacccccctgcccaccccccagcccacccccccctgcagccccagcagccccgccaaggagtgcgtgctggtgaagacccccgacagcagcccctgcgacagcgaccacgacatggccttccccgtgaaggagatctgcgccgagaagggcgacgacatgcccgccatcatgctggtgaacacccccaccgtgacccccaccaccacccccccccccgccgccgccgtgttcacccccaccctgagcgacatcagcatcgacaagctgaaggtgagcagccccgagctgcccaagccctggggcgacggcgacctgcccctggaggaggagaaccccaacagcccccaggaggagctgcaccccagagccatcgtgatgagcgtggccaaggacgaggagcccgagagcatggacttccccgcccagccccccccccccgagcccgtgcccttcatgcccttccccgccggcaccaaggcccccagccccagccagatgcccggcagcgacagcagcaccctggagagcaccctgagcgtgaccgtgaccgagaccgagaccctggacaagcccatcagcgagggcgagatcctgttcagctgcggccagaagctggcccccaagatcctggaggacatcggcctgtacctgaccaacctgaacgacagcctgagcagcaccctgcacgacgccgtggagatggaggacgacccccccagcgagggccaggtgatcagaatgagccacaagaagttccacgccgacgccatcctgagcttcgccaagcagaaccaggagagcgccgtgagccagcaggccgtgtaccacagcgaggacctggagaacagcgtgggcgagctgagcgagggccagagaccccagctgaccgccgccgccgagaacatcctgatgggccacagcctgtacatgcagccccccgtgaccaacacccagagcctggaccagcagtgcgaccccaagcccctgagcagacagttcgacaccgtgagcggcagcatctacgaggacagctgcgccagccacggccccatgagcctgggcgagctggagctggagcccaacagcaagctggtgctgcccaccaccctgctgaccgcccaggagaacgacgtgaacctgcccgtggccgccgaggacttcagccagtaccagctgaagcagaaccaggacgtgaagcaggtggagcacaagcccagccagagctacctgagagtgagaaacaagagcgacatcgcccccagccagcagcaggtgagccccggcgacatggacagaacccagatcgagctgaacccctacctgacctgcgtgttcagcggcggcaaggccgtgcccctgagcgccagccagatgccccccgccaagatgagcgtgatgctgcccagcgtgaacctggaggactgcagccagagcctgagcctgagcaccatgcaggaggacatggagagcagcggcgccgacaccttctag

SEQ ID NO: 181961 - protein, 529 aa, Artificial Sequence
  derived and/or modified sequence
MSRKSSVCSSLNSVNSSDSRSSGSHSHSPSSHYRYRSSNLAQQAPVRLSSVSSHDSGFISQDAFQSKSPSPMPPEAPNQNSSSSASSEASETCQSVSECSSPTSVSSGSTMGAWVSTEKLSNGFSHYSLSSESHVGPTGAGLFPHCLPASRLLPRVTSVHLPDYAHYYTIGPGMFPSSQIPSWKDWAKPGPYDQPLVNTLQRRKEKREPDPNGGGPTTASGPPAAAEEAQRPRSMTVSAATRPGEEMEACEELALALSRGLQLDTQRSSRDSLQCSSGYSTQTTTPCCSEDTIPSQVSDYDYFSVSGDQEADQQEFDKSSTIPRNSDISQSYRRMFQAKRPASTAGLPTTLGPAMVTPGVATIRRTPSTKPSVRRGTIGAGPIPIKTPVIPVKTPTVPDLPGVLPAPPDGPEERGEHSPESPSVGEGPQGVTSMPSSMWSGQASVNPPLPGPKPSIPEEHRQAIPESEAEDQEREPPSATVSPGQIPESDPADLSPRDTPQGEDMLNAIRRGVKLKKTTTNDRSAPRFS

SEQ ID NO: 181962 - protein, 755 aa, Artificial Sequence
  derived and/or modified sequence
MEAVIEKECSALGGLFQTIISDMKGSYPVWEDFINKAGKLQSQLRTTVVAAAAFLDAFQKVADMATNTRGGTREIGSALTRMCMRHRSIEAKLRQFSSALIDCLINPLQEQMEEWKKVANQLDKDHAKEYKKARQEIKKKSSDTLKLQKKAKKGRGDIQPQLDSALQDVNDKYLLLEETEKQAVRKALIEERGRFCTFISMLRPVIEEEISMLGEITHLQTISEDLKSLTMDPHKLPSSSEQVILDLKGSDYSWSYQTPPSSPSTTMSRKSSVCSSLNSVNSSDSRSSGSHSHSPSSHYRYRSSNLAQQAPVRLSSVSSHDSGFISQDAFQSKSPSPMPPEAPNQLSNGFSHYSLSSESHVGPTGAGLFPHCLPASRLLPRVTSVHLPDYAHYYTIGPGMFPSSQIPSWKDWAKPGPYDQPLVNTLQRRKEKREPDPNGGGPTTASGPPAAAEEAQRPRSMTVSAATRPGEEMEACEELALALSRGLQLDTQRSSRDSLQCSSGYSTQTTTPCCSEDTIPSQVSDYDYFSVSGDQEADQQEFDKSSTIPRNSDISQSYRRMFQAKRPASTAGLPTTLGPAMVTPGVATIRRTPSTKPSVRRGTIGAGPIPIKTPVIPVKTPTVPDLPGVLPAPPDGPEERGEHSPESPSVGEGPQGVTSMPSSMWSGQASVNPPLPGPKPSIPEEHRQAIPESEAEDQEREPPSATVSPGQIPESDPADLSPRDTPQGEDMLNAIRRGVKLKKTTTNDRSAPRFS

SEQ ID NO: 181963 - DNA, 1590 bp, Artificial Sequence
  derived and/or modified sequence
atgagcagaaagagcagcgtgtgcagcagcctgaacagcgtgaacagcagcgacagcagaagcagcggcagccacagccacagccccagcagccactacagatacagaagcagcaacctggcccagcaggcccccgtgagactgagcagcgtgagcagccacgacagcggcttcatcagccaggacgccttccagagcaagagccccagccccatgccccccgaggcccccaaccagaacagcagcagcagcgccagcagcgaggccagcgagacctgccagagcgtgagcgagtgcagcagccccaccagcgtgagcagcggcagcaccatgggcgcctgggtgagcaccgagaagctgagcaacggcttcagccactacagcctgagcagcgagagccacgtgggccccaccggcgccggcctgttcccccactgcctgcccgccagcagactgctgcccagagtgaccagcgtgcacctgcccgactacgcccactactacaccatcggccccggcatgttccccagcagccagatccccagctggaaggactgggccaagcccggcccctacgaccagcccctggtgaacaccctgcagagaagaaaggagaagagagagcccgaccccaacggcggcggccccaccaccgccagcggcccccccgccgccgccgaggaggcccagagacccagaagcatgaccgtgagcgccgccaccagacccggcgaggagatggaggcctgcgaggagctggccctggccctgagcagaggcctgcagctggacacccagagaagcagcagagacagcctgcagtgcagcagcggctacagcacccagaccaccaccccctgctgcagcgaggacaccatccccagccaggtgagcgactacgactacttcagcgtgagcggcgaccaggaggccgaccagcaggagttcgacaagagcagcaccatccccagaaacagcgacatcagccagagctacagaagaatgttccaggccaagagacccgccagcaccgccggcctgcccaccaccctgggccccgccatggtgacccccggcgtggccaccatcagaagaacccccagcaccaagcccagcgtgagaagaggcaccatcggcgccggccccatccccatcaagacccccgtgatccccgtgaagacccccaccgtgcccgacctgcccggcgtgctgcccgccccccccgacggccccgaggagagaggcgagcacagccccgagagccccagcgtgggcgagggcccccagggcgtgaccagcatgcccagcagcatgtggagcggccaggccagcgtgaacccccccctgcccggccccaagcccagcatccccgaggagcacagacaggccatccccgagagcgaggccgaggaccaggagagagagccccccagcgccaccgtgagccccggccagatccccgagagcgaccccgccgacctgagccccagagacaccccccagggcgaggacatgctgaacgccatcagaagaggcgtgaagctgaagaagaccaccaccaacgacagaagcgcccccagattcagctag

SEQ ID NO: 181964 - DNA, 2268 bp, Artificial Sequence
  derived and/or modified sequence
atggaggccgtgatcgagaaggagtgcagcgccctgggcggcctgttccagaccatcatcagcgacatgaagggcagctaccccgtgtgggaggacttcatcaacaaggccggcaagctgcagagccagctgagaaccaccgtggtggccgccgccgccttcctggacgccttccagaaggtggccgacatggccaccaacaccagaggcggcaccagagagatcggcagcgccctgaccagaatgtgcatgagacacagaagcatcgaggccaagctgagacagttcagcagcgccctgatcgactgcctgatcaaccccctgcaggagcagatggaggagtggaagaaggtggccaaccagctggacaaggaccacgccaaggagtacaagaaggccagacaggagatcaagaagaagagcagcgacaccctgaagctgcagaagaaggccaagaagggcagaggcgacatccagccccagctggacagcgccctgcaggacgtgaacgacaagtacctgctgctggaggagaccgagaagcaggccgtgagaaaggccctgatcgaggagagaggcagattctgcaccttcatcagcatgctgagacccgtgatcgaggaggagatcagcatgctgggcgagatcacccacctgcagaccatcagcgaggacctgaagagcctgaccatggacccccacaagctgcccagcagcagcgagcaggtgatcctggacctgaagggcagcgactacagctggagctaccagaccccccccagcagccccagcaccaccatgagcagaaagagcagcgtgtgcagcagcctgaacagcgtgaacagcagcgacagcagaagcagcggcagccacagccacagccccagcagccactacagatacagaagcagcaacctggcccagcaggcccccgtgagactgagcagcgtgagcagccacgacagcggcttcatcagccaggacgccttccagagcaagagccccagccccatgccccccgaggcccccaaccagctgagcaacggcttcagccactacagcctgagcagcgagagccacgtgggccccaccggcgccggcctgttcccccactgcctgcccgccagcagactgctgcccagagtgaccagcgtgcacctgcccgactacgcccactactacaccatcggccccggcatgttccccagcagccagatccccagctggaaggactgggccaagcccggcccctacgaccagcccctggtgaacaccctgcagagaagaaaggagaagagagagcccgaccccaacggcggcggccccaccaccgccagcggcccccccgccgccgccgaggaggcccagagacccagaagcatgaccgtgagcgccgccaccagacccggcgaggagatggaggcctgcgaggagctggccctggccctgagcagaggcctgcagctggacacccagagaagcagcagagacagcctgcagtgcagcagcggctacagcacccagaccaccaccccctgctgcagcgaggacaccatccccagccaggtgagcgactacgactacttcagcgtgagcggcgaccaggaggccgaccagcaggagttcgacaagagcagcaccatccccagaaacagcgacatcagccagagctacagaagaatgttccaggccaagagacccgccagcaccgccggcctgcccaccaccctgggccccgccatggtgacccccggcgtggccaccatcagaagaacccccagcaccaagcccagcgtgagaagaggcaccatcggcgccggccccatccccatcaagacccccgtgatccccgtgaagacccccaccgtgcccgacctgcccggcgtgctgcccgccccccccgacggccccgaggagagaggcgagcacagccccgagagccccagcgtgggcgagggcccccagggcgtgaccagcatgcccagcagcatgtggagcggccaggccagcgtgaacccccccctgcccggccccaagcccagcatccccgaggagcacagacaggccatccccgagagcgaggccgaggaccaggagagagagccccccagcgccaccgtgagccccggccagatccccgagagcgaccccgccgacctgagccccagagacaccccccagggcgaggacatgctgaacgccatcagaagaggcgtgaagctgaagaagaccaccaccaacgacagaagcgcccccagattcagctag

SEQ ID NO: 181965 - DNA, 1590 bp, Artificial Sequence
  derived and/or modified sequence
atgagcagaaaaagctcagtgtgttcatctctgaattctgttaattcatccgactctcggagcagcggatctcatagccacagccctagctcccattaccgatacagaagcagtaacctggcacagcaggcaccagtcagactcagctcggtgagttcacacgactccggcttcatctcgcaggatgcatttcaatcaaagagcccatctccgatgccaccagaggcacctaatcaaaacagtagttcctccgccagcagtgaagcgtccgaaacttgccagtccgtgtcagagtgcagtagccctacctctgtgtcaagtggcagtacaatgggtgcgtgggtatctactgagaagctgagtaatggcttcagccactactctctatcctccgagtctcacgtggggccaacaggagcagggctgtttcctcattgtctgcccgccagtcgcctgctcccccgcgtgacctccgtgcatctcccggactatgcccactattacaccatcggtccaggcatgtttccttcaagccagataccaagttggaaagactgggcaaaaccagggccctatgaccagcctctggtgaatacattgcagcgaagaaaagaaaaaagagagcctgatccaaatgggggaggacctaccacggcaagtgggcctcccgccgccgcggaagaagctcagcgccctcggtccatgaccgtttctgctgcgactcgtcctggagaggaaatggaggcatgcgaggagctcgcattggctttaagccgcgggctacagctcgatactcagcgcagtagcagagactcccttcagtgctcatccgggtattcaacacaaaccacaacaccatgttgtagtgaagatacgatcccctcacaggtaagcgattacgactacttcagtgtgtctggcgatcaagaagccgaccagcaggaattcgacaaatccagcaccatcccaagaaacagcgatatcagccaaagttaccggaggatgttccaggcgaagagacccgcctccacagctggattgccaactacccttggacctgctatggttaccccaggcgtggctaccattaggcgcaccccctctaccaagccgagcgtgaggcgagggactatcggtgctggtcccattccaatcaaaactcccgtgatacctgtgaagaccccgacagtgcccgatctgcccggcgttctaccagcacccccggatggtcctgaggagaggggcgagcattctcccgagagtccttcggtgggcgagggtccccagggggtgactagtatgcctagctctatgtggtcgggccaggcatctgtaaacccccccctcccagggcccaaaccaagcatcccggaagagcaccgccaggcaattcccgaatcagaggcggaagatcaggagagagaacctccatccgctactgtgagtccgggccagatacctgaatcggatccagcagacctgtcccctagagatactccacaaggggaggatatgctgaacgccatcagaagaggtgtgaaactgaagaagactacaaccaacgaccggtccgcaccacgattcagctag

SEQ ID NO: 181966 - DNA, 2268 bp, Artificial Sequence
  derived and/or modified sequence
atggaagcagtcattgagaaggagtgctcagccctggggggtttgtttcagactattatttccgatatgaaaggctcctatccagtgtgggaagactttatcaataaagcaggtaagctccagtcccagctccgcacgaccgtagttgctgctgcagcgttcctggacgcgttccagaaagtcgccgacatggctaccaacacaagaggcggtactcgcgagatcggatctgcccttacacgaatgtgtatgaggcaccgaagcatagaggccaagctgcggcagttctcatctgctcttatcgactgcctgatcaatcctctgcaggaacaaatggaggaatggaaaaaggtcgctaatcagttggataaagaccacgccaaagaatataagaaggcacggcaggagattaaaaaaaagtcttcagacacactgaagctacagaagaaggcaaaaaaagggaggggagacatccagccgcagctggattccgctctgcaggacgtgaatgataaatacttgctcctcgaagagacagagaagcaggccgtgcgcaaggctctcattgaggagagaggaaggttctgcacatttataagcatgttgagaccggttatcgaagaggaaatcagcatgctgggcgaaattactcatcttcagacaatctccgaagatctgaagtcattgactatggatccccataaactgccatcatctagtgagcaggtcatcctcgatctgaaaggctctgattactcatggtcttaccagacaccaccctcatcacccagcacaactatgagccgtaagtcatctgtgtgcagcagtctcaatagtgttaacagtagcgattccaggtcctccgggagtcactcacattctccttctagccattatcgctaccgcagttccaatctggcccagcaggcccccgtcagattgtcctccgtctcctcccacgactcagggttcatctcccaagacgcattccagtctaaaagcccaagtccaatgcctcctgaagctccaaaccagcttagtaatggattcagccactacagcctctcgtcggagagccacgttggacccacaggcgccggactgtttccgcattgccttcccgccagcaggttattaccccgggtaactagtgtgcatctgccggattacgctcactattatacgatcggtccaggcatgtttccgtcctcccagattccttcttggaaagattgggcgaagcctggaccttacgaccagcctctggtcaatacgttgcagcggcgtaaagagaagcgagagcctgaccctaatggtgggggtccgaccaccgcctccggcccccctgccgccgctgaagaagctcaacgcccccgtagtatgaccgtgagcgcagcgactaggcccggggaggaaatggaggcttgtgaagagctagctttagctctgagtaggggactccagttggatacccagaggtcttctcgggacagtctccagtgcagttcagggtatagcacacagaccactactccttgctgttccgaagacaccatcccctcacaggtctccgactatgattattttagcgtgtctggtgatcaggaggctgaccagcaagaattcgataagagctctacaatcccccgaaatagcgatattagccagagttatagacggatgttccaggcaaagcggcccgcatcaacagcaggactcccgaccacactgggcccagctatggtgacccccggagtggctacaatcaggcgcaccccatccaccaaaccttcagtacgtagggggaccatcggcgcgggccccatcccgataaagacgcccgtaattcccgttaaaacaccgaccgtcccagatctgccaggcgttcttcctgccccaccggacggccctgaagaacgaggagagcactcacccgagtctccatctgtgggcgaaggaccccagggggtaactagcatgccatcatctatgtggagcgggcaggcgtccgtaaatccacctcttccaggtccgaagccatctatcccagaagaacaccgacaggctattcccgagtcagaggccgaagatcaggaacgtgaacctccatctgccaccgtatccccaggtcagattcccgagagcgatccagccgatctgtccccccgggatactccccagggcgaagacatgctgaacgcaatcaggcgtggtgtcaaattaaaaaaaaccactactaacgataggagtgcgcctcgtttttcttag

SEQ ID NO: 181967 - DNA, 1590 bp, Artificial Sequence
  derived and/or modified sequence
atgagcaggaagagctctgtgtgcagcagcctgaacagcgtgaacagcagtgacagccgcagcagcggcagccacagccacagccccagcagccactaccgctaccgcagcagcaacctggcccagcaggcccctgtgcggctgagctctgtgagcagccatgacagcggcttcatcagccaggatgccttccagagcaagagccccagccccatgcctcctgaggcccccaaccagaacagcagcagcagcgccagcagcgaggccagcgagacctgccagagcgtgtctgagtgcagcagccccacctctgtgagcagcggcagcaccatgggcgcctgggtgtccacagagaagctgagcaatggcttcagccactacagcctgagcagcgagagccacgtgggccccaccggggccggcctcttcccccactgcctgcctgccagccggctgctgccccgggtgacctctgtgcacctgcctgactatgcccactactacaccatcggccctggcatgttccccagcagccagatccccagctggaaggactgggccaagccaggcccctatgaccagcccctggtgaacaccctgcagaggaggaaggagaagcgggagccagaccccaacggcggcggccccaccacagccagcggccccccagctgctgctgaggaggcccagaggcccaggtccatgacagtgtctgctgccaccaggcctggagaggagatggaggcctgtgaggagctggccctggccctgagccggggcctgcagctggacacccagaggagcagccgggacagcctgcagtgcagcagcggctacagcacccagaccaccaccccctgctgcagcgaggacaccatccccagccaggtgtctgactatgactacttctctgtgtctggggaccaggaggccgaccagcaggagtttgacaagagcagcaccatccccaggaacagcgacatcagccagagctacagaaggatgttccaggccaagaggcctgccagcacagctggcctgcccaccaccctgggccctgccatggtgaccccaggagtggccaccatccggaggacccccagcaccaagcccagcgtgcggcggggcaccatcggggccggccccatccccatcaagacccctgtgattcctgtgaagacccccaccgtgcctgacctgcccggggtgctgcctgcccccccagatggccctgaggagcggggggagcacagccctgagagccccagcgtgggggagggcccccagggcgtgacctccatgcccagctccatgtggagcggccaggcctctgtgaacccccccctgcccggccccaagcccagcatccctgaggagcaccggcaggccatccctgagagcgaggccgaggaccaggagcgggagccccccagcgccaccgtgtccccaggccagatccctgagagtgaccctgctgacctgagcccccgggacaccccccagggcgaggacatgctgaatgccatccggcggggcgtgaagctgaagaagaccaccaccaatgacagaagtgccccccgcttctcctag

SEQ ID NO: 181968 - DNA, 2268 bp, Artificial Sequence
  derived and/or modified sequence
atggaggccgtgattgagaaggagtgcagcgccctgggcggcctcttccagaccatcatcagtgacatgaagggcagctaccctgtgtgggaggacttcatcaacaaggccggcaagctgcagagccagctgcggaccaccgtggtggccgccgccgccttcctggatgccttccagaaggtggccgacatggccaccaacacccggggcggcacccgggagatcggcagcgccctgaccaggatgtgcatgaggcacaggagcattgaggccaagctgcggcagttcagcagcgccctgattgactgcctgatcaaccccctgcaggagcagatggaggagtggaagaaggtggccaaccagctggacaaggaccacgccaaggagtacaagaaggcccggcaggagatcaagaagaagagcagtgacaccctgaagctgcagaagaaggccaagaagggccgcggggacatccagccccagctggacagcgccctgcaggatgtgaatgacaagtacctgctgctggaggagacagagaagcaggccgtgaggaaggccctgattgaggagcggggccgcttctgcaccttcatctccatgctgcggcctgtgattgaggaggagatctccatgctgggggagatcacccacctgcagaccatcagcgaggacctgaagagcctgaccatggacccccacaagctgcccagcagcagcgagcaggtgatcctggacctgaagggcagtgactacagctggagctaccagaccccacccagcagccccagcaccaccatgagcaggaagagctctgtgtgcagcagcctgaacagcgtgaacagcagtgacagccgcagcagcggcagccacagccacagccccagcagccactaccgctaccgcagcagcaacctggcccagcaggcccctgtgcggctgagctctgtgagcagccatgacagcggcttcatcagccaggatgccttccagagcaagagccccagccccatgcctcctgaggcccccaaccagctgagcaatggcttcagccactacagcctgagcagcgagagccacgtgggccccaccggggccggcctcttcccccactgcctgcctgccagccggctgctgccccgggtgacctctgtgcacctgcctgactatgcccactactacaccatcggccctggcatgttccccagcagccagatccccagctggaaggactgggccaagccaggcccctatgaccagcccctggtgaacaccctgcagaggaggaaggagaagcgggagccagaccccaacggcggcggccccaccacagccagcggccccccagctgctgctgaggaggcccagaggcccaggtccatgacagtgtctgctgccaccaggcctggagaggagatggaggcctgtgaggagctggccctggccctgagccggggcctgcagctggacacccagaggagcagccgggacagcctgcagtgcagcagcggctacagcacccagaccaccaccccctgctgcagcgaggacaccatccccagccaggtgtctgactatgactacttctctgtgtctggggaccaggaggccgaccagcaggagtttgacaagagcagcaccatccccaggaacagcgacatcagccagagctacagaaggatgttccaggccaagaggcctgccagcacagctggcctgcccaccaccctgggccctgccatggtgaccccaggagtggccaccatccggaggacccccagcaccaagcccagcgtgcggcggggcaccatcggggccggccccatccccatcaagacccctgtgattcctgtgaagacccccaccgtgcctgacctgcccggggtgctgcctgcccccccagatggccctgaggagcggggggagcacagccctgagagccccagcgtgggggagggcccccagggcgtgacctccatgcccagctccatgtggagcggccaggcctctgtgaacccccccctgcccggccccaagcccagcatccctgaggagcaccggcaggccatccctgagagcgaggccgaggaccaggagcgggagccccccagcgccaccgtgtccccaggccagatccctgagagtgaccctgctgacctgagcccccgggacaccccccagggcgaggacatgctgaatgccatccggcggggcgtgaagctgaagaagaccaccaccaatgacagaagtgccccccgcttctcctag

SEQ ID NO: 181969 - DNA, 1822 bp, Artificial Sequence
  derived and/or modified sequence
ctggtcgtatcagacgccaccctcttcccccagcaccaccatgtccagaaagtccagtgtctgcagcagcctgaacagtgtcaacagcagtgactcccggtccagcggctcccactcgcattcccccagctcacattaccgctaccgcagctccaacctggcccagcaggctcctgtgaggctgtccagcgtgtcctcccatgactcaggattcatatcccaggatgccttccagtccaagtcaccatcccccatgccgccagaggcccccaaccagaactcgtccagctcggcctcctccgaagcctcggaaacctgccagtcagtgagcgagtgcagctcccccacctctgtcagctcgggctccaccatgggtgcctgggtgtccacagagaagttgtctaacgggttttctcactatagtttatcaagtgagtcccacgtggggcccacgggtgcaggccttttccctcattgcctgcctgcctcccgcctgctccctcgggtcacctctgtccaccttccagactacgctcattattacaccattgggcccggcatgttcccgtcatctcagatccctagctggaaggactgggctaagcctgggccctatgaccagcctctggtgaacaccctgcagcgccgcaaagagaagcgagaaccggaccccaacgggggaggacccactaccgccagcggcccacctgcagcagctgaggaggctcagagaccacggagcatgactgtatcggctgccaccaggcctggtgaggagatggaggcttgtgaggagctggccctggccctgtctcggggcctgcagctggacacccagaggagcagccgggactcgcttcagtgctccagcggctacagcacccagacaaccaccccctgctgctctgaggacaccatcccttcccaagtttcagattatgattatttctctgtaagtggtgaccaggaggcagatcagcaggagttcgacaagtcctccaccattccaagaaacagcgacatcagccagtcctaccgacggatgttccaagccaagcgtccagcctcaactgctggcctccccaccaccctgggacctgctatggtcactccaggggttgcaactatccgacggaccccttccaccaagccttctgtccgccggggaaccattggagctggtcccatccccatcaagacacccgtgatccctgtcaagaccccaaccgtcccagacctcccaggggtgttgccagcccctccagatgggccagaagagcggggggagcacagccctgagtcgccatctgtgggtgagggcccccaaggtgtcaccagcatgccctcctcaatgtggagcggccaagcttccgttaaccctccacttccaggcccgaagcccagtatccctgaggagcacagacaggcaattccagaaagtgaagctgaagaccaggaacgggaacccccaagtgccactgtctccccaggccagattccagagagtgaccctgcagacctgagcccaagggatactccacaaggagaagacatgctgaacgccatccgaaggggcgtgaaactgaagaagaccacgacaaacgatcgctcagcccctcgcttttcttaggttcacaagaaatgcgccggtggggaatgaactgtttcattaataaaacctaatttgtcttgatccattccactctataataaaacaaaagattttgtaggcaactcggaatatagctcttttgaaagtactcgacacctttagataagaattaaaaccaacctatgtaactgacataatcttgatctttta

SEQ ID NO: 181970 - DNA, 4944 bp, Artificial Sequence
  derived and/or modified sequence
gcggccgcagctgcgagcaacagatccggacgccgcgagctgacccgctctgctgttgggcgatttttttttaattgcagaaaaatttattaaattggaaaatcttgcgtttttcaatggcgctggccccgggtcagcgggcgattttctctgcatcaagatgggctttgccgtttccgtagtgggcaccagtggtggcctgattgtcagtcttctcccggcatttttaaggccaggagccgagcgctgcttgtaggcgaataccctacagagcggtttggctttttaaattactgttattattttgggcagagaacagtcggtctggtgcaccccgtcctcgctgcagaagaggctgcgagtccgaggtgggtctctcggaaggtgaaattccttctggggtgagcgagccccggccccgcgcgcagtccagcggccccgcgtgtgtgccctcgccctgccggagccgggaaaatggaggctgtgattgagaaggaatgcagcgcgctcggaggcctcttccagaccatcatcagcgacatgaaggggagctatccagtttgggaagatttcataaacaaagcaggaaagctgcagtcccagcttcggacaacagtagtagcagcagctgccttcttggacgcctttcagaaagtggctgacatggccaccaacacacgtggtgggaccagggagattggatctgctctcaccaggatgtgcatgaggcacagaagcattgaagccaagctgaggcagttttcgagcgctttaattgattgtctgataaacccacttcaagaacagatggaagaatggaagaaagtggccaaccagctggataaagaccacgcaaaagaatataagaaagcccgccaagagataaaaaagaagtcctcggatacgctgaaactgcagaagaaagcaaaaaaagggagaggtgatatccagcctcagttggacagtgctctccaagatgtcaatgataagtatctcttattggaagaaacagaaaagcaggctgtccggaaggctttgattgaagaacgtggccgattctgtaccttcatctctatgctgcggccagtgattgaagaagaaatctcaatgctaggggaaataacccaccttcagaccatctcggaagatctaaaaagcctgaccatggaccctcacaaactgccctcctcaagtgaacaggtgattctggacttgaaaggttctgattacagctggtcgtatcagacgccaccctcttcccccagcaccaccatgtccagaaagtccagtgtctgcagcagcctgaacagtgtcaacagcagtgactcccggtccagcggctcccactcgcattcccccagctcacattaccgctaccgcagctccaacctggcccagcaggctcctgtgaggctgtccagcgtgtcctcccatgactcaggattcatatcccaggatgccttccagtccaagtcaccatcccccatgccgccagaggcccccaaccagttgtctaacgggttttctcactatagtttatcaagtgagtcccacgtggggcccacgggtgcaggccttttccctcattgcctgcctgcctcccgcctgctccctcgggtcacctctgtccaccttccagactacgctcattattacaccattgggcccggcatgttcccgtcatctcagatccctagctggaaggactgggctaagcctgggccctatgaccagcctctggtgaacaccctgcagcgccgcaaagagaagcgagaaccggaccccaacgggggaggacccactaccgccagcggcccacctgcagcagctgaggaggctcagagaccacggagcatgactgtatcggctgccaccaggcctggtgaggagatggaggcttgtgaggagctggccctggccctgtctcggggcctgcagctggacacccagaggagcagccgggactcgcttcagtgctccagcggctacagcacccagacaaccaccccctgctgctctgaggacaccatcccttcccaagtttcagattatgattatttctctgtaagtggtgaccaggaggcagatcagcaggagttcgacaagtcctccaccattccaagaaacagcgacatcagccagtcctaccgacggatgttccaagccaagcgtccagcctcaactgctggcctccccaccaccctgggacctgctatggtcactccaggggttgcaactatccgacggaccccttccaccaagccttctgtccgccggggaaccattggagctggtcccatccccatcaagacacccgtgatccctgtcaagaccccaaccgtcccagacctcccaggggtgttgccagcccctccagatgggccagaagagcggggggagcacagccctgagtcgccatctgtgggtgagggcccccaaggtgtcaccagcatgccctcctcaatgtggagcggccaagcttccgttaaccctccacttccaggcccgaagcccagtatccctgaggagcacagacaggcaattccagaaagtgaagctgaagaccaggaacgggaacccccaagtgccactgtctccccaggccagattccagagagtgaccctgcagacctgagcccaagggatactccacaaggagaagacatgctgaacgccatccgaaggggcgtgaaactgaagaagaccacgacaaacgatcgctcagcccctcgcttttcttaggttcacaagaaatgcgccggtggggaatgaactgtttcattaataaaacctaatttgtcttgatccattccactctataataaaacaaaagattttgtaggcaactcggaatatagctcttttgaaagtactcgacacctttagataagaattaaaaccaacctatgtaactgacataatcttgatcttttaatttgtaaatattgacaattttctttctgcacattttaatcttagtttcccttttgatttttctgaaggtgccaaattccatttaacttttttacaagtctttgtaaaattttaaatgcataaagggggttggggcaggggaaccacgaagtagttaattttagaaaaggatttactatacttcactcttctttttttttccccacaagcttttgtagatgcattgtagtagtctagcttagaagcaaatgcaagttattttaatgtacaaactaaatgggtaagaggtaaaatcttcatttaaatatactatgttctggatgaaaagagcaggagtaacaattgatgagcaatattcagagtgaagtaaatctggaaatggtagactgtgttgggattggggggagggccatgggaggggtacatcgtcaacatagccgatcctgttacatttaagagtagcctcgtaggttgaatttcttctggtagcttcatggtaaatgcatccgaataagccatactggattgcagtgtttgtttctgtagggtgtttaaggacttgacttcctttctcccatgattcctctggactgcacacagcacccacaaccagccccatgcatgctgctgcctctgggcagtcgtagaatctcccacttcagtttctcgttgattgtactcacctttatggaatccaaatacatccaaaagggtaaggcagttttaaaaatgtgaaaacatttaaaaatgataatagcagggaattcttagattatagtaaatgccttttacttaactgtgcccagcaggctgggtgcgttaaaaagcccaagtattttgaaaaaactcgaacagatttgacaagggtagccagcttggagtctagcaacttgccaatgtgtttaccaatctgggggcttgtttttcttttcttctttcaaataaatggcagttaactggctttacagtaaacattgaagagaggaggatttgtttattgtcactgggaatctgaccactatactgtcctttttttgtattctgggtaaatgttttttggaaaagatttgtcttttctaagtggaagttaaatttgttatactgcccatcccctaaagccaacagagatttgtagatttaaagggatcacatttgaagacaatagtgtttaagaaagcaagcaagtcccttagcagtcaggtcataacagggcacatttctgaccgaaccctctcaaggcagaggaggagtttggtgggtttcatacaccctgcagattcctgttggctctaaccctcaattacctaatcttatgctttaacacataactgcattggatgtgagagtaacgtaccgtatggtcattgttctatatattaacattgaacactgctgcgattgctcaaggacattttatgttacggctttaaagcaaaggcatgattattagaaactatttaagcttttttctttgaaaaacaagctccttttacagaatataaacaacagtagtgcctgtggtttagcccaccaatcttgatgactaaaagtagctgatgcattgtgcatatgatgcttgagatggtttttgcaaaagcagaaatcgctgcaaggtaatcacaatagataaaagtggtattttaaacctttgaaataaatggatgtaactgtaccttggtacagcttttcacttgtttagtttttaaacgttagtataatctgaataaataaaatgttgccaaattcaatgtagaaagaatgtgacaacacaccttgggtagttctgcttgtgtttttgcatattgtaaaagcagtgtcacagctaaaaagaaagaaatcgtttctaacagtaaattattgtgctttagttgctagtttgtactgagagttgacctctccctgtgcagttttttgttctaaacttgtataaataacaattgtgtaatgtgtctccctcctacattgtaacaattgcttcagcctacgttataaataaagaaccactagatt

SEQ ID NO: 181971 - DNA, 1590 bp, Artificial Sequence
  derived and/or modified sequence
atgagccggaagagcagcgtgtgcagcagcctgaacagcgtgaacagctccgatagccgctcatctggctctcacagtcactcgcccagctcacattataggtatcggagttcaaacttggcacagcaggccccggttcgcctctccagcgtttccagccatgatagcggcttcatatctcaggacgcatttcaaagcaagtcaccttctcctatgcctcctgaggcccctaatcagaactcctctagttctgcatcttctgaggcatccgagacttgtcagtccgtgagtgaatgttctagccctactagtgtatctagcgggtcaaccatgggggcatgggttagcacagagaagctgagcaatggattttctcactattccctgtcttccgaatcacacgtgggtcccactggcgcgggattattccctcactgtcttcctgctagtcgccttctgccacgagtcactagtgtgcacctccccgactatgcacattactacaccatcggcccaggcatgttccctagttcccagatccctagctggaaagattgggcaaaacccggaccttatgaccagcccctggtgaatacgctccaacgccgtaaggagaagcgcgaacctgaccctaacggtggaggacccacaactgcctctgggccaccagccgcagccgaagaagctcaaaggccccgcagtatgacagtgtccgccgccacccgcccaggcgaggagatggaagcatgcgaagaactggcccttgcactctcccgagggctacagctggatacccagcgctcctctcgggatagcctgcagtgcagctcaggctacagcacgcaaactacaacaccatgctgctccgaagacactattcccagtcaggtgagtgattatgactactttagcgtctcaggagatcaggaagcggaccagcaggaatttgacaagtctagcaccatcccccggaattccgacatttctcagagctacaggaggatgtttcaagctaaacggccagctagtaccgccggtctacctaccacgctggggccagcaatggtgacacctggcgtcgccaccatccgcagaacccccagcacaaagccatcggtgagacgaggcacaatcggcgcaggccctatccccattaagacccctgtgatccctgtgaaaactcccaccgtgccagatctgccaggcgttctacccgccccccctgacggcccggaggagaggggcgaacacagtcctgagtcacccagtgtgggggagggaccacagggcgtgacttcaatgccatcctctatgtggagcgggcaagcctctgtcaatcctcctctgccaggtcctaagccttccataccagaggaacacagacaggccatccctgaatccgaggcggaggatcaagaacgcgagcctccatccgcgaccgtctctcccggacaaatcccagagagcgacccggcagacctgtcccctagggataccccccaaggcgaggacatgctcaatgcaattcggaggggcgtcaaactgaagaaaaccactacaaatgacaggagtgccccacgtttttcctag

SEQ ID NO: 181972 - DNA, 2268 bp, Artificial Sequence
  derived and/or modified sequence
atggaggccgtgatcgagaaggagtgcagcgccctgggcggcctgtttcagaccattatctccgacatgaaaggtagttacccagtgtgggaagacttcattaacaaggccgggaagctgcaaagtcagctacggacaaccgtggtggcagccgctgcttttctcgacgcatttcaaaaggtggcagacatggctacaaacacgcgtggaggaacccgggagatcggctctgccctcacgagaatgtgtatgcgtcaccggtctatcgaagcgaagctgcgacaattctctagcgccctgatcgattgcctgatcaaccctctccaggaacaaatggaagagtggaaaaaggtcgcaaatcagctggataaggaccatgctaaagagtacaagaaggccagacaggaaatcaagaagaaatcttctgatacgcttaagttacagaagaaagcgaaaaagggtcggggtgatatacagccccaactggactccgccttacaggacgtgaatgacaagtacttgctgctcgaagagacggaaaagcaggcggttcgaaaagcattaatcgaggaacgtggccggttctgcacatttatttcaatgctgcggcccgtgatagaggaagaaattagcatgctgggtgaaatcacacacctccaaaccatttctgaagatcttaaatctctcaccatggacccacataagttgccatcctcctcggaacaagtaatcctagaccttaaaggaagtgattactcatggtcatatcaaacccctccaagcagcccctccactaccatgagccgaaagtcaagtgtgtgtagcagtctgaattctgtgaactctagtgactctcggagtagtgggtcacacagtcactcgccctcctctcattaccgctataggtcaagcaacctggcccagcaggctcccgttcgtctgagctctgtgtcaagtcatgattcaggctttattagccaagatgcctttcagagcaaaagtccctctcctatgccacccgaagctccaaaccaactctcgaacggcttctcacactactctctgtctagtgaatcccacgtgggtccgacaggggccggcctgttcccccactgcctgccagccagccgcctgttacccagggtgacttccgtccatctccccgattacgctcactactacactatcggtcctggaatgttccccagttcccaaatcccgtcatggaaggactgggccaagccgggcccctatgaccagccattagtcaatacactgcaaaggaggaaggagaagagagagccagatccgaatgggggtggacccaccaccgcttccgggccccccgcagcagccgaggaggcccagagaccaaggagtatgacggtgagcgccgctacccgccccggcgaagagatggaggcctgtgaggagctggcccttgcattaagccggggcttgcaactcgatacacagagatctagcagggactcactccagtgttctagtggctacagtacacagacaactactccttgttgttccgaagatactattccctcacaggtttccgattacgattacttctcagtgagcggggatcaagaggccgatcaacaggaatttgacaagtcttctaccatacctaggaattcagacatatctcagagttaccggcggatgttccaggcgaagcgtcctgcttccacggcaggcttgcccacaaccttggggccggcaatggtcacgccaggggtggcaaccattcgcaggaccccttccacaaagccttctgtgagaaggggcacaattggtgcgggacccatcccaataaagacaccggtaattcctgtgaagacaccaacagtgcctgacctacccggcgtgctccccgctcctcctgacggccccgaggaacggggagaacatagtcctgagagtccttctgttggggaaggaccgcagggcgtcacaagcatgccgtcatctatgtggtcaggccaagctagtgtgaatccccccttgcccggtccgaaaccgtccattccagaagaacaccggcaggccatcccagaatcagaagcagaagatcaggagagggaaccacccagcgccacagtttctcccggccagataccagagtcagaccctgccgacctttctcccagagacactccccagggggaggatatgctcaacgccataagacggggtgtgaaactcaagaaaaccacaactaacgaccgaagtgcgccgcgcttctcatag

SEQ ID NO: 181973 - DNA, 1590 bp, Artificial Sequence
  derived and/or modified sequence
atgtcaagaaaatctagcgtgtgctcatccctcaatagtgtgaatagcagtgacagccgatcaagtggcagccactcccactcgccctcgtcccattaccggtatcgcagcagtaacctcgcccagcaggctccggtacggctgtcttccgtgtcctcgcacgactccggctttatcagtcaggacgccttccagtctaagtcaccttctccaatgcctcctgaggccccaaaccaaaactcttcctcatctgcttcttctgaggcgtcagagacctgccaaagtgttagcgagtgttcaagccctaccagcgtctccagcggatctaccatgggagcttgggtgtccacagagaagttgtccaacggcttttcccattattcactgagcagcgagtctcatgtcggcccaactggggctggcctgtttccacactgtctgccagcatcgaggctgttgccacgggttacctcagtgcatcttccggactacgcacactattataccattggtcctggcatgttcccttcttctcagatcccaagctggaaagattgggcaaaacctggtccatacgaccagccgctagtgaataccctccagagaaggaaggaaaagagggaacctgacccaaatggcggaggaccaaccaccgccagcggtccccctgcagcagccgaggaggcccagcgacctagatcgatgacagtgagcgcagccacgagaccgggagaggaaatggaagcttgcgaggagctcgcactggccttgtcccgcggactgcagctggatacacagagaagctcccgcgactctctgcagtgctcctcaggctactctacacagaccaccactccttgttgttccgaggataccataccgtcccaggtttctgactacgactatttctcagtatcgggtgaccaggaggctgatcaacaggagtttgataaatcttctacaatcccacgcaattccgatatttctcagtcctaccggagaatgttccaagctaagaggccggcttctaccgctggactgcccacaaccctgggacctgcaatggtgacgcctggggtagccactatacgcagaacaccgagtacgaagcccagcgtgcggagaggaactattggagcaggaccaattccaatcaaaactcctgttattccagtcaaaacgccaacagtaccggacctccccggtgtgctcccagccccacccgacggccctgaagagagaggggagcacagcccagagagcccatcagtcggtgaggggcctcagggcgtgaccagcatgcctagcagcatgtggagcggacaggctagtgtcaatccacctctgcccggaccaaagccgtccattcccgaggagcatagacaggccattcccgagtctgaggccgaagaccaggagcgtgagcctccctccgcaaccgtcagcccaggtcagatccccgaaagcgaccccgcagacttaagccccagagatacaccccagggcgaagacatgttaaacgcgattcggcgaggagttaaactcaagaaaaccaccaccaacgaccgatcggcgcctcgttttagttag

SEQ ID NO: 181974 - DNA, 2268 bp, Artificial Sequence
  derived and/or modified sequence
atggaggcggtaatcgagaaggaatgtagtgcacttgggggtctgttccagaccatcatttccgacatgaagggtagttaccccgtctgggaagacttcatcaacaaggccggaaaattgcagtcgcagctccggacaaccgttgtcgctgccgcagcatttttggatgcctttcagaaagtggctgacatggcaaccaataccaggggcggtactcgcgagatcggaagtgctctgacgaggatgtgtatgcgacacaggagcattgaagcaaaactgaggcaattcagcagcgccctcatcgattgcctcatcaatccgcttcaggagcagatggaggagtggaagaaagtcgccaatcagctggacaaggatcatgctaaggagtacaaaaaagctcgacaggagatcaagaagaaaagtagcgatactctgaaattacagaaaaaagctaagaaggggcgaggcgatatccagccccagctcgacagtgctctgcaggatgtgaatgacaagtatctgctgctcgaggagacagaaaagcaagcggtgagaaaggctctgatcgaggaaagaggcagattctgcaccttcatctccatgctgcggcctgtcattgaggaagagatttccatgctgggggagatcacccatttacagaccatcagcgaggacctcaagtctcttactatggacccgcacaagctgccttcttcttccgaacaggtaattttagacctcaagggatcagactactcctggagttaccagacacctccctcttccccaagtacaacaatgtctaggaagtcctcggtttgttcttccctgaattccgttaattcttccgattcccggtcctcaggctcacattctcacagccctagcagccattatcgttacagatcatccaacttggcacagcaggccccagtccgcctcagttctgtctcttcccacgatagcggattcatttcccaagatgcgttccagtccaagtcccccagtcccatgcccccagaagcacccaatcagttatctaacgggtttagccattattccctttcttcagaatcgcatgttggccctactggcgctggcctgtttccccactgcctgccagcaagcaggttactgcctagagtgaccagcgtacatctgcctgattatgcccattactacaccatcggcccaggcatgttcccaagttcgcagattccctcttggaaggattgggcgaaacccggaccctatgatcagccactcgtgaataccctgcagcggcgtaaagaaaaaagggagcccgaccctaatggaggcggtcccactactgcctctggcccaccagccgcagccgaagaagctcagcgtccgcgtagcatgaccgtctctgccgcaaccagaccgggtgaggagatggaagcttgtgaggaattagccctagcgttgtcgcggggtctgcagttagatactcagagaagttcccgagactctctgcaatgcagctccggatattcgacccagacgacaactccctgctgctcagaggacacaatcccatctcaggtgtcagactacgattacttcagtgtgagcggcgaccaggaggccgatcagcaggagtttgataagagcagtactatcccgaggaattcggatatttcccagtcttacaggagaatgttccaagcaaagcgaccggcatctaccgccggacttccaaccactctggggcctgctatggtgaccccaggagtcgctacaatcaggcggactccatcgaccaaacccagtgtcaggagaggcacaatcggcgctggaccaattcccatcaagactcccgtcattcccgtgaaaacgcccacagtccctgacctccccggtgtgctgcctgctcctcctgatgggcctgaagaacgcggagagcacagtccggaatcaccatccgtgggcgagggacctcagggggtgacctccatgcccagcagcatgtggagcggacaagcctctgttaatcccccattaccaggacctaagccttccattcccgaggaacaccgccaggcaattcccgaatcagaagctgaggatcaggaacgcgagcctcccagtgctacagtgtcacccggtcagatcccagaatccgaccccgctgacctgagtcccagggatactcctcagggcgaggacatgctcaacgccattcgacggggtgtgaaactgaaaaagactaccacaaatgatcgatccgcgcctcgattctcctag

SEQ ID NO: 181975 - protein, 1282 aa, Artificial Sequence
  derived and/or modified sequence
MEAKDQKKHRKKNSGPKAAKKKKRLLQDLQLGDEEDARKRNPKAFAVQSAVRMARSFHRTQDLKTKKHHIPVVDRTPLEPPPIVVVVMGPPKVGKSTLIQCLIRNFTRQKLTEIRGPVTIVSGKKRRLTIIECGCDINMMIDLAKVADLVLMLIDASFGFEMETFEFLNICQVHGFPKIMGVLTHLDSFKHNKQLKKTKKRLKHRFWTEVYPGAKLFYLSGMVHGEYQNQEIHNLGRFITVMKFRPLTWQTSHPYILADRMEDLTNPEDIRTNIKCDRKVSLYGYLRGAHLKNKSQIHMPGVGDFAVSDISFLPDPCALPEQQKKRCLNEKEKLVYAPLSGVGGVLYDKDAVYVDLGGSHVFQDEVGPTHELVQSLISTHSTIDAKMASSRVTLFSDSKPLGSEDIDNQGLMMPKEEKQMDLNTGRMRRKAIFGDEDESGDSDDEEDDEMSEDDGLENGSSDEEAEEEENAEMTDQYMAVKGIKRRKLELEEDSEMDLPAFADSDDDLERSSAEEGEAEEADESSEEEDCTAGEKGISGSKAAGEGSKAGLSPANCQSDRVNLEKSLLMKKAALPTFDSGHCTAEEVFASEDESEESSSLSAEEEDSENEEAIRKKLSKPSQVSSGQKLGPQNFIDETSDIENLLKEEEDYKEENNDSKETSGALKWKEDLSRKAAEAFLRQQQAAPNLRKLIYGTVTEDNEEEDDDTLEELGGLFRVNQPDRECKHKADSLDCSRFLVEAPHDWDLEEVMNSIRDCFVTGKWEDDKDAAKVLAEDEELYGDFEDLETGDVHKGKSGPNTQNEDIEKEVKEEIDPDEEESAKKKHLDKKRKLKEMFDAEYDEGESTYFDDLKGEMQKQAQLNRAEFEDQDDEARVQYEGFRPGMYVRIEIENVPCEFVQNFDPHYPIILGGLGNSEGNVGYVQMRLKKHRWYKKILKSRDPIIFSVGWRRFQTIPLYYIEDHNGRQRLLKYTPQHMHCGAAFWGPITPQGTGFLAIQSVSGIMPDFRIAATGVVLDLDKSIKIVKKLKLTGFPYKIFKNTSFIKGMFNSALEVAKFEGAVIRTVSGIRGQIKKALRAPEGAFRASFEDKLLMSDIVFMRTWYPVSIPAFYNPVTSLLKPVGEKDTWSGMRTTGQLRLAHGVRLKANKDSLYKPILRQKKHFNSLHIPKALQKALPFKNKPKTQAKAGKVPKDRRRPAVIREPHERKILALLDALSTVHSQKMKKAKEQRHLHNKEHFRAKQKEEEEKLKRQKDLRKKLFRIQGQKERRNQKSSLKGAEGQLQ

SEQ ID NO: 181976 - DNA, 3849 bp, Artificial Sequence
  derived and/or modified sequence
atggaagccaaggatcagaaaaagcatcggaagaagaatagcggacctaaagccgccaaaaagaagaagcgcctccttcaggatctgcagctgggagacgaagaggatgcaagaaagcgaaaccctaaggcctttgccgttcaaagcgccgttcgcatggctagaagttttcatcgaacccaggatttgaagacaaagaagcatcatatccccgttgtggatcgaacccccctggaaccccctcccattgtggtcgtggtcatggggcctcctaaggttggcaagtcgactcttatccagtgtctgatccgaaatttcacacggcagaagcttacagagataagaggacccgtgactatcgtcagtggtaagaagaggcgattgaccataatcgagtgcggttgtgacattaatatgatgatcgacctggccaaggtcgcagatcttgtgctgatgttaatcgacgcttccttcggttttgaaatggaaaccttcgaatttctgaatatctgccaggtccacgggtttcctaagatcatgggggtgttgacccacctcgactcgtttaagcacaacaaacagctcaaaaagacaaaaaagcgcttgaagcatcggttctggacagaggtgtatcctggggcaaagctgttttacctgtccggcatggtccatggagagtaccaaaaccaggaaattcacaatctgggccggtttataacggtcatgaaatttagacctttgacttggcagacaagtcacccttatatattagcagatcgaatggaggatttaacaaacccagaggacatacggactaatatcaaatgcgatcgcaaggtgtccctgtacgggtacctgcggggggctcacttgaaaaataagtcacagattcacatgcccggtgtgggtgatttcgctgtgtccgacataagcttcctcccagatccttgtgccctccctgagcaacagaaaaagcgttgtctgaatgaaaaagagaaactcgtgtatgctcccctgtctggcgtgggcggagtcctgtacgataaggatgccgtctatgttgatctcggtgggtctcatgtgttccaggacgaggtggggccaactcacgagctcgtacagtctctgattagtacgcactccactattgatgccaagatggcatcttctcgggttactctgttctccgatagcaaaccactcggcagcgaggacatcgacaatcaagggctgatgatgcctaaggaggagaagcaaatggatctcaacacggggcggatgagacggaaggccatttttggtgacgaggacgagagcggggattctgacgacgaagaggacgatgaaatgtcagaagatgatgggctggagaatggttcaagcgacgaagaggctgaagaagaggaaaacgctgagatgactgatcaatatatggccgtgaagggaatcaaaaggaggaaactggagttagaggaggactcagaaatggatctgccggccttcgccgacagcgacgacgatcttgagaggtcgtccgccgaagaaggcgaagccgaggaagcggatgagtctagtgaggaggaagattgtaccgcgggtgagaaaggcatcagcggatcaaaagccgcgggggagggttcaaaggcaggattaagccctgcaaattgccagagcgatcgtgtcaaccttgagaagagcctcctgatgaaaaaggctgccctgcctactttcgatagcggccattgcacagcggaggaagtatttgcctcagaggacgagtccgaggagtcctcgagcctgagcgctgaggaggaggattcagagaacgaagaagcaattaggaaaaaattaagtaaaccgagccaggtctcctccggtcaaaagttgggaccccagaactttattgacgagacatctgatatagagaatcttcttaaggaggaagaagactacaaggaagagaacaatgacagcaaggagactagcggcgctcttaaatggaaagaggacttgtcaagaaaggccgcagaggcctttctcaggcagcagcaggccgctcccaacctgcgcaaattaatctacgggacagttaccgaggacaacgaagaagaggacgatgacacgctcgaagaactggggggcctatttcgggtgaatcagcccgaccgggaatgcaaacacaaggcagatagcctcgactgcagccggtttctcgtggaagctccacatgattgggatctggaagaggtgatgaatagcatcagagactgctttgtgaccgggaaatgggaggacgataaagatgccgccaaggtgttggccgaggacgaagaactgtacggcgacttcgaggacctggagactggtgacgtgcataagggaaaatctgggccaaatacccagaacgaagatatcgaaaaagaagtgaaggaggagattgatcccgatgaagaagagtccgccaagaaaaagcacctggataaaaagagaaagctcaaggagatgtttgatgccgaatacgatgagggagaaagtacatatttcgacgatctcaaaggagaaatgcagaagcaagcccagttgaaccgagccgagtttgaggatcaggacgatgaggccagagtgcaatacgagggtttcaggcccggcatgtacgtccgtatcgagattgagaacgttccgtgcgagttcgtacaaaactttgacccacactatcccataattcttggcggcctgggtaatagcgaaggcaacgtcggctatgttcagatgcgccttaagaaacacaggtggtacaagaagatccttaagtctcgcgatcccatcatcttttcggtcggctggagacgattccagaccattccactttactacatcgaagatcataacggacgacagaggctgctgaagtacaccccccaacatatgcattgtggagccgcattttggggaccaattacaccacagggcaccgggttcctggccatacaaagcgtgtcgggtataatgcccgacttccgcatcgctgccaccggcgtggttctggacctggataaaagcattaaaattgtcaaaaaactcaagctgacaggcttcccatataagatatttaaaaatacttccttcataaaaggaatgttcaattcagctctcgaagtcgcaaagttcgagggagccgtgataagaacagtgtcaggaattagaggccaaattaagaaagcgctgagagcaccagagggggcattccgggcttccttcgaggacaaattgctcatgtcagacatcgtcttcatgcgcacatggtaccctgtgagcattcccgcattttacaatcccgtcactagcctgctgaaaccagtgggggagaaagatacctggagcgggatgcgtaccacaggtcaactgcgattagctcacggggtacggttaaaggcgaacaaagattcattatacaagcccatattgcgccagaagaagcatttcaactctctgcatattccaaaagccctgcagaaagccttgccattcaaaaataaacccaagactcaggccaaggccgggaaggtgccgaaagacaggcgtagaccagccgtaatccgcgaaccccatgagagaaagattctcgcactgttagacgctttgtccaccgtccacagtcagaagatgaagaaagcgaaagagcagcggcacctccacaacaaggagcatttcagggccaagcagaaagaggaagaggagaaactgaagcggcagaaggatttacggaagaaactattcaggatccaaggtcagaaggaacggcgtaaccagaagtcttctctgaaaggggccgaggggcaactgcaatag

SEQ ID NO: 181977 - DNA, 3849 bp, Artificial Sequence
  derived and/or modified sequence
atggaggccaaggaccagaagaagcacaggaagaagaacagcggccccaaggccgccaagaagaagaagaggctgctgcaggacctgcagctgggagatgaagaagatgccaggaagaggaaccccaaggcctttgctgtgcagagcgctgtgaggatggcccggagcttccacaggacccaggacctgaagaccaagaagcaccacatccctgtggtggacaggacccccctggagcccccacccatcgtggtggtggtgatgggcccccccaaggtgggcaagagcaccctcatccagtgcctgatccggaacttcacccggcagaagctgacagagatccggggccctgtgaccatcgtgtctgggaagaagaggcggctgaccatcattgaatgtggctgtgacatcaacatgatgattgacctggccaaggtggccgacctggtgctgatgctgattgatgccagctttggatttgagatggagacctttgagttcctgaacatctgccaggtgcacggcttccccaagatcatgggcgtgctgacccacctggacagcttcaagcacaacaagcagctgaagaagaccaagaagaggctgaagcaccgcttctggacagaggtgtacccaggggccaagctgttctacctgagcggcatggtgcacggggagtaccagaaccaggagatccacaacctgggccgcttcatcaccgtgatgaagttccggcccctgacctggcagaccagccacccctacatcctggccgacaggatggaggacctgaccaaccctgaggacatccgcaccaacatcaagtgtgacaggaaggtgtccctgtatggctacctgcggggggcccacctgaagaacaagagccagatccacatgcctggggtgggggactttgctgtgtctgacatctccttcctgcctgacccctgtgccctgcctgagcagcagaagaagcgctgcctgaatgagaaggagaagctggtgtatgcccccctgagcggcgtgggcggcgtgctgtatgacaaggatgctgtgtatgtggacctgggcggcagccacgtgttccaggatgaggtgggccccacccatgagctggtgcagagcctcatcagcacccacagcaccattgatgccaagatggccagcagccgggtgaccctcttcagtgacagcaagcccctgggcagcgaggacatcgacaaccagggcctgatgatgcccaaggaggagaagcagatggacctgaacacaggccgcatgaggaggaaggccatctttggagatgaagatgaaagtggggacagtgatgatgaggaggatgatgagatgtctgaagatgatggcctggagaatggcagcagtgatgaggaggccgaggaggaggagaatgctgagatgacagaccagtacatggctgtgaagggcatcaagaggaggaagctggagctggaggaggacagcgagatggacctgcctgcctttgctgacagtgatgatgacctggagaggagcagcgctgaggagggggaggccgaggaggctgatgagagcagcgaggaggaggactgcacagctggggagaagggcatcagcggcagcaaggctgctggggagggcagcaaggccggcctgagccctgccaactgccagagcgacagagtgaacctggagaagagcctgctgatgaagaaggccgccctgcccacctttgattctggccactgcacagctgaggaggtgtttgcctctgaagatgagagcgaggagagcagcagcctgtctgctgaggaggaggacagtgaaaatgaggaggccatcaggaagaagctgagcaagcccagccaggtgagcagcggccagaagctgggcccccagaacttcattgatgagaccagtgacatcgagaacctgctgaaggaggaggaggactacaaggaggagaacaatgacagcaaggagaccagcggggccctgaagtggaaggaggacctgagcaggaaggctgctgaggccttcctgcggcagcagcaggccgcccccaacctgaggaagctgatctacggcaccgtgacagaagataatgaggaggaggatgatgacaccctggaggagctgggcggcctcttccgggtgaaccagcctgaccgggagtgcaagcacaaggctgacagcctggactgcagccgcttcctggtggaggcccctcatgactgggacctggaggaggtgatgaacagcatccgggactgctttgtgacaggcaagtgggaggatgacaaggatgctgccaaggtgctggctgaagatgaggagctgtatggagactttgaggacctggagactggagatgtgcacaagggcaagagcggccccaacacccagaatgaagatattgagaaggaggtgaaggaggagattgatcctgatgaggaggagagcgccaagaagaagcacctggacaagaagaggaagctgaaggagatgtttgatgctgaatatgatgaaggagagagcacctactttgatgacctgaagggggagatgcagaagcaggcccagctgaacagagctgagtttgaggaccaggatgatgaggcccgggtgcagtatgagggcttccggcccggcatgtatgtgcgcatcgagattgaaaatgtgccctgtgaatttgtgcagaactttgacccccactaccccatcatcctgggcggcctgggcaacagcgagggcaatgtgggctacgtgcagatgaggctgaagaagcaccgctggtacaagaagatcctgaagagccgggaccccatcatcttctctgtgggctggaggcgcttccagaccatccccctgtactacatcgaggaccacaacggccggcagaggctgctgaagtacaccccccagcacatgcactgtggggccgccttctggggccccatcaccccccagggcaccggcttcctggccatccagagcgtgtctggcatcatgccagacttcagaattgctgccactggagtggtgctggacctggacaagagcatcaagatcgtgaagaagctgaagctgaccggcttcccctacaagatcttcaagaacaccagcttcatcaagggcatgttcaacagcgccctggaggtggccaagtttgagggcgctgtgatcagaacagtgtctggcatccggggccagatcaagaaggccctgcgggcccctgagggcgccttccgggccagctttgaggacaagctgctgatgtctgacatcgtgttcatgaggacctggtaccctgtgtccatcccagccttctacaaccctgtgaccagcctgctgaagcctgtgggggagaaggacacctggagcggcatgaggaccaccggccagctgcggctggcccatggagtgcggctgaaggccaacaaggacagcctgtacaagcccatcctgcggcagaagaagcacttcaacagcctgcacatccccaaggccctgcagaaggccctgcccttcaagaacaagcccaagacccaggccaaggccggcaaggtgcccaaggacagaagaagacctgctgtgatccgggagccccatgagaggaagatcctggccctgctggatgccctgagcacagtgcacagccagaagatgaagaaggccaaggagcagaggcacctgcacaacaaggagcacttccgggccaagcagaaggaggaggaggagaagctgaagaggcagaaggacctgaggaagaagctgttccgcatccagggccagaaggagaggaggaaccagaagagcagcctgaagggagctgagggccagctgcagtag

SEQ ID NO: 181978 - DNA, 3849 bp, Artificial Sequence
  derived and/or modified sequence
atggaggccaaggaccagaagaagcaccggaagaagaacagcggcccaaaggccgccaagaagaagaaacgcctgctccaggacttgcagctgggggacgaggaagacgcaaggaaaaggaatcccaaggctttcgcggtgcaatcagcagtccggatggccaggtcattccatcgaacccaggatctaaagacgaagaagcatcatattcccgtagtcgataggaccccactggagcctcccccaattgtggtcgtcgtgatggggccaccaaaggtgggcaaaagtacactaattcagtgcttgattcgcaatttcactaggcagaagctcaccgagattcgagggccagtgactattgtgagcggcaagaagagacgattgactattatagagtgcggctgtgatatcaatatgatgatcgatttagcaaaagtggccgacttagtgcttatgcttattgacgcgtcctttgggttcgaaatggaaacgtttgagtttctgaacatctgtcaggtgcatgggtttcccaagattatgggggtgcttacccacttggacagctttaaacacaataagcagttgaaaaagacaaaaaagagattaaaacaccgcttctggaccgaggtctaccccggagcaaagctattttatttgtccggcatggtgcatggtgagtaccagaatcaagagatccataacctaggacggttcataaccgtgatgaagttcaggcctttgacgtggcaaactagtcacccatatattttagctgatcggatggaagacctgacaaaccccgaggacatccgcacaaacattaagtgtgatagaaaagtgtcgctttatggctatttgcgcggcgcacacctcaaaaacaaatcccaaatacatatgccaggcgttggcgacttcgctgtcagtgacatctcgttcctgcctgacccctgcgctctgcctgagcagcagaagaaaaggtgtctgaatgagaaggagaaattggtctacgctcccctttcaggggttggcggagtgctctacgataaagacgcagtgtacgtggacctgggtggatcccacgtattccaggatgaggtaggcccgactcatgaactcgtgcaatccctgattagcacacatagtactattgatgccaaaatggcatcctcaagagtgaccctctttagcgactccaaacctctggggtctgaagacatcgacaaccagggcctgatgatgcccaaggaggagaagcagatggacctgaacacaggtagaatgcgccggaaagccatcttcggtgatgaggacgagagtggggacagcgatgacgaggaagacgacgagatgtccgaggatgatggtctggaaaacggaagctcagatgaagaggccgaagaggaggaaaacgctgagatgaccgaccagtacatggccgtgaagggcattaagcgaaggaagcttgaactcgaggaggattctgaaatggacctgcccgcattcgccgattccgatgacgacttggagaggagtagcgccgaggagggggaggctgaggaggccgatgagagctcagaagaagaagattgtacggccggagagaagggcatctctgggtcaaaggctgccggcgagggctctaaggccgggttgagtcccgctaattgccagtcagatcgggtgaacctagagaagagcttactgatgaagaaggctgcacttcccacattcgattcgggccactgcacggcggaagaagtcttcgcttctgaagacgagtcagaggagtcctccagtttatcggctgaagaggaggattctgagaatgaagaagccattcgcaagaagctctctaagccttcccaggtcagctcgggtcaaaagctgggaccgcagaattttatagacgagaccagcgatatcgagaatttgctcaaggaggaggaagactacaaggaagagaataacgactctaaagaaacttctggggcacttaagtggaaggaagatctgtcccggaaggccgcagaagcgtttctaaggcagcagcaggcagccccaaacctccggaagctaatctatgggacggtcactgaagacaatgaggaggaggatgacgatacgttagaggaactgggcggcctattccgcgtgaatcaacccgaccgcgaatgcaagcataaggccgacagcctggactgtagcaggtttctcgtggaagccccgcacgactgggatctagaagaagttatgaattccatccgagattgctttgtgacaggcaagtgggaggatgacaaggacgccgcaaaagttcttgcagaggatgaggaactgtatggggactttgaggatctcgaaactggcgacgtccacaagggaaaaagcggccccaatacccagaacgaggacattgaaaaggaggtcaaagaggagatagatccagatgaagaggaaagcgctaaaaaaaaacacctcgacaagaaaagaaagctgaaagaaatgtttgatgccgagtatgacgaaggtgaaagcacctatttcgacgatcttaagggggagatgcagaaacaggcccagcttaaccgcgcagagtttgaagaccaggacgatgaagcgcgcgtgcagtatgaaggattcaggccagggatgtatgtgcgtatcgagatcgagaacgtcccctgcgagtttgtccagaacttcgatccacattatcccatcattctggggggcctgggaaatagcgaaggaaatgtcgggtacgtgcagatgcgactgaagaaacatcgttggtacaaaaagattcttaaaagcagagaccccattatattctctgtggggtggcgccgattccagacaatcccgctctactacatagaggatcataacgggcggcagaggctgctgaagtatacaccacagcatatgcactgcggggctgctttttgggggccaatcacaccacaagggacaggctttctggccatacaatccgtatcagggataatgccggacttcagaattgctgctacaggggtggtgctggacttggacaagagtatcaagatcgtgaaaaagctgaaactgaccgggttcccgtacaagattttcaagaatacgagtttcatcaagggaatgtttaattctgctctcgaggtggcgaagtttgaaggagcggtgattcggaccgtgagtggaattcgtggccaaatcaaaaaagctctcagagcgcctgagggagcgttcagagcaagttttgaggacaagctgctgatgagcgatatagtattcatgcgcacttggtaccccgtcagtattcctgccttctacaatccagtgacttctctgctcaagccagttggggagaaagatacttggagcgggatgcggacaacaggtcaattgcgtctggcccatggagtccggcttaaggcaaacaaggatagcctgtataagcccattcttcgtcagaagaaacatttcaacagcctccatataccaaaagcactccagaaagcgttgccttttaagaacaaacctaaaacccaggcgaaggcaggaaaggtgccaaaggacagaagacgaccagccgtcatccgagagccacatgaacgcaagattcttgccctccttgacgcgctatcgacagtacattcccaaaaaatgaagaaagcaaaggagcaacgccatttgcacaataaggaacactttcgtgctaagcagaaagaagaagaggagaaactcaagcggcagaaggatcttaggaagaaacttttccggatccagggccagaaagagcggagaaatcagaagtcctcactgaagggcgcggagggccaactccagtag

SEQ ID NO: 181979 - DNA, 3849 bp, Artificial Sequence
  derived and/or modified sequence
atggaagctaaggaccagaagaagcaccgcaaaaaaaattctggtcccaaggccgctaagaagaaaaaaaggctccttcaagacctgcagctaggcgacgaggaagacgctcgcaagcgcaatccaaaggctttcgccgtgcagagtgctgttcgtatggccaggagcttccaccgcacccaggacctgaagactaaaaaacaccacatccctgtagtggaccgtacccctttagaacctccaccaattgttgtggtggttatgggccctccaaaggttggcaagagtaccttaattcagtgcctgataagaaacttcacacgacagaaacttacagagatcagagggccagtgaccatcgtgtccggcaaaaagaggcggcttaccattatagagtgtggctgtgatataaatatgatgatcgatctcgcaaaagtcgcagacctcgttctgatgctgattgacgctagctttggctttgagatggagacgttcgaatttttgaatatctgtcaggtgcacggcttcccgaagatcatgggagtcctgacacacctggactcattcaagcataacaaacaattgaagaaaactaagaagcggttaaagcacagattctggacagaagtgtacccaggtgccaaactgttttacctgtcagggatggtgcatggtgaataccagaatcaagagatccacaacctcgggcgatttattactgttatgaaattcagacctctcacatggcaaacctcacacccatatatcttggccgataggatggaggatctcaccaatcccgaagacatacggacaaacattaaatgtgatcgcaaggtctccctgtatggatatctcagaggtgcccatttaaagaataaatcccagatccacatgcccggtgttggagacttcgcagtttccgacatctctttccttcctgatccatgcgccctgcccgagcagcagaaaaaaagatgcctcaatgaaaaggagaaactggtctacgcccctctgagcggagtgggtggagttttatacgacaaggacgcagtttacgtcgacttgggcggaagccacgtatttcaggacgaggttgggccaacccacgaactggtgcagtctctcattagtacacatagtacgattgatgctaaaatggccagcagtagggtgacactcttctccgattcgaaacctctggggtccgaagatatcgataaccaaggcctgatgatgcctaaggaagagaaacagatggatctcaacaccggtaggatgcggcgtaaggccatctttggggacgaagacgagtccggcgactcagacgatgaagaggacgatgagatgtcagaggatgacggcctcgagaacggaagttctgatgaggaggccgaggaagaagaaaacgcagaaatgacagaccagtatatggccgttaagggcattaagaggcgcaaattggagttggaggaagattcagagatggatcttccagcttttgccgattcagatgatgacttggaacgttcttcagccgaagaaggggaggcagaggaggctgacgaaagcagcgaggaagaagattgtaccgctggtgaaaaaggcatcagcggttccaaggcagccggagagggttccaaagcaggcctgtcacccgctaattgccagtcagatcgagtcaacctggaaaagtctttgctgatgaaaaaagcggctctgcccacttttgacagtggacattgcacagcggaggaagtcttcgccagcgaggatgagagtgaagagtcatcttcactgtcggccgaggaggaagattctgagaatgaggaagccataagaaaaaaattgtctaaaccatcccaggtgtcctcaggtcagaagctgggccctcagaattttattgacgaaacctcagatattgaaaatctgctgaaagaggaggaagattataaagaggaaaacaacgactctaaggaaacctctggcgctttgaagtggaaagaagatttgtcacggaaggcagccgaagcctttctgcgtcagcagcaggccgctcccaacctccggaagcttatatacgggaccgtcacagaggataatgaagaggaggacgatgatactctcgaggagcttgggggtctgttccgggtgaatcagccagacagggagtgtaagcataaggctgatagcctggattgcagcaggttcctcgttgaagccccacatgactgggacctggaagaggtgatgaacagtatcagagattgctttgtcactggcaaatgggaagatgacaaagacgctgccaaggtgctggctgaagatgaagagctttacggagactttgaggatctggagactggagatgtccataaaggcaaatcagggccaaacacccagaacgaggatatcgagaaagaagtcaaggaggagatcgatcctgacgaggaggaaagcgcgaaaaaaaaacacctggataaaaaacgcaagctgaaggaaatgtttgatgctgaatatgatgagggtgaaagcacctactttgatgacctgaagggagaaatgcagaaacaggctcagttaaaccgggctgaatttgaggatcaggatgatgaagcccgtgtgcagtacgagggcttcagacccggaatgtatgtgagaatcgagatcgagaacgtgccctgcgagtttgtccagaactttgatccccactatccgatcatcctggggggactcggtaacagtgagggtaacgttggttatgtgcaaatgagacttaagaaacaccggtggtataaaaagattctgaagagccgagaccctataattttcagtgtcggctggagacggttccagactatcccactttattacatagaagaccataacgggcgtcagagactgttaaagtacacaccacagcacatgcactgcggtgcagcgttttggggaccgattacaccacagggaaccgggtttctggcaatccaatcagtgtcagggattatgccggatttcagaatcgcagctaccggggtggtgctagatctagacaagtcaatcaagatagtgaagaagttaaagctgacagggttcccatacaagatatttaagaatacttccttcatcaaaggcatgttcaattctgcactggaagttgcaaaattcgaaggcgcagtcatcagaacagtgtctggaattagagggcagatcaagaaggccctgagagctccagaaggcgcatttcgagcatcttttgaagacaaactgctcatgtcggatattgtcttcatgcgcacctggtatccagtgagtatcccagctttctacaatccggtaacctccctgttaaaaccagtcggcgaaaaggacacatggagcggcatgcgtacgacaggacagctgcggcttgcccacggcgtgagattaaaggctaataaggattctctgtataaacccatcctacgccagaaaaaacacttcaatagtctccacatccctaaggcattgcaaaaagctctgccattcaagaacaaaccgaagactcaggccaaagctggaaaggtacccaaggatcgtagacggcctgctgtgatacgcgaacctcatgagcggaagatactggcactgctggatgccttaagtacagtacattctcagaagatgaaaaaggccaaggagcagaggcacctccacaataaagagcacttcagagccaagcagaaagaagaggaggagaaactgaagcgacaaaaggacctccggaagaagctgttccgtatccagggccagaaagaacgaagaaatcagaaatcttccctgaaaggcgcagaaggtcaactgcaatag

SEQ ID NO: 181980 - DNA, 4224 bp, Artificial Sequence
  derived and/or modified sequence
gctgacctgaggagtcgcggctgcgagcaggttagagttacttgttattggtaaatagccactatggaggctaaggaccagaagaaacacagaaagaaaaacagtggacccaaagctgcaaagaaaaagaagcggcttctgcaggatctccagctaggagacgaagaagatgcccggaagagaaatcccaaagcttttgcagttcagtctgctgtgcggatggctcgatcctttcacaggactcaggatttgaagacaaaaaagcatcatattccagtggttgatcgaactccactagagcccccaccaatagtggtagtggtgatgggacctccaaaagttggaaagagcactttgatacaatgcctcattcggaactttacccggcagaagttgactgagatcagaggccctgtgacgattgtgtcaggtaaaaagcgcagactcaccattattgaatgtgggtgtgacattaacatgatgattgatctggctaaagtagcagatctggtactgatgcttatagatgccagctttgggtttgaaatggaaacgtttgagtttctaaacatctgtcaagtacatggctttcctaaaattatgggagttctcacccacctcgactccttcaagcataataagcaactgaagaagacaaagaagcgattaaaacacaggttctggacggaagtttacccgggtgccaagctgttctacctttctggaatggtgcatggagaatatcaaaaccaagaaatccacaatctgggccgttttattacagttatgaagtttaggcctctcacatggcaaacttctcacccttatatcctggcagacaggatggaagatttgacaaacccagaggatatccgaacaaacatcaaatgtgaccggaaggtgtcactttatggttatttaagaggagcacacttgaaaaataaaagccaaattcacatgccaggggtaggagattttgccgtgagtgacatcagtttcctcccagacccttgcgctcttcctgaacaacaaaagaagcgctgtttaaatgagaaggagaagctggtttatgcgcctctttctggagttgggggtgtgctgtatgacaaagacgctgtctatgttgaccttggtggcagccacgtttttcaggatgaagtggggcccacccatgagctggtccagagtctcatctctacccactccaccattgatgccaagatggcttcaagtcgagtgacgctgttttctgattccaagccacttgggtcagaggatatagataatcaagggctaatgatgccaaaggaggaaaaacaaatggacttgaacactggtcgaatgcgtcggaaagccattttcggagatgaagatgaatctggagatagtgatgatgaagaagatgatgaaatgtctgaagatgacgggttggaaaacggctctagtgatgaggaagcagaagaggaggaaaatgctgagatgactgatcagtatatggctgttaagggcatcaaacgacggaaacttgagttggaagaagacagtgaaatggatttgccagcatttgctgacagtgacgatgaccttgagaggagctcagcggaagaaggggaagcggaggaagctgatgaaagcagtgaagaagaggactgcactgcaggagagaagggcatttcaggatcaaaggctgctggagaaggtagtaaagcagggctgtcaccagctaattgccagagtgaccgtgtgaatctggagaagtctttgctgatgaagaaagcagctctccccactttcgattctgggcattgcacagctgaagaggtgtttgcatctgaagatgaatctgaagaaagctcctcactcagtgcagaggaagaagactcagaaaatgaagaggctattagaaaaaagctttcaaagccttctcaagtgagcagtggtcagaaactggggccacagaacttcattgatgagaccagtgatatagaaaatttactcaaagaggaagaagattacaaggaagaaaataatgattccaaagaaacgtcaggtgccctcaagtggaaggaagacctttccagaaaggcagctgaggcctttctgaggcagcagcaagcagctccaaacctccgaaagcttatttatgggacagtgacagaagataatgaagaagaagatgatgatactctagaagagcttggagggttgtttcgtgtcaaccagcctgacagagagtgtaagcacaaggctgactctttggactgctccagatttcttgtggaggccccccatgactgggatttagaggaggttatgaacagtatcagagattgcttcgtgactggaaagtgggaagatgataaagatgcagccaaggtcttagcagaagatgaggagctctacggtgactttgaagacttggaaacaggggacgtgcacaagggaaaatcaggccccaatactcagaatgaagatatagagaaagaagttaaggaagaaattgaccccgacgaagaagaaagtgccaagaaaaagcatttggataagaagagaaaattgaaggagatgtttgatgcagaatatgatgaaggagaaagcacatattttgatgatcttaaaggagaaatgcagaaacaagcacagctgaatcgcgcagaatttgaagatcaagatgatgaagccagagttcagtatgagggttttcgacctgggatgtacgtccgcattgagattgaaaatgttccctgtgaatttgtgcagaactttgacccccattaccccattatcctgggtggcttgggcaacagtgagggaaatgttggctacgtgcagatgcgtctgaagaaacatcgctggtataagaaaatcctcaagtcccgagatccaatcatattttctgtagggtggaggaggtttcagaccatcccactgtattatatcgaagaccacaatggaagacaaaggcttctaaagtataccccacagcacatgcattgcggagcagccttttggggccctatcactccacagggaactggtttcttggcaatacagtctgtcagtggcataatgcctgattttcggatagctgctacaggagttgtccttgatctggataaatccataaaaattgtgaagaaattaaagctaactggttttccatataaaattttcaagaacacttcatttattaagggaatgtttaattctgccttggaagtggccaaatttgaaggtgctgtgattcgaacagtcagtgggataagggggcagatcaagaaagcactccgagctccagaaggagctttcagggccagctttgaggataagctgctgatgagcgatattgtcttcatgcgaacttggtatcctgtttccatcccagcgttctataacccagtaacatctttgttgaaaccagtgggtgagaaagacacctggtcaggaatgcggaccacgggccaactcaggctcgcccatggcgtcagactaaaggcgaacaaggactctctgtataagccaatcctgaggcaaaagaaacattttaattcactgcacattccaaaagccttgcagaaggccctgccatttaagaacaagcccaagacccaagcaaaggcaggcaaggtgccaaaggacaggcggagaccggccgtcatacgcgagcctcatgaaagaaagatccttgcactgctggatgctctgagtacggtgcatagtcagaagatgaagaaggccaaggagcagcggcacctgcacaataaagagcacttcagagccaagcagaaggaggaggaggagaagctgaagcggcagaaggacctcaggaagaagctcttcagaattcaggggcagaaggaaagaagaaaccagaagtccagtttgaagggggctgagggccaattgcagtgagcctttggactggagggactgtccctggatctgcggaggtagacagtttcaaacatcacagtttgaatgcctgtgaatgacaagtcagtgggaaagagctcaagagatgtctctactcaaactgtgcctgcaggaggaggaacagagaagcctgggctgctgggactgggttcattctcatgacttggggctgtcgagatttaaagtgatgtaagctgtggttatgtggattctcttactttcctctgcctgcctcagtttaattattttgtcctacagaaatatcattaaaatatttttttgttacttttg

SEQ ID NO: 181981 - DNA, 3849 bp, Artificial Sequence
  derived and/or modified sequence
atggaggccaaggaccagaagaagcacagaaagaagaacagcggccccaaggccgccaagaagaagaagagactgctgcaggacctgcagctgggcgacgaggaggacgccagaaagagaaaccccaaggccttcgccgtgcagagcgccgtgagaatggccagaagcttccacagaacccaggacctgaagaccaagaagcaccacatccccgtggtggacagaacccccctggagcccccccccatcgtggtggtggtgatgggcccccccaaggtgggcaagagcaccctgatccagtgcctgatcagaaacttcaccagacagaagctgaccgagatcagaggccccgtgaccatcgtgagcggcaagaagagaagactgaccatcatcgagtgcggctgcgacatcaacatgatgatcgacctggccaaggtggccgacctggtgctgatgctgatcgacgccagcttcggcttcgagatggagaccttcgagttcctgaacatctgccaggtgcacggcttccccaagatcatgggcgtgctgacccacctggacagcttcaagcacaacaagcagctgaagaagaccaagaagagactgaagcacagattctggaccgaggtgtaccccggcgccaagctgttctacctgagcggcatggtgcacggcgagtaccagaaccaggagatccacaacctgggcagattcatcaccgtgatgaagttcagacccctgacctggcagaccagccacccctacatcctggccgacagaatggaggacctgaccaaccccgaggacatcagaaccaacatcaagtgcgacagaaaggtgagcctgtacggctacctgagaggcgcccacctgaagaacaagagccagatccacatgcccggcgtgggcgacttcgccgtgagcgacatcagcttcctgcccgacccctgcgccctgcccgagcagcagaagaagagatgcctgaacgagaaggagaagctggtgtacgcccccctgagcggcgtgggcggcgtgctgtacgacaaggacgccgtgtacgtggacctgggcggcagccacgtgttccaggacgaggtgggccccacccacgagctggtgcagagcctgatcagcacccacagcaccatcgacgccaagatggccagcagcagagtgaccctgttcagcgacagcaagcccctgggcagcgaggacatcgacaaccagggcctgatgatgcccaaggaggagaagcagatggacctgaacaccggcagaatgagaagaaaggccatcttcggcgacgaggacgagagcggcgacagcgacgacgaggaggacgacgagatgagcgaggacgacggcctggagaacggcagcagcgacgaggaggccgaggaggaggagaacgccgagatgaccgaccagtacatggccgtgaagggcatcaagagaagaaagctggagctggaggaggacagcgagatggacctgcccgccttcgccgacagcgacgacgacctggagagaagcagcgccgaggagggcgaggccgaggaggccgacgagagcagcgaggaggaggactgcaccgccggcgagaagggcatcagcggcagcaaggccgccggcgagggcagcaaggccggcctgagccccgccaactgccagagcgacagagtgaacctggagaagagcctgctgatgaagaaggccgccctgcccaccttcgacagcggccactgcaccgccgaggaggtgttcgccagcgaggacgagagcgaggagagcagcagcctgagcgccgaggaggaggacagcgagaacgaggaggccatcagaaagaagctgagcaagcccagccaggtgagcagcggccagaagctgggcccccagaacttcatcgacgagaccagcgacatcgagaacctgctgaaggaggaggaggactacaaggaggagaacaacgacagcaaggagaccagcggcgccctgaagtggaaggaggacctgagcagaaaggccgccgaggccttcctgagacagcagcaggccgcccccaacctgagaaagctgatctacggcaccgtgaccgaggacaacgaggaggaggacgacgacaccctggaggagctgggcggcctgttcagagtgaaccagcccgacagagagtgcaagcacaaggccgacagcctggactgcagcagattcctggtggaggccccccacgactgggacctggaggaggtgatgaacagcatcagagactgcttcgtgaccggcaagtgggaggacgacaaggacgccgccaaggtgctggccgaggacgaggagctgtacggcgacttcgaggacctggagaccggcgacgtgcacaagggcaagagcggccccaacacccagaacgaggacatcgagaaggaggtgaaggaggagatcgaccccgacgaggaggagagcgccaagaagaagcacctggacaagaagagaaagctgaaggagatgttcgacgccgagtacgacgagggcgagagcacctacttcgacgacctgaagggcgagatgcagaagcaggcccagctgaacagagccgagttcgaggaccaggacgacgaggccagagtgcagtacgagggcttcagacccggcatgtacgtgagaatcgagatcgagaacgtgccctgcgagttcgtgcagaacttcgacccccactaccccatcatcctgggcggcctgggcaacagcgagggcaacgtgggctacgtgcagatgagactgaagaagcacagatggtacaagaagatcctgaagagcagagaccccatcatcttcagcgtgggctggagaagattccagaccatccccctgtactacatcgaggaccacaacggcagacagagactgctgaagtacaccccccagcacatgcactgcggcgccgccttctggggccccatcaccccccagggcaccggcttcctggccatccagagcgtgagcggcatcatgcccgacttcagaatcgccgccaccggcgtggtgctggacctggacaagagcatcaagatcgtgaagaagctgaagctgaccggcttcccctacaagatcttcaagaacaccagcttcatcaagggcatgttcaacagcgccctggaggtggccaagttcgagggcgccgtgatcagaaccgtgagcggcatcagaggccagatcaagaaggccctgagagcccccgagggcgccttcagagccagcttcgaggacaagctgctgatgagcgacatcgtgttcatgagaacctggtaccccgtgagcatccccgccttctacaaccccgtgaccagcctgctgaagcccgtgggcgagaaggacacctggagcggcatgagaaccaccggccagctgagactggcccacggcgtgagactgaaggccaacaaggacagcctgtacaagcccatcctgagacagaagaagcacttcaacagcctgcacatccccaaggccctgcagaaggccctgcccttcaagaacaagcccaagacccaggccaaggccggcaaggtgcccaaggacagaagaagacccgccgtgatcagagagccccacgagagaaagatcctggccctgctggacgccctgagcaccgtgcacagccagaagatgaagaaggccaaggagcagagacacctgcacaacaaggagcacttcagagccaagcagaaggaggaggaggagaagctgaagagacagaaggacctgagaaagaagctgttcagaatccagggccagaaggagagaagaaaccagaagagcagcctgaagggcgccgagggccagctgcagtag

SEQ ID NO: 181982 - protein, 327 aa, Artificial Sequence
  derived and/or modified sequence
MEYAVNCHVITWERIISHFDIFAFGHFWGWAMKALLIRSYGLCWTISITWELTELFFMHLLPNFAECWWDQVILDILLCNGGGIWLGMVVCRFLEMRTYHWASFKDIHTTTGKIKRAVLQFTPASWTYVRWFDPKSSFQRVAGVYLFMIIWQLTELNTFFLKHIFVFQASHPLSWGRILFIGGITAPTVRQYYAYLTDTQCKRVGTQCWVFGVIGFLEAIVCIKFGQDLFSKTQILYVVLWLLCVAFTTFLCLYGMIWYAEHYGHREKTYSECEDGTYSPEISWHHRKGTKGSEDSPPKHAGNNESHSSRRRNRHSKSKVTNGVGKK

SEQ ID NO: 181983 - protein, 473 aa, Artificial Sequence
  derived and/or modified sequence
MASCVGSRTLSKDDVNYKMHFRMINEQQVEDITIDFFYRPHTITLLSFTIVSLMYFAFTRDDSVPEDNIWRGILSVIFFFLIISVLAFPNGPFTRPHPALWRMVFGLSVLYFLFLVFLLFLNFEQVKSLMYWLDPNLRYATREADVMEYAVNCHVITWERIISHFDIFAFGHFWGWAMKALLIRSYGLCWTISITWELTELFFMHLLPNFAECWWDQVILDILLCNGGGIWLGMVVCRFLEMRTYHWASFKDIHTTTGKIKRAVLQFTPASWTYVRWFDPKSSFQRVAGVYLFMIIWQLTELNTFFLKHIFVFQASHPLSWGRILFIGGITAPTVRQYYAYLTDTQCKRVGTQCWVFGVIGFLEAIVCIKFGQDLFSKTQILYVVLWLLCVAFTTFLCLYGMIWYAEHYGHREKTYSECEDGTYSPEISWHHRKGTKGSEDSPPKHAGNNESHSSRRRNRHSKSKVTNGVGKK

SEQ ID NO: 181984 - DNA, 425 bp, Artificial Sequence
  derived and/or modified sequence
gcggccgcagaatcgagctcgggccccggcccccggcccgcggcgcggggctcccgggccccgccgcggacgtcgcgccggtcgccccttccccgtagcccgtgcgccctcggcgcggagccccggcccgccgcggtcccgtctcctgggcctgtcccgcccgcgccctccgccggccctcaggtataatacttctccacgtctgcttcaggaagaaagtgcctgccattcttatcatttctaagcaggttcatgccagcccagaacagagaatcagatgtcttcaattgctgtggtgacaagaacatagtgaatataagctgctgaaagtagagctagtcgtggctggaacagagagaaattcagaattagaagtgcgtctcaccaaccagccaagatgaacatggtgaagaggatcatggggc

SEQ ID NO: 181985 - DNA, 1422 bp, Artificial Sequence
  derived and/or modified sequence
atggccagctgtgtgggcagccgtacgctgagcaaggacgatgtcaattacaaaatgcacttcaggatgatcaatgaacagcaagtggaggacattactattgattttttctaccggcctcatacaattacattactcagctttactattgtctcacttatgtatttcgcattcacccgggacgattccgtacccgaggacaatatttggagaggcatactgagtgtgattttcttcttcctcattattagcgtcctcgcatttcctaacggacccttcacaaggccacacccggccctctggcgcatggtgtttggtctgtctgtgctctactttctctttctcgtgttcctgctgttcctaaatttcgagcaggtgaaatcacttatgtactggctcgaccccaatctgcgctatgccaccagggaagctgatgttatggagtatgcggtgaactgtcatgtcatcacctgggagcgaattatcagccattttgatatttttgcttttggccatttctggggatgggcgatgaaggccctgctgattaggtcctatgggctgtgttggacaattagtatcacctgggaacttactgagctcttctttatgcacttgctccctaattttgccgaatgttggtgggaccaggtgatcttggatattcttctttgcaacggtggcggaatttggctaggaatggtggtgtgcaggtttttggaaatgagaacatatcattgggcctccttcaaggacatccacaccacgacaggcaagatcaagcgggcagtcctgcagttcaccccagcttcttggacttatgtccgctggttcgatcccaagtcttctttccagcgtgttgcaggggtgtatctgttcatgataatctggcagctcacggaattgaatacttttttccttaagcacatcttcgtgttccaggcgtcacaccctctgtcctggggtcgcattttattcatcggaggcattacagcgccaactgtgaggcagtattacgcgtaccttacggacacccaatgtaagagagtgggaacccaatgttgggtcttcggggtaatcgggttcctggaggctatagtgtgcataaagttcgggcaggacctattcagcaagacccaaatcctgtacgttgtactctggctcctctgcgtggccttcacgacctttctctgcctctatgggatgatttggtatgcagagcattacggccacagggagaaaacttactccgagtgcgaagatggaacgtattcgcctgaaatttcctggcatcaccgcaaggggacgaagggtagtgaagactcaccccccaaacacgccgggaacaacgagagtcacagcagcagacgccgaaataggcactcaaagtctaaagtgacaaacggagttgggaagaagtag

SEQ ID NO: 181986 - DNA, 1422 bp, Artificial Sequence
  derived and/or modified sequence
atggccagctgtgtgggcagcaggaccctgagcaaggatgatgtgaactacaagatgcacttcaggatgatcaatgagcagcaggtggaggacatcaccatcgacttcttctaccggccccacaccatcaccctgctgtccttcaccatcgtgtccctgatgtactttgccttcaccagagatgattctgtgcctgaggacaacatctggaggggcatcctgagcgtcatcttcttcttcctgatcatctctgtgctggccttccccaacggccccttcacccggccccacccagccctgtggaggatggtgtttggcctgtctgtgctgtacttcctgttcctggtgttcctgctcttcctgaactttgagcaggtgaagagcctgatgtactggctggaccccaacctgcgctatgccacccgggaggctgatgtgatggagtatgctgtgaactgccacgtgatcacctgggagcgcatcatcagccactttgacatctttgccttcggccacttctggggctgggccatgaaggccctgctgatccgctcctatggcctgtgctggaccatcagcatcacctgggagctgacagagctgttcttcatgcacctgctgcccaactttgctgagtgctggtgggaccaggtgatcctggacatcctgctgtgcaatggaggcggcatctggctgggcatggtggtgtgccgcttcctggagatgaggacctaccactgggccagcttcaaggacatccacaccaccaccgggaagatcaagagagctgtgctgcagttcaccccagcctcctggacctacgtgcgctggtttgaccccaagagcagcttccagagggtggccggcgtgtacctgttcatgatcatctggcagctgacagagctgaacaccttcttcctgaagcacatctttgtgttccaggccagccaccccctgtcctggggccgcatcctcttcatcggcggcatcacagcccccaccgtgcggcagtactatgcctacctgacagacacccagtgcaagagggtgggcacccagtgctgggtgtttggagtcatcggcttcctggaggccatcgtgtgcatcaagtttggccaggacctcttcagcaagacccagatcctgtatgtggtgctgtggctgctgtgtgtggccttcaccaccttcctgtgcctgtatggcatgatctggtacgccgagcactacggccaccgggagaagacctacagtgaatgtgaagatggcacctacagccctgagatctcctggcaccacaggaagggcaccaagggcagcgaggacagcccccccaagcatgctggcaacaatgaaagccacagcagcagaagaagaaacagacacagcaagagcaaggtgaccaacggggtgggcaagaagtag

SEQ ID NO: 181987 - DNA, 1422 bp, Artificial Sequence
  derived and/or modified sequence
atggccagctgcgtgggcagccggaccctgagcaaggacgacgtgaattataagatgcacttccgtatgataaatgagcaacaggttgaggatataacaattgactttttttacagaccacatacaatcaccctgttgtctttcaccattgtcagcttgatgtacttcgcctttacccgggacgattcggtgccagaagacaacatctggcgagggattttaagtgtcatttttttcttcttaatcatcagcgtgctggccttccctaacggaccattcaccagaccccatccagccctgtggaggatggtctttggactctccgtgctttacttcttatttctggtgtttctgctgtttctgaatttcgagcaggtcaagagtttgatgtactggttagacccaaatcttcgctacgcaacccgcgaggcggacgtgatggagtacgccgttaattgccacgtaatcacttgggaacgcattatctctcacttcgacatattcgctttcggccacttttggggttgggccatgaaagcactgctaataagatcatatggcctctgttggactattagtataacatgggagttgacagagttattcttcatgcatttgctgccaaacttcgcagagtgctggtgggatcaggtcatcttggacattctcctgtgcaacggcgggggcatctggctggggatggtcgtgtgccgtttcctggagatgagaacataccattgggctagcttcaaagacatacatactaccaccggcaaaatcaagcgcgccgtcctccagttcacacccgcatcatggacctatgttcgctggttcgatcccaagtcatcatttcagagggttgctggcgtttacctctttatgatcatctggcagcttacagagcttaatacattttttcttaagcacatcttcgtctttcaagccagtcatcccttatcctggggccgtatcctcttcattggtggtatcactgcacctaccgtgaggcagtactacgcctaccttactgacacccaatgcaaacgagtaggaacacagtgctgggtgtttggagtcatcggatttctggaggcaattgtatgtatcaaatttggacaagatctgttcagcaaaacccagattttgtacgtagtgctttggctgctgtgtgtggcctttaccacgttcctgtgtctctatgggatgatatggtatgctgagcattatggccatagggaaaagacttacagtgaatgtgaagatgggacctactcccctgaaatctcttggcaccataggaaagggaccaaaggttctgaggacagccccccaaagcacgccggtaacaatgagtcacactcaagtcgtcgcaggaacagacatagtaagagtaaagtgacaaacggcgtcggaaagaaatag

SEQ ID NO: 181988 - DNA, 5177 bp, Artificial Sequence
  derived and/or modified sequence
agccaggggccccggctacccttctccggctcgctattcctctgaagtcctgtggacttggagtctgaaaattcctcgagtggtagagatgcctcagctaggatgacagcgtggggacggccggcggcgtcccctgccccaggccgcggtggcggcgccgcgaccccgccctctcgcgcctgtccttccctctgctcccagcctttgctgggcgccagacccggctttgccgtccggctattagcctactgtggctagtcacccccggggtcccggccttctcgggctggggccgccgccaccgcggcaggacggggaggcgggccatggcgtcctgcgtggggagccggaccctaagcaaggatgatgtgaactacaaaatgcatttccggatgatcaacgagcagcaagtggaggacatcaccattgacttcttctaccggccgcataccatcaccctgctcagcttcaccatcgtcagcctcatgtacttcgcctttaccagggatgactctgttccagaagacaacatctggagaggcatcctctctgttattttcttctttcttatcatcagtgtgttagctttccccaatggtccgttcactcgacctcatccagccttatggcgaatggtttttggactcagtgtgctctacttcctgttcctggtattcctactcttcctgaatttcgagcaggttaaatctctaatgtattggctagatccaaatcttcgatacgccacaagggaagcagatgtcatggagtatgctgtgaactgccatgtgatcacctgggagaggattatcagccactttgatatttttgcatttggacatttctggggctgggccatgaaggccttgctgatccgtagttacggtctctgctggacaatcagtattacctgggagctgactgagctcttcttcatgcatctcctccccaattttgccgagtgctggtgggatcaagtcattctggacatcctgttgtgcaatggcggtggcatttggctgggcatggtcgtttgccggtttttagagatgaggacttaccactgggcaagcttcaaggacattcataccaccaccgggaagatcaagagagctgttctgcagttcactcctgctagctggacctatgttcgatggtttgaccccaaatcttcttttcagagagtagctggagtgtaccttttcatgatcatctggcagctgactgagttgaataccttcttcttgaagcatatctttgtgttccaagccagtcatccattaagttggggtagaattctctttattggtggcatcacagctcccacagtgagacagtactacgcttacctcaccgacacacagtgcaagcgcgtaggaacacaatgctgggtgtttggggtcattggtttcctggaggccattgtttgcataaaatttggacaagatctcttctctaagacccaaatactctatgttgtgctttggcttctttgcgtggctttcaccactttcctctgtctgtacggcatgatttggtatgcagaacactatggtcaccgagaaaagacctactcggagtgtgaagatggcacctacagtccagagatctcctggcatcacaggaaagggacaaaaggttctgaagacagcccacccaagcatgcaggcaacaacgaaagccattcttccaggagaaggaatcggcattccaagtcaaaagtcaccaatggcgttggaaagaaatgaaaaaccctggttaatcaaagatgttccagagtgcctagaactgagagggaaatggaactcatttggaactccccgtgaggaggtcgaggcgcacagggcaagcaggaagaggcgagggcacttgggggtcattatttgagatcgtaagtcttgtttcccacagacctggccgcgtcaggcagatcatcgcctggggggcctttgccaacgtggggtctcttctaacttcagcacttgacatgcggtcaccggtggcagcgcggtgtgttgaagggaaacggtagctattcattcacagttgccaagagcagctccgcgcctgctggatcgtggatgcagcgtaaacatcttccttcagacgaggcattaaccccatggttaatggactggtcaccagtttttattttatttttatgaatctacctttccattgattgatttaagttcaggccacttttctgtcttttatttggttactgttgttatttgtttttaagttaggatgctttttaacagcctttagaagccgctgctgaaattgatactgggggaagggttccccttccttctagagcagaaaagggagagaggtgttgtattcctgtttggtaacctcagtctcctgtaagacctcctaccacatggcgagtatacaccaatcaggagagggtagctgcctgcataggagcctcgcttccgattattcccttcccaatattattcatccagacttagccacagtgcacaaaagcaaacctgctagagaggcagtgaacaccacagcttctccccagctaggtgccttttacatcgggtttgttctccttccatggtgtgttgctgacattgtcactgagtcccatgtgaggtgctggtgagtattacctttcatctgtgccatgctctagaaccttgaccttgatagttcaccacctctgatggatccctgttttaaataaaaacgattcactttaaagcctatcaaaggtctgtctgtaaaatgctcattttcttgcatcttactggtatcttctattgattgtaagcagtctgtgtttttcaagtgactttaggataatatatatgtgttttacatagtgagaagaaaaaagaaaagatgtgtattttaaagggcttacagacatatatgtcctacttcttagactacccaagtgaccaacaggaatgaacaacatagtcattgttttttcctgtggtaatggtttccaagttggacttttttttcctctaacaagaggccagtacccagttgattagcttacagatatcaactcactgaaagtaatcttttgttccctcatttcacacagcacaaaggttcgttctgatgtttcttcttctttaaggaaatctttagccatagaagtgtcactttttttttttctgcaaaagaattccaagatgaacgggttgaatgaatcatgccagccagggtcacatcctgtcctcagggggcccagtgctcaatagtagattctgcgggagtggagaagcgtcagtggcagctccgctcacttggtgagtgagggatttggctgtgatgagcctcagctccgagctctcaaatgtcctccagccagcatctgcctgcttcccacaaaaggatagaagagaggcaaagtgcgtgtttcataaaacctgcctgcacttttataacccatcaaagaggccatttttaaacacaggtacaatttaaacatgatctttctttgcaaataaatatgttttgtttcatcctgtgttctgcttttctaagcatgacatacttgtgcccattggagaagacacctgtctcttctttctcacaccggtggtgcctcactgagtgtttccgggttcattttccgggagcactgggcctgacactttcacactcttctgactttcgccttgttgcaactgatggagcatgtgtgcttcctctgaggccagcctacaggaggcagctgtttcgcaggtggtgaattcgactttactgtggcattgtgaagagcagggtgcacaggagatgattttttctccatggctttgtaagaaacagccaggaaagttctcagatactttccatgccctttctttgagttgaaactttctatttcccttcagtcagagctctttactatagtagttacaaaaccagtgctttccatggctggccagaaccacagctgctattccttttagaagccatactgctgggtttggcctacttttttcaccgtttctatggaaataaacctcacattgatggaaatagaatgcgtgtttcagaatcatcattcaatatctgaaatgatttgattgtaaattatctcatggtccctgtttgcaaaccaccctcttaagagagaacattgttttggacctaaagcttgaagaacggtttatgtatttttctccttaagtagcattgcattgagtgttaggttcttttccctttttttcattcttggtcttcccaaagcttcttcccacatttcgtttgtgtctgtttccaccattcatagaaaccttggaaccactctcacagcaatgctaggatgtttcatggacctgttaagcattttgatgatacaagacatcctatcaatgccagtcttattttcgctaggactctgcttccacagtaagctcctaaggtgctcacccaacccaggagaaaacaaaattcattaccaaatacaacaggttcagccttcttggtcttccctcagaagccaccgtgtagcaccctggaatgatgcctctttatgccaaggcccaccctttggaattgggagggttttgggtagaatcctgcacttacagaggcccttggggtcattgagaagtggaggaggttggacacagaaggggaggctaaacacaaggtggggaagaaaaaatgtaaccattggcagccagactgaagctagccctttaaaatacggggttggggggttaacatccgctctttggaatgtgctcagtgactgctgcagagttcctgggccaccctaatgtttaccaggtgggcgttgtttatatggttcttattgttatgacaactagaaatcccacagtagactagacagtgctccctaccatttcccatttataggattgaaatcaagatgtaaggagagctggccgggcgcagggctcacgcctgtaatcccagcactttgggaggctgaggtgggtggatcgcctgaggtcaggagtttgagaccagcctgaccaatatggtgaaaccctgtctctgctgaaaatacttaaattagccgggcatggtggcaggcacctgtagtcccagctactcgggagacagagacagaagaaatgcttgaacccaggaggtggaggttccagtgagccgagatcacgccaccgcactctctaacctgggcgacagagcgagactatctc

SEQ ID NO: 181989 - DNA, 1422 bp, Artificial Sequence
  derived and/or modified sequence
atggcttcatgcgtcgggagcaggaccttatcaaaggatgacgtgaactacaagatgcattttcgcatgattaacgagcagcaagttgaagatattaccatcgactttttttatcggcctcacactattacccttctctctttcactattgtctcgcttatgtatttcgcttttacgcgggacgactcagtgccagaagataacatctggcggggaatcctaagtgttattttcttcttcttaatcataagcgtgctggcgttccccaacgggcctttcaccaggcctcaccctgcactctggagaatggtgtttggattatccgtgttatatttcttattccttgtgttcctcctttttctgaatttcgagcaggtgaagagcctcatgtattggctcgaccccaatttaaggtatgccacgagggaagctgatgttatggaatatgctgtgaattgtcatgtgataacatgggaaagaatcatctcgcatttcgacatctttgccttcgggcacttttggggatgggctatgaaagctttgttgatcaggtcttatggactgtgttggaccatttccataacttgggaactcactgagcttttcttcatgcaccttctcccaaattttgctgaatgctggtgggaccaagtgattctcgacatcctgctatgtaacggcggtggcatatggctcggaatggtagtgtgtcggtttttagagatgcggacatatcactgggctagttttaaagacattcatactaccactggcaaaataaaaagggctgtactgcagtttaccccggcttcatggacatatgtgcggtggtttgaccccaaaagttctttccagagagtagcaggggtgtacctgttcatgataatctggcagctgactgaactgaatacattctttttgaaacacatcttcgttttccaggcctcccatcccctgagctggggcagaatcctcttcattggcggaattacagcgcctaccgtgagacagtactatgcttatctgacagatacccaatgtaagagagtcggcactcagtgttgggtttttggcgtcataggtttcctggaagccattgtctgcattaagttcgggcaggatctgttcagcaagacccagattctctacgtcgtactgtggttactgtgcgttgcctttaccacttttctgtgtctctatgggatgatctggtatgccgagcactatggtcaccgagagaaaacatatagcgagtgcgaagacgggacctactcccccgagatcagctggcatcacagaaaagggaccaagggtagcgaagactctcccccaaagcatgccggtaataatgagagtcacagtagtcgacggagaaatagacacagcaaaagcaaggtgaccaacggagttgggaagaaatag

SEQ ID NO: 181990 - DNA, 1422 bp, Artificial Sequence
  derived and/or modified sequence
atggccagctgcgtgggcagcagaaccctgagcaaggacgacgtgaactacaagatgcacttcagaatgatcaacgagcagcaggtggaggacatcaccatcgacttcttctacagaccccacaccatcaccctgctgagcttcaccatcgtgagcctgatgtacttcgccttcaccagagacgacagcgtgcccgaggacaacatctggagaggcatcctgagcgtgatcttcttcttcctgatcatcagcgtgctggccttccccaacggccccttcaccagaccccaccccgccctgtggagaatggtgttcggcctgagcgtgctgtacttcctgttcctggtgttcctgctgttcctgaacttcgagcaggtgaagagcctgatgtactggctggaccccaacctgagatacgccaccagagaggccgacgtgatggagtacgccgtgaactgccacgtgatcacctgggagagaatcatcagccacttcgacatcttcgccttcggccacttctggggctgggccatgaaggccctgctgatcagaagctacggcctgtgctggaccatcagcatcacctgggagctgaccgagctgttcttcatgcacctgctgcccaacttcgccgagtgctggtgggaccaggtgatcctggacatcctgctgtgcaacggcggcggcatctggctgggcatggtggtgtgcagattcctggagatgagaacctaccactgggccagcttcaaggacatccacaccaccaccggcaagatcaagagagccgtgctgcagttcacccccgccagctggacctacgtgagatggttcgaccccaagagcagcttccagagagtggccggcgtgtacctgttcatgatcatctggcagctgaccgagctgaacaccttcttcctgaagcacatcttcgtgttccaggccagccaccccctgagctggggcagaatcctgttcatcggcggcatcaccgcccccaccgtgagacagtactacgcctacctgaccgacacccagtgcaagagagtgggcacccagtgctgggtgttcggcgtgatcggcttcctggaggccatcgtgtgcatcaagttcggccaggacctgttcagcaagacccagatcctgtacgtggtgctgtggctgctgtgcgtggccttcaccaccttcctgtgcctgtacggcatgatctggtacgccgagcactacggccacagagagaagacctacagcgagtgcgaggacggcacctacagccccgagatcagctggcaccacagaaagggcaccaagggcagcgaggacagcccccccaagcacgccggcaacaacgagagccacagcagcagaagaagaaacagacacagcaagagcaaggtgaccaacggcgtgggcaagaagtag

SEQ ID NO: 181991 - protein, 1972 aa, Artificial Sequence
  derived and/or modified sequence
MGDDSEWLKLPVDQKCEHKLWKARLSGYEEALKIFQKIKDEKSPEWSKFLGLIKKFVTDSNAVVQLKGLEAALVYVENAHVAGKTTGEVVSGVVSKVFNQPKAKAKELGIEICLMYIEIEKGEAVQEELLKGLDNKNPKIIVACIETLRKALSEFGSKIILLKPIIKVLPKLFESREKAVRDEAKLIAVEIYRWIRDALRPPLQNINSVQLKELEEEWVKLPTSAPRPTRFLRSQQELEAKLEQQQSAGGDAEGGGDDGDEVPQIDAYELLEAVEILSKLPKDFYDKIEAKKWQERKEALESVEVLIKNPKLEAGDYADLVKALKKVVGKDTNVMLVALAAKCLTGLAVGLRKKFGQYAGHVVPTILEKFKEKKPQVVQALQEAIDAIFLTTTLQNISEDVLAVMDNKNPTIKQQTSLFIARSFRHCTASTLPKSLLKPFCAALLKHINDSAPEVRDAAFEALGTALKVVGEKAVNPFLADVDKLKLDKIKECSEKVELIHGKKAGLAADKKEFKPLPGRTAASGAAGDKDTKDISAPKPGPLKKAPAAKAGGPPKKGKPAAPGGAGNTGTKNKKGLETKEIVEPELSIEVCEEKASAVLPPTCIQLLDSSNWKERLACMEEFQKAVELMDRTEMPCQALVRMLAKKPGWKETNFQVMQMKLHIVALIAQKGNFSKTSAQVVLDGLVDKIGDVKCGNNAKEAMTAIAEACMLPWTAEQVVSMAFSQKNPKNQSETLNWLSNAIKEFGFSGLNVKAFISNVKTALAATNPAVRTAAITLLGVMYLYVGPSLRMFFEDEKPALLSQIDAEFEKMQGQSPPAPTRGISKHSTSGTDEGEDGDEPDDGSNDVVDLLPRTEISDKITSELVSKIGDKNWKIRKEGLDEVAGIINDAKFIQPNIGELPTALKGRLNDSNKILVQQTLNILQQLAVAMGPNIKQHVKNLGIPIITVLGDSKNNVRAAALATVNAWAEQTGMKEWLEGEDLSEELKKENPFLRQELLGWLAEKLPTLRSTPTDLILCVPHLYSCLEDRNGDVRKKAQDALPFFMMHLGYEKMAKATGKLKPTSKDQVLAMLEKAKVNMPAKPAPPTKATSKPMGGSAPAKFQPASAPAEDCISSSTEPKPDPKKAKAPGLSSKAKSAQGKKMPSKTSLKEDEDKSGPIFIVVPNGKEQRMKDEKGLKVLKWNFTTPRDEYIEQLKTQMSSCVAKWLQDEMFHSDFQHHNKALAVMVDHLESEKEGVIGCLDLILKWLTLRFFDTNTSVLMKALEYLKLLFTLLSEEEYHLTENEASSFIPYLVVKVGEPKDVIRKDVRAILNRMCLVYPASKMFPFIMEGTKSKNSKQRAECLEELGCLVESYGMNVCQPTPGKALKEIAVHIGDRDNAVRNAALNTIVTVYNVHGDQVFKLIGNLSEKDMSMLEERIKRSAKRPSAAPIKQVEEKPQRAQNISSNANMLRKGPAEDMSSKLNQARSMSGHPEAAQMVRREFQLDLDEIENDNGTVRCEMPELVQHKLDDIFEPVLIPEPKIRAVSPHFDDMHSNTASTINFIISQVASGDINTSIQALTQLFQIESLAREASTGVLKDLMHGLITLMLDSRIEDLEEGQQVIRSVNLLVVKVLEKSDQTNILSALLVLLQDSLLATASSPKFSELVMKCLWRMVRLLPDTINSINLDRILLDIHIFMKVFPKEKLKQCKSEFPIRTLKTLLHTLCKLKGPKILDHLTMIDNKNESELEAHLCRMMKHSMDQTGSKSDKETEKGASRIDEKSSKAKVNDFLAEIFKKIGSKENTKEGLAELYEYKKKYSDADIEPFLKNSSQFFQSYVERGLRVIEMEREGKGRISTSTGISPQMEVTCVPTPTSTVSSIGNTNGEEVGPSVYLERLKILRQRCGLDNTKQDDRPPLTSLLSKPAVPTVASSTDMLHSKLSQLRESREQHQHSDLDSNQTHSSGTVTSSSSTANIDDLKKRLERIKSSRK

SEQ ID NO: 181992 - protein, 301 aa, Artificial Sequence
  derived and/or modified sequence
MGDDSEWLKLPVDQKCEHKLWKARLSGYEEALKIFQKIKDEKSPEWSKFLGLIKKFVTDSNAVVQLKGLEAALVYVENAHVAGKTTGEVVSGVVSKVFNQPKAKAKELGIEICLMYIEIEKGEAVQEELLKGLDNKNPKIIVACIETLRKALSEFGSKIILLKPIIKVLPKLFESREKAVRDEAKLIAVEIYRWIRDALRPPLQNINSVQLKELEEEWVKLPTSAPRPTRFLRSQQELEAKLEQQQSAGGDAEGGGDDGDEVPQIDAYELLEAVEILSKPKTFMTKLRQKNGKREKRPWSL

SEQ ID NO: 181993 - DNA, 5919 bp, Artificial Sequence
  derived and/or modified sequence
atgggagatgattccgagtggctgaagctgcccgttgaccaaaaatgcgagcataaattatggaaggcaaggctaagcggatacgaggaagccttgaaaattttccaaaagattaaagacgagaagtcaccagaatggagtaaatttctgggcctcatcaagaagtttgtaacggattcaaacgcagtcgtgcagctgaagggcctcgaggctgccctcgtttacgtcgaaaatgcccatgttgcgggaaagactaccggcgaagtggtctctggtgtcgtgagtaaggtttttaatcagcctaaagccaaagcaaaagagttgggcatcgagatctgtctcatgtatatcgagattgaaaagggcgaagctgttcaggaggaattgctgaagggactcgacaacaaaaaccccaagattattgtggcctgcattgagacactccgaaaagccctttctgaattcggtagtaagattatcctgcttaaaccaataataaaggtgctcccaaagttgttcgagtcacgcgagaaggccgtaagagacgaggccaaattaatcgctgtggagatctatcgttggattcgcgacgccctccgcccacccctccaaaatattaattcggtccagctcaaggaactcgaggaagagtgggtcaaacttcccaccagcgctcccagacctaccaggtttctcagaagtcagcaagaactggaggcgaagctggagcagcagcaatccgctggtggcgacgccgaaggcgggggggatgacggtgacgaggtgccacagatcgatgcctatgagttgcttgaagcggtggagatcttaagtaaacttccgaaggacttctacgataagatcgaagccaagaaatggcaagaacgtaaggaagcccttgaatctgtcgaggtcctcattaagaatccaaagttggaagccggtgattatgccgacttagtgaaggcactaaagaaagtggtgggaaaggatacaaatgtgatgttggtcgccttggctgctaagtgcttgacgggtcttgcagtgggactgcgtaaaaagttcggccaatacgccggccatgtcgtgccaaccattcttgagaagttcaaagaaaaaaaacctcaggtcgtccaggcgctccaggaggccattgacgctattttcctcacaacgacacttcagaatatatctgaggacgtcctggcagtgatggacaacaagaaccccactatcaagcagcagacctctttattcattgctagatcattccggcactgtacagcaagtaccctgcctaaaagccttctaaagcccttttgcgctgccctcctgaaacatatcaacgattccgcgccagaagtgcgggatgcggcctttgaggcgttggggacagcgctcaaggtcgtaggggagaaggcagtgaatccattccttgcagacgtagataagctgaaactggataaaatcaaggagtgctccgaaaaggtcgagctcatccatggtaagaaggccggcctggcagcagataagaaagaattcaaaccccttcccggcagaaccgctgcatctggagcagctggggataaggacaccaaggacattagtgctccaaaacccggtcctctcaagaaggcccctgccgccaaggcaggcgggcccccaaaaaaaggtaagcctgccgccccagggggtgctggaaacacaggaactaagaacaagaagggcctagagaccaaggagatcgtggagccagagctttccatcgaggtctgtgaggagaaggcatccgcggttcttcctccaacttgtattcagctgttggactctagcaattggaaggagagactggcttgtatggaggagttccaaaaggccgtggagctcatggatcgcacagagatgccatgccaggccctggtgcggatgctggccaagaagccaggatggaaggagacaaatttccaggtaatgcaaatgaagctgcacattgtggctttgattgcccagaagggcaacttcagcaaaacctccgcgcaggtggttctcgacgggctagtggataagatcggcgacgtcaagtgtggaaacaatgcaaaggaagccatgactgctatcgccgaagcatgtatgcttccatggaccgccgagcaggtggtctccatggctttttcgcagaagaacccaaaaaaccaatcagagactcttaactggctttccaatgccattaaagagttcggctttagcgggctgaatgtcaaggcctttataagtaacgtaaagacagcactggccgccactaatccggctgtcagaaccgccgctatcactctcctcggggtgatgtatctttacgtgggcccatctcttcgcatgttttttgaagacgaaaagcctgccctgctcagtcagattgatgccgagtttgagaagatgcaagggcagtcccctcctgctcccactcgaggtatttccaagcactctacgtccggcacggacgaaggcgaggatggagacgagcccgatgacgggtctaatgatgtggtcgatctgctcccacgcaccgaaatcagtgataagatcactagcgaacttgtcagtaaaattggggacaagaactggaaaatcaggaaggaagggctggacgaagtcgccggtatcatcaacgatgccaaattcatccagccaaacatcggagagctcccaactgcgctgaaaggacggctcaacgatagtaacaagatccttgtgcagcagacactgaacatactccagcagctggctgttgcgatgggacccaacattaagcagcacgtaaagaatctcggaattcctataattactgtcctgggtgactcaaaaaataatgttcgggctgctgccctggctacagtgaacgcttgggcggaacagacagggatgaaggaatggctcgagggcgaagacctttcagaggaattaaagaaagagaatccatttctccggcaggagctgctggggtggcttgctgaaaagctccccacactcagaagtacacccactgatctgatcttgtgcgtgccacatctttacagctgtctagaggataggaacggagacgtgcggaagaaggcccaggatgcgctgcctttcttcatgatgcatctcggatacgagaaaatggccaaagccacaggcaaactgaaaccaacgtcgaaagatcaggtcctggccatgctggagaaggccaaggtgaacatgccggctaagccagcccccccgacaaaggctaccagcaagcccatgggcggaagtgcccccgcgaagttccagcctgctagtgccccagcagaggattgtattagctcttcaacagaaccaaagcctgaccctaaaaaggcaaaagcccccggactgagcagcaaagcgaagtccgcgcagggtaagaaaatgccatcaaaaaccagcctgaaggaggatgaagataaaagcggtcccatttttatagtcgtccccaacgggaaagaacagcgaatgaaagatgaaaaaggacttaaagtgttgaaatggaactttacaactccacgcgacgagtatatcgagcagctgaaaacccagatgtcaagctgcgtggccaagtggctccaagacgagatgttccatagcgatttccagcaccacaacaaggccctcgctgtgatggtggatcacctcgagtcggaaaaggaaggagtcatcggctgcttggatcttatactaaagtggctgactctgcggtttttcgatacgaatacctcagtgctgatgaaagcactggaatatctgaagctcttattcacgctgttgtcagaagaggagtatcaccttaccgaaaatgaggccagtagctttataccttatctggtcgttaaggtgggtgagccaaaagacgtgatcaggaaggatgtaagggccattctaaatcggatgtgcttggtttacccagcatctaaaatgttcccttttataatggaggggaccaagagtaagaactccaagcagcgggccgagtgtctcgaggagctcggctgcctcgttgagtcatatggcatgaatgtatgtcagccaacaccaggaaaggctctgaaagagattgccgtccatatcggcgatcgagacaatgcagttcgcaacgccgcactgaataccatagtgactgtatataacgtccacggcgatcaggtgttcaagctcattggaaacttaagcgagaaagatatgagcatgctcgaggaacggatcaaacggagcgctaagaggccatctgctgctccaatcaaacaggtggaggaaaagccacagcgggcgcaaaatataagctccaacgccaacatgctgcggaaaggtccggccgaggatatgtcctcaaaacttaaccaggcaagatccatgtcaggccatccagaagcggcacagatggtgagacgcgagtttcagctggatctggatgagatcgaaaatgacaatggcacagtgagatgtgaaatgcccgagctggtacaacacaaactggacgatatctttgagccagtgttaatcccggagcccaagattcgggcagtatcccctcacttcgatgatatgcacagtaataccgccagtacaatcaattttattattagtcaggtggccagtggcgacatcaacacaagcattcaggctctgacgcagcttttccagatcgagtcgttggcacgggaagcatctacgggagtgctcaaagacctcatgcatggtctgatcacactcatgctggactcccggatcgaggatctggaggaggggcagcaggtgattcgtagtgtcaatctgctagttgttaaggtgcttgagaagtctgaccagactaatattttgagcgccctgcttgtgcttctgcaggactccctgctggcaacagctagctcccccaagttcagcgagttggtgatgaagtgcctctggagaatggtcagactccttccagacacaattaattccattaacttagatcggatactgttggacatacacatctttatgaaagtgtttcctaaggagaagctgaagcagtgtaaaagcgagttcccgattagaactttgaagacccttctccatacgctctgtaagctgaagggtcctaagattctcgaccacttgactatgattgacaacaagaatgagtctgagctggaggcccacttgtgccggatgatgaagcacagcatggaccagactggatctaaaagcgacaaggagacagaaaagggcgcatcaagaatcgatgaaaaaagctctaaagcgaaggtgaatgatttcctcgcagaaatcttcaaaaagattggctctaaggagaacaccaaggaggggttagccgaactgtatgaatacaaaaaaaaatatagcgacgctgatattgagcctttcctgaaaaactcttcccagttttttcagtcctacgtggaaagagggctccgtgttatcgagatggaacgggaaggaaaggggcggatctccacctctaccgggatttcccctcaaatggaggttacctgcgtgcccactcctacctctacagtgtcgagcataggcaacaccaacggggaagaggtgggccccagtgtctatctcgagagactcaaaattctgaggcaacgttgtggcctggataatacgaagcaggatgatagaccaccactcacaagcctgctgagcaaacccgccgtgccaaccgttgctagtagcactgatatgctacacagcaagctctctcaactgagggagtcccgcgaacagcaccagcactcagacttggatagtaatcagactcattcatctggcactgtcacttcctcaagctctaccgcgaacatcgacgacctgaagaaacggctggagcgcatcaagtccagcaggaagtag

SEQ ID NO: 181994 - DNA, 5919 bp, Artificial Sequence
  derived and/or modified sequence
atgggggacgactccgaatggcttaagctcccggtcgatcagaagtgcgaacataagttgtggaaagctcgactgagcgggtacgaggaggctctgaaaatctttcaaaaaattaaagacgagaaatctccagagtggagcaaattccttggcttaatcaaaaagtttgtcacggatagcaatgccgtggttcagttgaaaggcctcgaagcggccctggtttacgtggaaaacgcgcacgtggcggggaaaacgacgggcgaggtcgtgagcggcgtagtctctaaggtgtttaatcagcctaaggctaaggctaaagagctgggtattgaaatatgcttaatgtacatagaaatagaaaagggtgaagctgtgcaggaggagctgctgaagggtctcgacaataaaaatcctaaaatcatcgttgcctgcattgaaaccctgcggaaagccctttcagaatttggaagcaagattatccttttgaagcccataatcaaggtgctgcctaagctgtttgaaagcagagagaaagccgtgcgcgatgaagccaagctcattgccgtggagatttacaggtggataagagacgcccttcgcccccctctgcagaatattaactccgtccagctcaaggaattagaggaagagtgggtgaagctgcctacttcagctccaagacccacacgcttcctcagatcccagcaggaactcgaggcaaagctggaacagcagcagagcgccggtggcgacgccgaaggcggaggagacgacggcgatgaagtcccacagatagacgcttatgagctcttagaagccgtggagatcctgtctaagctgccgaaggacttctatgataaaatcgaagccaaaaaatggcaagagcgcaaggaagcactagaatcagtggaggtcttaatcaagaatcctaagttggaggccggggattacgctgacctcgtcaaagcactgaagaaggtggtgggtaaagacaccaacgtaatgttggtggctcttgcggctaagtgcctgaccgggttggccgtgggactccgcaagaagttcgggcaatatgctggccatgtggtgccaactatactcgaaaagttcaaggaaaaaaagccgcaggtagtgcaggccctgcaagaggctattgatgctatttttctgaccaccacactgcagaatatcagcgaagatgtcctggctgtgatggataacaagaatcccacaattaagcaacagactagtttgttcattgcaaggtcctttagacactgcaccgcatccaccctgcccaaaagtttattgaagccattttgcgcggcgctgctcaagcacatcaacgatagcgcaccagaggtgcgggacgctgctttcgaagctctcggcacagccctcaaagtcgtcggagagaaagccgttaatcccttcctggccgacgtcgacaagttaaaactggataaaattaaagaatgttctgagaaagtggaactcattcatgggaagaaggctgggctggccgccgacaagaaggagtttaagcccctgcccggacgaactgcggcctctggagccgctggtgacaaggacaccaaagatatctccgctcccaagcctggccccctcaaaaaagctcctgccgccaaagccggcggcccacccaaaaagggcaagccagcagcgcctggcggcgcaggtaatacaggaactaagaataaaaaagggttggaaaccaaagaaatagtggaacccgagctctctatagaggtctgtgaggagaaggccagtgccgtactgcccccaacttgtattcagctcctggattcgagtaactggaaggagcggttagcgtgtatggaagagttccagaaagccgtggagctcatggatagaactgaaatgccctgccaagccctggtacgtatgctcgcaaagaagccaggttggaaggagacaaattttcaggtgatgcaaatgaagctacacattgttgccctgattgcgcaaaagggtaactttagtaaaacctccgctcaagttgtcctggatggacttgtggacaagattggagacgtgaaatgtggcaacaacgcaaaggaagcaatgaccgctatagctgaggcctgtatgttgccatggactgccgagcaggtcgtctcaatggcgttcagccaaaagaatcccaagaatcagtccgaaactttaaattggctcagcaacgccatcaaagaattcggatttagcggattgaacgttaaagcattcataagcaacgtgaaaacggcgcttgcggcaaccaatcctgctgtacggaccgccgccatcacactgctcggggtgatgtacctgtacgtgggcccgtccttaagaatgttcttcgaagatgaaaagcctgccttattgtctcagatcgacgcagagttcgagaagatgcagggccagtctcctccagccccaacccgaggaatctccaaacactccacttccggaactgacgaaggcgaggacggcgatgagccagacgacggaagcaatgacgtggtggatttgttgcctcgcacagagatctcagacaagatcacttccgagttggttagcaagatcggagataaaaactggaaaatacgaaaggaaggcctcgacgaggtggcaggcatcatcaatgacgccaagtttatccagcccaatattggcgaacttccaacagccttaaaggggcggcttaacgactcaaacaaaatactggtgcaacagaccctgaacattttgcagcagcttgccgtggcaatgggtccaaacatcaaacagcacgtgaaaaacctcggaattcccatcataacggtcctgggcgacagtaagaacaacgtgcgagccgccgccctggccaccgtgaacgcctgggctgagcagacgggaatgaaggaatggctagaaggggaggatctgtccgaggagttgaagaaggaaaatcccttcctcagacaggaactgctaggatggctggccgaaaagcttccgactctgaggagtacccctaccgacctgatcctatgtgttccacatttgtactcctgtctggaagatcgcaacggcgatgtgcgcaaaaaggcccaagatgcgctcccgtttttcatgatgcaccttggatatgagaagatggcgaaggcaactggaaaactgaagcccacctccaaagatcaggtgctggctatgttagagaaggcaaaggtgaacatgcccgctaaaccagccccgcccactaaagccaccagtaaaccaatggggggcagcgcccccgctaagttccagcccgcgtccgccccggcagaagactgtatcagtagcagcaccgaacccaagccggaccccaaaaaggcgaaggcacctggcttatcgagcaaggccaagtctgcgcagggcaaaaaaatgccgagtaagactagtctgaaagaggacgaggacaagagcggacctatattcattgttgtgccaaatgggaaggagcagcggatgaaagatgagaaggggctgaaagtgctgaagtggaacttcaccactcccagggatgaatacatcgagcagctgaaaacccagatgtcttcgtgtgtagccaagtggttgcaggacgaaatgtttcactctgacttccagcatcataataaggccctggctgtcatggtggaccatcttgaatcagaaaaggagggcgtgatcggatgtttggatcttatcctgaagtggctgacactccggttttttgatacaaacacttctgtactcatgaaagccctggagtatctcaagctcctgtttactctactgtcagaggaggagtaccacttgaccgagaacgaggctagctcgtttattccgtatctcgtggttaaggtgggcgaacctaaagatgttatcaggaaagacgtgcgggccatccttaaccgtatgtgtttggtgtatcccgctagcaagatgttcccctttattatggaaggcaccaaatcaaagaattcaaagcagcgggccgagtgtctggaggagcttgggtgtctggtcgaatcttacggcatgaacgtgtgtcagcccacacctgggaaggccttgaaggagatcgcagtccatattggagaccgcgataacgccgtccgaaatgcggccctgaatacgatcgtgacagtctacaacgtacacggagaccaggtgtttaaattgatcgggaatctatccgagaaggatatgagtatgctcgaagaaagaataaagcggagcgccaagcgaccttctgccgcacccatcaaacaagtagaggagaagccacagcgcgcacagaacatttcctcgaacgcgaacatgctgcgaaaggggcccgctgaagatatgtcatccaaactgaaccaggcgcggtccatgtcaggtcaccctgaagctgctcagatggtacgacgggaattccaactcgacctggacgagatcgaaaatgataacggaaccgtccggtgtgagatgcccgaactggtgcaacacaaactggacgacatcttcgagccagtgttgatcccagaacccaagatccgggcggtgagccctcattttgacgatatgcactcaaacacggcatccactataaacttcattatcagtcaggtcgccagcggagatattaatacatccatccaggcgctgacccaattattccagatcgagagtctggcacgggaagccagtacgggggtcctcaaagatctcatgcacggtttaattacactcatgctagactcccgaattgaggatctggaagagggacagcaggtcattcggtctgtcaatcttcttgttgtcaaggtacttgagaagagtgatcagaccaatattctgagcgcattgttggtgcttctccaggattcacttcttgctaccgccagcagcccaaagttctctgaactggtgatgaagtgtctgtggcgaatggttagactgctgccagacactataaactctattaacttagatcggatcctcttggacatccacattttcatgaaagtcttcccgaaagagaagcttaaacaatgcaaatcagagttccctatccgcaccttgaagaccctgctgcacacactatgtaaattaaaaggacccaaaatcctggaccatctaactatgatagacaataaaaacgaatccgagttagaggcccatctctgcaggatgatgaagcactcgatggatcaaaccgggagcaaaagcgacaaggaaaccgaaaaaggtgcatccagaatcgatgagaaaagctcgaaagccaaggtgaacgattttctggccgagatcttcaaaaagattggatccaaggaaaatacaaaggaggggctagcagaactgtacgaatataaaaaaaaatactctgacgctgacatcgaacccttcctcaagaattcttctcagtttttccaatcctatgtcgaacgggggctaagagtcatcgaaatggaaagggagggaaaggggcgcatctcaactagtacgggtatcagtccacagatggaggttacctgcgtcccaactcctacctctacagtgtcaagtataggaaacaccaatggggaagaggtgggcccaagcgtgtacttggaacggctgaaaattctgcgccagcggtgtggcctggataacacaaaacaggacgataggcctccgcttacttcactgctgtctaaaccggcagtaccaacggtcgcaagttccactgacatgttgcactcaaaacttagtcagctgagggaatctcgcgaacagcatcagcactcagacttggatagcaatcaaactcattctagcggcacggtgacctcttcgtcctcaacggccaatattgacgaccttaagaagcggttggagcgtatcaagagtagccgcaaatag

SEQ ID NO: 181995 - DNA, 906 bp, Artificial Sequence
  derived and/or modified sequence
atgggcgatgactccgagtggctgaaactgcccgtcgatcagaaatgtgagcacaagctgtggaaggctcgcctctccggctatgaggaagccctcaaaatctttcaaaaaataaaagacgaaaaatccccagagtggtctaaattcctgggactaattaagaagttcgtgaccgacagtaatgcagtagttcagcttaagggtctggaggcagctctcgtgtatgtggaaaatgcacacgtggccgggaagacaaccggagaggtggtgtcaggggtcgtgagcaaggttttcaaccagccaaaagcaaaagctaaagagctagggatcgaaatctgcctgatgtacatcgaaattgaaaagggcgaagcagttcaagaagaactactcaaggggctggataacaaaaaccctaaaattattgtggcttgcatagaaactctgcgaaaggccctgtcagaattcggttctaagatcatcctccttaaacctatcattaaggttctgcccaaattatttgagtcccgggaaaaggctgtcagagacgaggcaaagctgatcgctgtagagatctataggtggatccgtgatgcactgcgtcctccattgcagaatatcaactcagttcagctaaaagaactcgaggaagaatgggtgaaactaccaacctctgcacctcgcccaactcgtttcctccgctcccagcaggaactggaagccaagttggaacaacaacagtcggccgggggggacgcagagggcggcggcgatgatggtgacgaggttccgcagatcgacgcatacgaactcctagaagcagtggagatcctttctaagcccaagacatttatgaccaagctgcggcaaaagaatggaaagcgcgagaagcgcccttggtcactctag

SEQ ID NO: 181996 - DNA, 5919 bp, Artificial Sequence
  derived and/or modified sequence
atgggagatgattctgagtggctgaagctgcctgtggaccagaagtgtgagcacaagctgtggaaggcccggctgagcggctatgaggaggccctgaagatcttccagaagatcaaggatgagaagagccctgagtggagcaagttcctgggcctcatcaagaagtttgtgacagacagcaatgctgtggtgcagctgaagggcctggaggccgccctggtgtatgtggagaatgcccacgtggccggcaagaccaccggggaggtggtgtctggagtggtgtccaaggtgttcaaccagcccaaggccaaggccaaggagctgggcatcgagatctgcctgatgtacattgaaattgaaaaaggagaggccgtgcaggaggagctgctgaagggcctggacaacaagaaccccaagatcatcgtggcctgcatcgagaccctgaggaaggccctgtctgaatttggcagcaagatcatcctgctgaagcccatcatcaaggtgctgcccaagctgtttgagagccgggagaaggctgtgagagatgaggccaagctgattgctgtggagatctaccgctggatcagagatgccctgcggccccccctgcagaacatcaacagcgtgcagctgaaggagctggaggaggagtgggtgaagctgcccaccagcgccccccggcccacccgcttcctgcggagccagcaggagctggaggccaagctggagcagcagcagagcgctggaggagatgctgagggcggcggagatgatggagatgaggtgccccagattgatgcctatgagctgctggaggccgtggagatcctgagcaagctgcccaaggacttctatgacaagattgaggccaagaagtggcaggagaggaaggaggccctggagagcgtggaggtgctgatcaagaaccccaagctggaggccggggactatgctgacctggtgaaggccctgaagaaggtggtgggcaaggacaccaacgtgatgctggtggccctggccgccaagtgcctgaccggcctggccgtgggcctgaggaagaagtttggccagtatgccggccacgtggtgcccaccatcctggagaagttcaaggagaagaagccccaggtggtgcaggccctgcaggaggccattgatgccatcttcctgaccaccaccctgcagaacatcagtgaagatgtgctggccgtgatggacaacaagaaccccaccatcaagcagcagaccagcctcttcatcgcccgctccttccgccactgcacagccagcaccctgcccaagagcctgctgaagcccttctgtgccgccctgctgaagcacatcaatgattctgcccctgaggtgagagatgctgcctttgaggccctgggcacagccctgaaggtggtgggggagaaggctgtgaaccccttcctggctgatgtggacaagctgaagctggacaagatcaaggagtgcagcgagaaggtggagctgattcatggcaagaaggccggcctggccgctgacaagaaggagttcaagcccctgcccggccgcacagctgccagcggggctgctggggacaaggacaccaaggacatcagcgcccccaagccaggccccctgaagaaggccccagctgccaaggccggcggcccccccaagaagggcaagccagctgcccctggaggagctggcaacacaggcaccaagaacaagaagggcctggagaccaaggagatcgtggagcctgagctgagcattgaggtgtgtgaggagaaggccagcgctgtgctgccccccacctgcatccagctgctggacagcagcaactggaaggagcggctggcctgcatggaggagttccagaaggctgtggagctgatggacagaacagagatgccctgccaggccctggtgaggatgctggccaagaagccaggctggaaggagaccaacttccaggtgatgcagatgaagctgcacatcgtggccctgattgcccagaagggcaacttcagcaagaccagcgcccaggtggtgctggatggcctggtggacaagattggagatgtgaagtgtggcaacaatgccaaggaggccatgacagccatcgccgaggcctgcatgctgccctggacagctgagcaggtggtgtccatggccttcagccagaagaaccccaagaaccagagcgagaccctgaactggctgagcaatgccatcaaggagtttggcttcagcggcctgaatgtgaaggccttcatcagcaatgtgaagacagccctggccgccaccaacccagctgtgaggacagctgccatcaccctgctgggcgtgatgtacctgtatgtgggccccagcctgaggatgttctttgaagatgagaagccagccctgctgagccagattgatgctgagtttgagaagatgcagggccagagccccccagcccccacccggggcatcagcaagcacagcaccagcggcacagatgaaggagaagatggagatgagccagatgatggcagcaatgatgtggtggacctgctgcccaggacagagatcagtgacaagatcaccagcgagctggtgtccaagattggagacaagaactggaagatcaggaaggagggcctggatgaggtggccggcatcatcaatgatgccaagttcatccagcccaacatcggggagctgcccacagccctgaagggccgcctgaatgacagcaacaagatcctggtgcagcagaccctgaacatcctgcagcagctggccgtggccatgggccccaacatcaagcagcacgtgaagaacctgggcatccccatcatcaccgtgctgggggacagcaagaacaacgtgcgggccgccgccctggccaccgtgaatgcctgggccgagcagacaggcatgaaggagtggctggagggggaggacctgtctgaggagctgaagaaggagaaccccttcctgcggcaggagctgctgggctggctggccgagaagctgcccaccctgcggagcacccccacagacctgatcctgtgtgtgccccacctgtacagctgcctggaggacagaaatggagatgtgaggaagaaggcccaggatgccctgcccttcttcatgatgcacctgggctatgagaagatggccaaggccaccgggaagctgaagcccaccagcaaggaccaggtgctggccatgctggagaaggccaaggtgaacatgcctgccaagccagccccacccaccaaggccaccagcaagcccatgggcggcagcgccccagccaagttccagcctgccagcgccccagctgaggactgcatcagcagcagcacagagcccaagccagaccccaagaaggccaaggcccctggcctgagcagcaaggccaagagcgcccagggcaagaagatgcccagcaagaccagcctgaaggaggatgaggacaagagcggccccatcttcatcgtggtgcccaacgggaaggagcagaggatgaaggatgagaagggcctgaaggtgctgaagtggaacttcaccaccccaagagatgagtacatcgagcagctgaagacccagatgagcagctgtgtggccaagtggctgcaggatgagatgttccacagcgacttccagcaccacaacaaggccctggccgtgatggtggaccacctggagagcgagaaggagggcgtgattggctgcctggacctgatcctgaagtggctgaccctgcgcttctttgacaccaacacctctgtgctgatgaaggccctggagtacctgaagctgctcttcaccctgctgtctgaggaggagtaccacctgacagaaaatgaggccagcagcttcatcccctacctggtggtgaaggtgggggagcccaaggatgtgatcaggaaggatgtgcgggccatcctgaacaggatgtgcctggtgtacccagccagcaagatgttccccttcatcatggagggcaccaagagcaagaacagcaagcagagagcagaatgtctggaggagctgggctgcctggtggagagctatggcatgaatgtgtgccagcccacccctgggaaggccctgaaggagattgctgtgcacatcggggaccgggacaatgctgtgagaaatgctgccctgaacaccatcgtgacagtgtacaacgtgcatggagaccaggtgttcaagctgattggcaacctgtctgagaaggacatgtccatgctggaggagcgcatcaagaggtctgccaagaggcccagcgctgcccccatcaagcaggtggaggagaagccccagagggcccagaacatcagcagcaatgccaacatgctgaggaagggccctgctgaggacatgagcagcaagctgaaccaggcccgctccatgagcggccaccctgaggccgcccagatggtgagaagagagttccagctggacctggatgaaattgaaaatgacaatggaacagtgcgctgtgagatgcctgagctggtgcagcacaagctggatgacatctttgagcctgtgctgatccctgagcccaagatccgggctgtgagcccccactttgatgacatgcacagcaacacagccagcaccatcaacttcatcatcagccaggtggccagcggggacatcaacaccagcatccaggccctgacccagctgttccagatcgagagcctggcccgggaggccagcactggagtgctgaaggacctgatgcacggcctcatcaccctgatgctggacagcagaattgaggacctggaggagggccagcaggtgatccgctctgtgaacctgctggtggtgaaggtgctggagaagagtgaccagaccaacatcctgagcgccctgctggtgctgctgcaggacagcctgctggccacagccagcagccccaagttcagcgagctggtgatgaagtgcctgtggaggatggtgcggctgctgcctgacaccatcaacagcatcaacctggaccgcatcctgctggacatccacatcttcatgaaggtgttccccaaggagaagctgaagcagtgcaagtctgagttccccatccgcaccctgaagaccctgctgcacaccctgtgcaagctgaagggccccaagatcctggaccacctgaccatgattgacaacaagaatgaaagtgagctggaggcccacctgtgcaggatgatgaagcacagcatggaccagacaggcagcaagagtgacaaggagacagagaagggggccagcagaattgatgagaagagcagcaaggccaaggtgaatgacttcctggccgagatcttcaagaagattggcagcaaggagaacaccaaggagggcctggccgagctgtatgagtacaagaagaagtacagtgatgctgacatcgagcccttcctgaagaacagcagccagttcttccagagctatgtggagcggggcctgcgggtgattgagatggagcgggagggcaagggccgcatcagcaccagcacaggcatcagcccccagatggaggtgacctgtgtgcccacccccaccagcacagtgagcagcatcggcaacaccaacggggaggaggtgggccccagcgtgtacctggagcggctgaagatcctgcggcagagatgtggcctggacaacaccaagcaggatgacaggcctcccctgaccagcctgctgagcaagccagctgtgcccaccgtggccagcagcacagacatgctgcacagcaagctgagccagctgcgggagagccgggagcagcaccagcacagcgacctggacagcaaccagacccacagcagcggcaccgtgaccagcagcagcagcacagccaacattgatgacctgaagaagaggctggagcgcatcaagagcagcaggaagtag

SEQ ID NO: 181997 - DNA, 906 bp, Artificial Sequence
  derived and/or modified sequence
atgggagatgattctgagtggctgaagctgcctgtggaccagaagtgtgagcacaagctgtggaaggcccggctgagcggctatgaggaggccctgaagatcttccagaagatcaaggatgagaagagccctgagtggagcaagttcctgggcctcatcaagaagtttgtgacagacagcaatgctgtggtgcagctgaagggcctggaggccgccctggtgtatgtggagaatgcccacgtggccggcaagaccaccggggaggtggtgtctggagtggtgtccaaggtgttcaaccagcccaaggccaaggccaaggagctgggcatcgagatctgcctgatgtacattgaaattgaaaaaggagaggccgtgcaggaggagctgctgaagggcctggacaacaagaaccccaagatcatcgtggcctgcatcgagaccctgaggaaggccctgtctgaatttggcagcaagatcatcctgctgaagcccatcatcaaggtgctgcccaagctgtttgagagccgggagaaggctgtgagagatgaggccaagctgattgctgtggagatctaccgctggatcagagatgccctgcggccccccctgcagaacatcaacagcgtgcagctgaaggagctggaggaggagtgggtgaagctgcccaccagcgccccccggcccacccgcttcctgcggagccagcaggagctggaggccaagctggagcagcagcagagcgctggaggagatgctgagggcggcggagatgatggagatgaggtgccccagattgatgcctatgagctgctggaggccgtggagatcctgagcaagcccaagaccttcatgaccaagctgcggcagaagaatggcaagcgggagaagaggccctggagcctgtag

SEQ ID NO: 181998 - DNA, 5919 bp, Artificial Sequence
  derived and/or modified sequence
atgggcgacgacagcgagtggctgaagctgcccgtggaccagaagtgcgagcacaagctgtggaaagctcggttatccggctatgaagaggccctgaaaatctttcagaaaattaaagatgagaagagccctgagtggtctaaattcctggggttaatcaaaaagttcgtcaccgactcgaacgcagtggtccagctgaaaggcctggaagcggcactggtgtatgtggagaacgcccatgtggccggaaaaactacaggagaggtagtgtccggagttgtgagcaaggtcttcaaccaacctaaggccaaggcgaaagagctaggcattgaaatctgtctaatgtatatcgagatcgagaaaggcgaagctgtacaagaagagcttctgaagggcctcgacaacaaaaatcctaagatcatcgtggcctgtatcgagactttaaggaaagcgctctctgagttcgggagcaaaatcattctgctgaagccaataatcaaagtactgccaaagctgtttgaatcacgggagaaggcagttcgggatgaggccaagctgatagctgtagagatttaccgatggataagagacgccctgcgccctcccctacagaacattaactccgtccagttgaaagagcttgaggaagaatgggtcaaactacccacaagcgcacctagacccacgcgcttcctgcgctctcagcaggagctggaggcgaaacttgaacaacagcagtctgccggcggggacgccgaaggcgggggtgacgatggcgacgaagtgccacagatagatgcttacgagttgctggaagcagttgaaattctgtccaagctcccaaaagacttctacgataagattgaggccaagaaatggcaggaacggaaagaggctctggagtccgtagaggtgttaatcaaaaaccctaaattggaagcaggggattatgccgacctggtgaaggcattgaagaaggtcgttggaaaagacactaacgtgatgctggtggccttagccgcaaagtgcttgacgggcctcgcagtgggtttacggaagaagttcggacagtacgcgggccatgtggttcctaccattctcgaaaagttcaaggagaagaagccacaggttgtccaagctttacaggaggctattgatgccatctttctcacaaccaccctgcagaacatttcagaggatgttttggccgtaatggacaacaagaacccaacaattaagcagcaaacatcccttttcattgccaggagctttagacactgcaccgcaagcacactgcccaagtcactgctgaagcctttctgcgcagccttgctcaaacatattaacgatagcgcccccgaggttcgcgacgccgcctttgaggccctgggaacagccctgaaagtagttggcgagaaagctgtcaacccattccttgccgatgtcgataagctgaagttagacaagatcaaagaatgctccgagaaggttgagcttatccatggaaaaaaggccggactggccgctgacaagaaggaattcaagcctctgcccggaaggacagcagcatctggggctgctggcgataaggataccaaggatattagtgctccaaaacccggcccgcttaaaaaggcgcctgcagctaaggcgggagggcccccaaagaaaggcaaaccggccgcccctgggggcgcgggcaatacaggcaccaagaacaagaaaggtctggagacaaaggagatagtcgaacctgagctgagtatcgaggtctgcgaggaaaaggcctctgctgttctgccgcccacttgtatacagctgcttgactcaagcaattggaaagagcggctcgcttgcatggaggaattccagaaagcagtggaactgatggaccgaactgagatgccctgtcaagccctggtacgcatgctggcaaagaagcctggatggaaagagactaatttccaagtgatgcaaatgaagttgcatattgtggccctgattgcgcagaagggcaatttctccaaaacctccgcacaggtggtgttggacggcctggttgacaaaattggggacgtcaaatgcggtaacaacgctaaggaggccatgaccgccattgctgaagcatgcatgcttccatggaccgctgagcaggtcgtctccatggctttttcacagaaaaacccaaagaaccaatccgagaccctgaattggctgtcaaacgccattaaagaattcgggttttcaggactgaacgtgaaagctttcatttcaaacgtcaagaccgcactcgctgccaccaatcctgctgttcgcaccgcagctatcacccttctaggtgtgatgtatctgtacgtgggaccttccctaaggatgttttttgaggacgaaaagcccgccttgctgagccagatcgacgccgagtttgaaaagatgcagggccagtcaccccctgctcctacccgaggaatctcgaagcacagcacctcaggcactgacgagggcgaggatggggacgaacccgacgatggcagtaatgacgtcgtcgacctgctgccacggacggaaattagcgataaaataacttcagaactcgtgagcaagataggtgataaaaattggaagatccgaaaggaaggccttgatgaggtggccggaatcataaacgacgctaaatttattcagccaaatattggtgagttgcctactgctttgaagggtagactgaacgacagcaacaaaattctggtacagcagacgctaaatatcttgcagcagcttgctgtagctatggggccaaacatcaagcagcatgtgaagaaccttgggatcccaatcattacggttcttggggattccaagaataacgtgagggccgcggctctcgccacagtaaatgcgtgggcggagcagacggggatgaaagaatggcttgaaggagaggacctttctgaggaactcaagaaggagaaccccttccttaggcaggaattactcgggtggttagccgagaagttgcctactctccggtcaactcctacagacttaatcttgtgcgtgccacacttgtactcttgtctggaagataggaacggtgacgtccggaagaaggcccaggatgcgttgcccttctttatgatgcacctgggttatgagaagatggccaaagccactggcaagcttaaacctacgtccaaagatcaagtcctggcaatgttagaaaaggcaaaggtgaacatgccagcgaagcctgcaccgcctaccaaggccacctccaaacccatgggcgggtccgcacccgccaaatttcagccagccagcgcccctgcggaggattgcatatctagctctacagagccgaaacctgatccaaagaaggctaaagcccccggcttgagtagtaaggctaaatccgcccagggaaagaaaatgccttcaaagacctccctgaaagaggacgaagataagtcgggaccaatctttattgtcgttccaaacggtaaggagcagcggatgaaagatgagaaaggcctcaaagtgttgaagtggaatttcacaacccctagggacgagtacatcgaacagctgaagacacagatgagtagctgcgtggcaaagtggctgcaggacgagatgtttcatagcgacttccagcatcacaacaaggctctggcggttatggtggatcaccttgaatcagagaaggaaggcgtgattggctgcctggacctgattctcaagtggctgaccctgaggttctttgacacaaacacttctgttctgatgaaggccctggaatacctgaagttgttgttcaccctgctctccgaagaggaatatcacctgaccgaaaacgaggcgagttcctttattccctatctggtcgtcaaggtgggcgagcccaaggatgtcatccggaaggatgtgagagcaatcctgaataggatgtgtttggtttaccctgcctccaaaatgtttccatttattatggaaggaactaaatccaagaactccaaacagagagcagagtgcctcgaggaactgggctgcttggtggagtcatacgggatgaatgtgtgccagcccacacccggcaaggccctgaaagagattgctgtgcacatcggagatcgggacaacgccgtgcggaatgccgcactcaacacaatcgtaactgtgtacaatgttcatggtgaccaggtgtttaaacttatcgggaacctatcagaaaaagatatgagtatgctggaggaacgcatcaaaagatccgctaaaaggccctcagccgctcccataaaacaggttgaggagaagcctcagagggctcagaatattagttccaatgccaatatgttgcgcaaagggccggcagaggatatgtcatccaagctgaaccaagcgcggtctatgtcagggcaccctgaggcggcccaaatggtcaggagagagtttcaactggatttggatgagatcgagaacgataacggaacagtgcggtgcgagatgccggagctggtccaacacaagcttgacgacatcttcgagcctgtgctcatacctgaacccaagatccgcgccgtctcaccccacttcgatgatatgcatagtaacacggcctcgacgatcaacttcatcattagccaggtcgcctctggtgatataaacaccagcatccaggcccttactcagctctttcaaatagaaagcctggctcgggaggccagcaccggggtcttaaaagatttgatgcacggcctgatcaccctcatgctcgactctcgtattgaggatctagaggagggccagcaagttattaggagcgtgaatctcctggttgtaaaggtattggaaaaatcagatcagactaacatactcagcgccctcctggttctgcttcaagattctctgctggcgaccgcctccagcccaaaattcagtgaacttgtgatgaaatgcctatggcggatggtaagactgctgccggacactattaattccatcaatttggaccgtatcctacttgacatccatatctttatgaaggtgtttccaaaagaaaagctcaaacagtgcaagtcagaatttccaataaggaccctgaaaacactgctgcatacactatgtaaactaaaaggaccgaaaatactggaccacctgactatgatcgataacaagaacgaatctgaactagaggcccacctttgtagaatgatgaagcactctatggatcaaacgggatccaaatccgacaaagagaccgaaaaaggagccagccgcatcgacgaaaaaagttccaaagccaaagtcaacgattttctagccgagatctttaaaaaaataggaagcaaggagaatacaaaagaaggcttagccgagctgtacgagtacaagaaaaaatatagtgatgccgatatcgagcctttcttaaagaacagttcccaattcttccagagctacgtcgagagaggcctgcgggttattgagatggaaagggaaggaaagggacgaattagcacatccaccgggatttcccctcaaatggaggttacatgcgtgcctacgcccacatcgactgtgtcatcaatcggtaatacaaacggagaggaagtggggccctcggtgtatctggaacggctgaaaatcctgcgtcagagatgtggactagataacactaaacaggatgatcgccccccgttaacctccttgctcagcaagcctgccgtgcccacagtcgcaagctcgacagacatgctccactccaaactctcccagctgcgtgagagtagagaacaacatcagcattcagatctggactctaaccagacccattcaagcgggacagtgactagcagttcgtctactgctaatattgatgatctcaagaagcggctggaaaggatcaagtcaagtaggaaatag

SEQ ID NO: 181999 - DNA, 5919 bp, Artificial Sequence
  derived and/or modified sequence
atgggcgacgacagcgagtggctgaagctgcccgtggaccagaagtgcgaacacaagttgtggaaggcccgcctgtccggatacgaagaagcactgaaaatctttcagaaaatcaaagacgagaaaagtccggagtggagtaagttcttggggctcataaagaagttcgtgactgattcaaatgcagtcgtgcaactgaagggactggaggccgccctcgtctacgtggaaaacgcccacgtcgcgggcaaaacaaccggggaagtcgtctccggtgtagtatcgaaggtgttcaaccagcctaaagccaaagccaaggagctgggtatagagatttgtctgatgtacattgagatcgaaaagggagaggctgtgcaggaggagctactgaagggattagacaataagaacccaaaaatcatagtggcttgcatcgagacgctcaggaaagccttgagtgagttcggttctaaaattatcctgctgaagccaatcattaaggttttgcccaaactatttgaatcccgcgagaaggccgtaagagatgaggctaagctgattgcagtcgagatctatagatggatccgcgacgcattgcggccaccactccaaaatattaattccgttcagctcaaggaactcgaggaagaatgggtaaagcttccgacatcagccccacggccgacacgcttcctgcgttcccagcaggagctggaagctaagctagagcaacagcagagcgccggcggggacgcagaagggggcggcgatgatggggacgaagtcccacagatcgatgcttacgagttattggaggccgtcgaaattctgtcaaagctgcccaaggacttttacgataaaattgaagcgaagaaatggcaggaaagaaaagaggccctggaaagcgtggaggtgctgatcaaaaatccaaaactggaagccggagactacgccgacctggtaaaagccctgaagaaggtggtgggcaaggacactaacgtgatgctggtggccctggccgctaagtgtcttactgggttggccgttgggctgagaaagaaatttggccaatacgcaggtcacgtggttcctacgatcttggaaaaatttaaggagaagaaacctcaggtggttcaggccctacaagaagccatcgatgctatattcctcaccactaccctgcagaatataagtgaggacgtcctcgccgtcatggataacaagaaccctactattaagcaacaaactagtctctttattgctaggagttttagacactgtactgctagtaccctgcccaaatctctccttaagcccttctgcgccgcgctgctcaagcatattaatgactctgcacctgaggtgagagatgcggcattcgaggcactaggcacagctctgaaggtggtgggcgagaaagccgtcaaccccttcttagccgatgtggataaactgaaactggataaaattaaggagtgctcagagaaggtagagctaatccatggcaagaaagcgggtctcgccgctgacaagaaggagttcaagcccctgccaggaagaacagccgcctcaggagcagccggcgataaagacaccaaggatatctctgcccccaaacctggcccattgaagaaggcccctgccgctaaagccggagggcccccaaaaaagggaaaacctgccgcacccggcggtgccgggaacactggcacaaaaaataagaaggggttggagacgaaggaaattgtggaacccgaactttctatcgaggtatgcgaagagaaagcctcagccgtactaccccctacctgcatacaacttttggatagctcaaattggaaagagcggctcgcctgtatggaggagttccagaaagcggttgagttgatggaccgcaccgagatgccatgccaggctctggtccgcatgctggccaaaaagcccgggtggaaagaaaccaatttccaggtaatgcaaatgaagctccatattgtggctctgatcgctcagaaaggtaatttctcaaaaacctcagcccaggttgtattggacgggctggtggataaaatcggcgatgtgaaatgtggcaataacgccaaggaggccatgacagcaatcgctgaggcatgcatgcttccttggaccgccgagcaggtggtgtcaatggctttctctcagaagaatcctaagaaccagagcgagacactcaactggctgtccaacgccattaaagaattcgggtttagtggactgaatgtaaaagcttttatttcgaacgtcaagactgccctggccgccaccaatccagccgttcgaacggccgctatcacacttctgggcgtcatgtatttatacgtcggcccctctctgcgcatgtttttcgaggatgagaagccagcccttctgtcccagatcgatgccgaatttgaaaagatgcagggccagagcccgccagctcccacaagggggattagtaagcactcgacgtccggcacggatgaaggcgaggatggcgatgaacccgacgatggcagtaacgacgtggtcgaccttctgccacggacagagatatccgacaagatcacgagcgagctcgtttccaaaattggtgacaagaattggaaaatcagaaaagagggcctggatgaggttgctgggatcataaatgatgctaaatttattcagcccaatatcggagagttaccaacagccctgaaaggacggcttaatgattccaacaaaatcctggtccaacagactctcaatattcttcagcagctggccgttgccatgggaccaaacatcaagcagcatgttaagaacctgggtatccctatcattactgtccttggggattccaagaataatgtccgagccgcagcgctggccacagtgaatgcctgggccgagcagactggaatgaaggagtggttggagggagaggacctgtctgaggagcttaaaaaggagaacccctttttaaggcaagaacttctcggctggctggccgagaagctccctactctcagaagcacgcccacagatctcattctctgcgttccccatctgtattcatgcctggaagatcggaatggagacgttcggaagaaggctcaggatgccctgcctttctttatgatgcatctagggtacgaaaagatggcaaaggccacaggaaagttgaaaccaacctcaaaggaccaggtcctggcaatgctggagaaagctaaggttaatatgccagctaagccggcgccccccacgaaggccacaagtaagcctatgggagggtcggcccccgcgaagtttcagccagcctcagcgccggccgaagactgtattagcagctccactgagccaaaacccgacccaaaaaaggctaaggcgccaggcctgtcttccaaggctaaaagtgcccagggtaaaaagatgcccagtaaaacctcactgaaggaagacgaggacaagtctgggcccattttcatcgtagtccctaacggcaaagaacagcgaatgaaagacgagaagggtctcaaagtgctgaagtggaacttcacaacccctcgcgatgaatacatcgaacagctcaaaactcagatgagttcctgcgtggccaaatggcttcaggatgagatgttccatagcgactttcagcatcacaacaaagccctggcggtgatggtggaccaccttgagagtgagaaggagggcgtcatcggttgcctggacctaattctgaagtggctgaccctacggttcttcgacaccaatacatccgtgcttatgaaggccttagagtaccttaaactcctcttcaccttgctaagcgaagaggaatatcacttgacagagaatgaggcctcaagctttatcccataccttgtggtgaaggtgggtgagccaaaggatgttatccgcaaggatgtgagagccattttaaatcgcatgtgcttggtatacccggcctctaaaatgtttccctttatcatggaggggactaagtctaaaaatagcaagcagcgtgctgaatgtctggaggagctcggatgtctggtggagtcttacggcatgaacgtatgccagcctaccccaggcaaagctttaaaagagatcgccgttcatatcggcgatcgcgacaatgccgtgcgcaacgccgctctcaatactattgtgactgtctataatgtccatggcgatcaggtgttcaaactgattggcaatctgtctgagaaagacatgtcaatgttggaagagaggatcaaaagaagcgccaaaagaccttccgctgcccccatcaaacaagttgaagagaaaccgcagcgtgcacaaaatattagctccaacgccaacatgctgcgaaagggtcccgcagaggatatgagctctaagctgaatcaagcacggtccatgagcggtcaccctgaagccgcccagatggtgcgacgagagtttcagctcgatctcgatgaaatcgaaaacgataatggaaccgtaaggtgtgaaatgcccgaactggttcagcacaaactggatgatatctttgagccggtgttgatccccgagccaaagatccgcgccgtcagtccacatttcgacgatatgcactctaacactgcgtctaccataaattttattatttcccaggtagccagtggggatattaatacctccattcaggcacttacgcagctattccagatagaatcactggcgcgagaggcttccaccggtgtgcttaaggacttgatgcacggtctgattactctgatgctcgacagcaggatcgaggatctggaagaaggacaacaagtgattagaagcgtcaacttgctcgtagtcaaagttctcgaaaagagcgaccagaccaatatcctgtcagcactgctggtgctgctgcaggacagtctcttagccacagccagttcgcctaaattcagcgagctggtcatgaagtgtctatggcggatggtgcggctcctgcctgatacgatcaattccatcaatttggacagaattcttctggacatacacatctttatgaaagtatttccaaaggaaaagttaaaacagtgtaaaagtgaattccccatccggaccctcaaaaccctcctgcataccctttgcaaacttaagggccccaagattctggatcacctgactatgatcgacaataagaatgaatcagagctggaagcacatctttgtcgcatgatgaagcactctatggaccagactggttcaaagagcgacaaggaaactgaaaagggagcaagtcgcattgacgagaaatcatcaaaggccaaggtgaacgatttcctcgcggagatctttaaaaagataggatccaaagagaatactaaggagggtctggcggaactctatgaatacaagaagaaatactccgacgctgacatagagccgttcctgaaaaatagttcccagtttttccagtcttacgtggagagaggcctgagggtgatagagatggaacgtgagggtaagggccgcatttctacctccaccggcatatcgccccagatggaggttacatgtgtacccacccccacttccacggtcagtagcattggaaacacaaacggagaggaggtcggacctagcgtgtatctcgaacggctgaagatattgaggcagaggtgcgggctggacaatacaaaacaggatgatcgcccaccattgacctcactgctgtccaaacctgcagtaccaacagtcgcatcctccacagatatgctgcacagtaagctgagtcagctccgggaaagtcgcgaacaacatcaacactccgatctggactccaaccagacccacagcagcggaacagtcacctctagctcaagtacggccaacattgatgacttgaaaaagaggttggagaggataaagtcttcccgaaaatag

SEQ ID NO: 182000 - DNA, 906 bp, Artificial Sequence
  derived and/or modified sequence
atgggcgacgacagcgagtggctgaagctgcccgtggaccagaagtgcgaacataagttgtggaaagcaaggttatctgggtacgaagaggccttaaaaattttccaaaaaataaaggacgaaaagtctcccgagtggtccaagttcctcggcctgattaaaaagtttgtgaccgatagcaatgcagtcgttcagctgaaggggctggaggctgcgctggtgtatgtggagaatgcacacgtcgccggcaaaacaaccggcgaggtcgtctccggggtcgtgtccaaggtttttaaccaaccaaaggccaaagccaaagaactgggcattgaaatctgtttgatgtacatcgagattgagaaaggggaggctgtgcaagaggagctcctgaaaggccttgataataagaatccaaagatcatcgtcgcttgtatagagactctgcggaaagcactgtcggaattcggcagtaagattatccttctgaagcctatcatcaaggttctgcctaaactgtttgagtcaagagagaaggccgttcgcgatgaggctaaactgatcgcagtggagatttaccggtggatcagggatgccttaagacccccattacaaaatatcaattcagtgcagctgaaggagctcgaggaggagtgggtgaaacttcccactagtgcaccacgccctactcgctttctcagaagccagcaggagctggaagcaaaactagaacagcaacagtccgcgggcggagacgctgagggaggcggcgacgatggggatgaggttcctcagatagacgcttacgagctcctggaggctgtggaaatcttgtctaagcctaaaacctttatgactaagcttcgacagaaaaacggcaaacgggagaaaaggccctggtcactatag

SEQ ID NO: 182001 - DNA, 5919 bp, Artificial Sequence
  derived and/or modified sequence
atgggtgatgattcagagtggcttaaacttcccgtggaccaaaagtgtgagcataaactgtggaaggccaggctttccggatacgaggaggccctgaaaatatttcagaaaattaaagatgagaagtcccccgagtggtccaaattcctggggctaatcaaaaaatttgtgacggactccaatgctgtggtacagcttaagggcctggaggccgctctggtttacgtcgagaacgcacacgtggcaggaaaaacaaccggtgaggttgtgtctggtgtcgtgtcgaaggtgttcaaccaaccaaaagcgaaagctaaggagctgggaatagagatttgtctaatgtatatcgaaatagaaaaaggggaggcagttcaggaagaattactcaaaggactcgataataagaacccaaagataatcgtcgcctgcattgaaaccctgcgaaaagccctgagcgagtttggaagcaagatcattcttctcaagcctatcatcaaagtcctcccaaagctctttgagtcacgcgaaaaagccgtgagagacgaggctaagctcatcgccgtggaaatctacagatggatcagagacgcactaaggcccccactgcaaaacataaacagcgtacaactgaaagaattggaggaagaatgggtaaagcttcctacttcagcacctcggcctacacgatttctacggagccagcaggagttggaagccaaattggaacagcaacagtccgctgggggtgatgctgaaggcggaggggatgacggagacgaggtgccccaaatcgacgcgtatgaactgcttgaagcggtcgaaatactgagcaaattaccaaaggatttttacgacaaaatagaagccaaaaaatggcaagagagaaaagaggcactcgagagcgttgaggtgctgattaagaatccaaagttggaagccggagattacgccgacctggttaaggcactgaaaaaagttgtggggaaggataccaacgttatgctggtggcgctcgcggcaaagtgtctgacagggttggccgttggccttcgcaagaaattcggacagtacgcaggacacgtggtcccaactattctggagaagtttaaggaaaagaagcctcaggtggtgcaagcactccaggaggctatcgacgcaattttcctgactacaaccttacagaacatctcagaggatgtacttgctgtgatggacaataaaaacccaacgatcaaacagcagacctccttattcatcgcgaggtcgtttagacactgcaccgcttctaccctgccaaagagcctccttaaacctttctgtgccgcactactaaaacacattaacgatagcgcccctgaagtgagagatgcggcattcgaggcattgggcacagctctgaaagtggtcggtgaaaaggctgttaacccctttttagccgacgtcgataagcttaagctcgataagatcaaagagtgttccgaaaaagtggagctgattcacggcaaaaaggcagggttggccgctgataagaaagagttcaagcccctccccggacggactgctgctagcggcgctgccggagataaggataccaaggatatcagtgctccgaaaccaggtccgctgaaaaaagctcctgctgctaaagcaggagggcctcccaagaagggcaagccagcggcaccaggcggagccggaaacactgggacaaagaacaagaagggcctcgagactaaggaaatcgtcgaacccgagctttcaatcgaagtttgcgaagagaaagctagtgcagtgctgccacctacgtgtatacaattactcgatagtagcaactggaaagagcgactggcttgcatggaggaattccagaaggcagttgaactgatggaccgcacagaaatgccctgtcaggccctggttcggatgctagccaagaagccaggatggaaagaaaccaactttcaggtcatgcagatgaagctccacatcgtcgccctgatcgcccagaaaggcaatttcagcaagactagcgcgcaggtggtcctcgatggactggtcgataagataggggacgtgaagtgcggcaacaatgccaaagaagccatgactgccatcgctgaggcatgtatgcttccctggactgctgagcaggtcgtcagtatggctttctcccaaaagaatcctaaaaaccagtccgagacactgaactggctgagtaacgccatcaaggagtttgggttcagcggactgaatgtaaaggcctttatcagcaatgtgaaaacagctctggcggcaacgaacccagccgtacggaccgcagccatcaccctcttaggggtcatgtacttatacgtcggcccatccctgagaatgttctttgaggacgaaaagccggctctgttgtcacagatcgacgctgaatttgaaaaaatgcaggggcagagtccaccggctcccaccaggggtatatctaagcatagcacgtccgggacggatgaaggcgaagacggcgatgagcctgacgatggctccaatgacgtcgtagatctgctcccaaggactgagatctccgacaaaataacaagcgaattggtgagcaagatcggggataaaaactggaaaatccgaaaggagggcttagacgaggtcgccggtattattaatgacgccaagtttattcagcccaatatcggggaactgcccacagctcttaagggccgactgaacgattccaataagattctggtccagcagactcttaacatacttcagcagttagcggtcgctatgggaccaaacattaagcagcacgtgaaaaatctcggcatacccatcataaccgtgctgggtgactccaaaaataatgtgcgtgccgctgccctcgctaccgtcaacgcttgggccgaacagacgggaatgaaggaatggctggaaggcgaagatctgtctgaagagctaaagaaagagaatccttttctccggcaggaactattgggttggcttgccgagaagttgccaaccctacgaagcactccaaccgacctgatcctgtgcgtgccccatctatattcttgcttggaggaccgcaacggagacgtccgtaaaaaggcacaggacgcactcccattctttatgatgcacctcgggtacgagaaaatggccaaagccacagggaagcttaagcctacttctaaagaccaggtcctggccatgcttgagaaagcaaaggtgaatatgcctgcgaagccagctcccccaacgaaggcaacttccaagccgatgggtgggagtgcccctgccaaatttcagcctgccagcgcccctgctgaggattgcatttcgtcatccacagaacccaagccagaccctaagaaggccaaagcacccggattatcaagtaaggctaaatccgctcagggcaaaaaaatgccctccaagacttctctcaaggaagacgaagacaagtccggcccaatctttattgtggtccctaatgggaaggaacagcggatgaaggatgagaaagggttgaaagtgctgaaatggaactttaccacgccacgagatgaatatatcgagcagctgaaaacccagatgtccagttgtgtagccaaatggctgcaggacgaaatgttccattctgactttcagcatcacaataaggctcttgcagtcatggtagatcacctggagtccgaaaaagaaggcgttatcgggtgcctcgaccttattctgaaatggctcaccttgaggtttttcgacacaaacactagtgtgcttatgaaagccctagaatacttgaagttgttgtttactttgttgtccgaagaggagtatcatcttaccgagaatgaagcttcctcttttatcccctatttggtggtgaaagttggagaaccgaaagacgtgattaggaaggatgttagggccatccttaacaggatgtgtctggtctaccccgcttccaaaatgttcccttttattatggagggcaccaagagtaaaaattctaagcagcgcgctgagtgtctcgaagaattggggtgcttggtggagagctatggcatgaatgtgtgtcaacccacgcccggaaaggcgctaaaggaaatcgcagttcacataggcgatcgggacaacgctgttcgtaacgctgccctgaataccattgtgacagtgtacaacgtgcacggggatcaggtgttcaagctcatcggcaacctatcagagaaagatatgtctatgctagaagagaggatcaaacgcagtgctaaacgtcctagcgctgcacctatcaaacaggtagaagaaaagccgcagagggcccaaaacattagtagtaacgccaacatgcttaggaagggtcccgcagaggacatgagcagcaaactgaaccaggctaggtctatgagcgggcaccctgaggctgcccagatggtacgtcgagaattccagctcgacctggacgaaatagaaaatgacaacgggacagtacgatgcgagatgccagagttggttcagcataagctcgatgacattttcgagcccgtcctgatacctgagcccaagatccgcgctgtatctccacattttgacgatatgcacagcaacacagcgagcaccataaacttcattatttcacaggtggccagcggggatattaacacctccattcaggctctgacacagctctttcagattgaatctctggctagggaagcgagtaccggcgtgttgaaagacctcatgcatggcttaatcaccctaatgctggattcacgcatagaggatctcgaggagggccagcaggtgattagatccgtcaacttgctggtcgtgaaagtgctggaaaaatcagatcagactaatatactgagcgctctgctggtgcttctgcaggacagcctgctggccacagccagttcccctaagttttcagaacttgtaatgaagtgtctgtggcgaatggttcgcctgctgcccgatactattaactccatcaatctggaccggatactcctggacatccatatttttatgaaggttttccctaaggagaaacttaagcagtgcaagtcagagtttccaatcagaaccctgaagacactactgcatactctctgcaagttaaaagggcctaagattctggatcaccttactatgattgataacaagaacgaatcagagctggaagctcacctgtgtagaatgatgaaacacagcatggaccaaaccggtagcaagagcgacaaggaaactgaaaaaggagcctctaggatcgatgaaaaatctagtaaggctaaagtgaatgatttcctggccgaaatcttcaagaagatcggctctaaagagaacacaaaagaaggcctggccgagctgtatgagtacaagaagaagtacagcgacgctgatatcgagcctttcctcaagaactccagtcagttttttcagtcttatgtggagcgcggtctccgcgttatcgagatggagcgggaaggcaagggcaggatctccacatccaccgggatcagtccacagatggaggtgacgtgcgtcccaacgcccactagcaccgtgtcgtctatcggcaataccaacggggaagaggtaggtccttctgtctacctggagcgattgaagattctcagacaaagatgtggtctagataacacaaaacaagatgatcgcccacccttgacttccttattaagcaaacctgctgtccctactgtggcgagttccacggatatgctgcactcaaagctctcccagctgagggagtcacgcgaacagcaccagcactccgacctcgacagcaaccagacccacagcagcgggaccgtgacatcctctagcagcacagcaaatattgacgatctgaagaaacggctggagaggatcaaatccagcaggaaatac

SEQ ID NO: 182002 - DNA, 5918 bp, Artificial Sequence
  derived and/or modified sequence
atgggtgatgattcggagtggctaaaactccccgtggatcagaagtgtgagcataagctgtggaaggcccgtctgagcggatacgaagaggctctaaaaattttccagaagattaaagacgaaaaatccccagagtggagtaaatttctgggcttgatcaaaaagtttgtcaccgacagtaacgcggtggttcagctgaaaggattggaagcagcactcgtttatgtggaaaacgctcacgtggccggtaaaaccaccggcgaggtggtctctggggtggtgtctaaggtgtttaatcagccaaaagctaaagccaaggagttgggaattgaaatttgtctgatgtatatcgagattgagaagggggaagctgtgcaggaagaattgctgaagggtctggacaacaaaaaccctaaaattatcgttgcttgcatcgagacactgaggaaggctttaagcgagttcggatctaagattatactgctgaaacccattattaaggtgctgccaaagctgtttgagagtcgagagaaggcagtgcgcgacgaggccaagcttatcgccgttgagatctaccgctggattcgtgacgccttacggccacccctgcaaaatataaacagtgtgcagcttaaagagctggaggaggagtgggtgaagctgcccacaagtgcacctcgccctacgagatttctgcgctcccaacaggaactggaggctaaattagaacagcagcaatccgccggaggcgatgctgaagggggtggtgacgacggtgacgaggtgccccagatagatgcttatgaactgcttgaggctgtggagattctctcaaaattaccaaaggacttctatgataagatcgaggcaaaaaaatggcaggagcgtaaggaggccctggagtccgtcgaggtcttaatcaagaatcccaagttggaggcaggagattatgcagacctggtgaaggccctgaaaaaagtcgtcgggaaggatacaaatgtaatgctggtggccctggctgctaaatgcctgaccgggctggccgtgggcctccgtaagaaatttgggcagtacgcaggccatgtcgtgcccacaatcctggaaaagttcaaggaaaaaaaacctcaggtggtccaagcgctacaggaagctattgatgcgatatttctgacaacgacgctccaaaacatctcagaggacgtcttagcggtcatggacaataaaaatcccactattaaacagcaaacgagtttattcatagcacgatctttccgacactgtaccgcgagtaccctgcccaagagcctgctgaagcctttttgcgctgcattgctcaaacacattaacgactcggctccggaagttagggatgccgcattcgaggctctgggcacagccctgaaagttgtcggggaaaaggccgttaatcctttcttagctgacgtggataaactgaaactcgacaagataaaggaatgttccgagaaggtggaattgattcacggtaaaaaggcaggattggcagccgacaaaaaggaatttaagccactccctgggaggactgccgctagcggcgcagctggggataaagataccaaagacatttcagcgcctaaacctgggccactaaagaaagcaccagccgcaaaggcagggggtcctccaaaaaaggggaaaccagccgcaccgggaggcgctggcaacacaggtacgaaaaacaaaaagggactggagaccaaagaaatcgtggaacctgagctgtctattgaggtctgtgaggagaaagcctccgctgtgctccctcccacttgcattcagctgctagactcctcaaactggaaggagagattggcctgtatggaggaatttcaaaaggcagtcgaactcatggatagaaccgagatgccctgccaagcactggtgcggatgctggccaaaaagcctggatggaaggaaacaaatttccaagtaatgcagatgaaactgcatatagtcgctttgatagcacaaaaaggcaattttagtaaaacatctgctcaagtggtgctggacggactggtagataagataggtgatgtgaagtgtggcaataatgcaaaggaagctatgacagctatcgctgaggcttgtatgctgccctggacagcggagcaggtggtctctatggctttttcccagaaaaatccaaagaaccagtctgaaactctcaactggctgtcaaatgccatcaaagagttcggatttagtgggctaaacgttaaggcgttcatttcaaatgtgaaaactgcgctcgcggcaaccaatcctgcagtgcggacagcggctataaccctcttaggggtcatgtatctttatgttggccctagtctcaggatgttttttgaggatgagaaacctgcgcttctgagccagattgatgccgaatttgaaaaaatgcaaggccagtcccccccagcacccacccgcggaatatctaaacacagcacttccggtaccgacgaaggggaagatggcgacgagccggatgatgggtctaacgatgtagtggacctgctgccgcgtacagagatcagtgataaaattaccagtgagctcgtgtcaaagatcggcgacaagaattggaagatcaggaaagagggcttggacgaggtcgcaggcatcatcaatgatgcaaagttcattcagcctaatattggcgaactgccaactgccttgaaggggaggttgaacgacagcaacaagatcctggttcagcagaccctcaatattctgcaacaactggccgtggcgatgggaccaaatattaagcaacacgtgaaaaatcttggcattccaataatcacagtgcttggtgattcaaagaataacgttcgagccgcagccttagcaacagtgaatgcctgggcagagcagactgggatgaaggagtggctggaaggagaagacctcagcgaagaactgaaaaaggagaaccccttcttgcgccaggagctcttgggatggctggctgagaagctgcccacgttaaggtctacgcctactgatcttatcctgtgcgtcccccacctttactcttgccttgaggataggaatggagacgtgcgaaaaaaggcgcaggacgccctgccattctttatgatgcacctgggctacgagaagatggccaaagcaaccggaaagctaaaaccaacgtctaaggaccaggttctggcaatgctagagaaagcaaaagtcaatatgcccgctaaacctgcacctccaaccaaggccacttccaaacccatgggcggtagtgcacctgccaaatttcagcctgctagtgcacccgcagaggattgtattagttcgtccaccgaacctaagcctgacccgaaaaaggcgaaggcacctggcttgagctccaaggctaaatccgctcaggggaagaagatgccatctaagacttcacttaaggaagatgaggacaagtccgggcctattttcattgttgtgcccaacggaaaagagcagcggatgaaagatgaaaaagggctgaaggtgttgaagtggaatttcactacgcctagggatgagtacatcgagcagctcaagactcagatgagtagctgcgtagcaaaatggctgcaggatgaaatgtttcacagtgacttccaacaccacaacaaggctctcgccgtaatggtggatcacttggaatctgagaaagagggcgtgattgggtgtctcgatttgatcctcaaatggttgactctccgtttctttgacacaaacacctcagttttgatgaaagctttggagtacctcaagctgttattcaccctgctttccgaggaggaatatcatctcaccgagaacgaagcctcgagttttatcccctacctcgtcgtgaaagtaggtgagcctaaagacgttatcaggaaggacgtgagggccattttgaataggatgtgtcttgtgtaccctgcatcaaaaatgtttcctttcattatggaagggactaaaagcaagaactccaagcagcgcgctgaatgcttggaggaattggggtgtctggtcgaaagctatgggatgaacgtgtgtcaaccgacacctggaaaagccctgaaggaaattgccgttcacatcggcgacagagataatgccgtccgtaacgccgcacttaatacaatcgtgaccgtttacaacgttcatggcgatcaggtcttcaagctgataggcaacttatcagagaaagacatgtcaatgctcgaagagcgcattaagcgctctgccaaacgaccatccgccgcaccaatcaagcaggtggaagaaaagcctcagcgagcccagaacattagcagcaacgccaatatgctgagaaagggtccggctgaggacatgtctagcaaacttaaccaagccaggtccatgtctggccaccctgaggccgctcagatggtacgacgcgagttccagctggacctggacgagatcgagaatgacaacggaactgtccgttgtgagatgcccgaactggtgcaacacaagctggacgatattttcgagccagtgctcatacccgagcctaaaattagagccgtctctccacattttgatgatatgcacagcaataccgcttctacaattaactttataatcagccaagtcgctagcggcgatattaacactagcatccaggctttgacccagctcttccaaatcgaatctctcgctcgcgaagcctcaactggcgtgttaaaagatctaatgcacggtctgataactcttatgctggatagccggattgaggatctggaggagggacagcaagttatcagaagcgtgaaccttcttgtggtgaaggtgctcgaaaagtccgaccagaccaacatactctctgctctcctcgtattgttacaggattctctgctagctacagcctctagccccaagttctcagagctggttatgaaatgtctgtggcgcatggtgagacttctgcctgacacaatcaattccatcaatctggaccgtattctgttggacattcacatctttatgaaagtgttccctaaagagaagcttaagcagtgcaagtcagaattccctatcagaactctcaagaccttgctccataccctttgcaagctgaaaggtccgaaaatattagaccatctcacaatgatcgataataagaacgagagcgaacttgaggcacacctgtgtcgcatgatgaaacattccatggaccagaccggatctaaatcggataaagagaccgaaaaaggtgcaagccgcatcgatgagaagagctctaaagccaaggtcaatgacttcctggcagagatctttaaaaagatcggcagcaaggagaatacgaaagagggtctggccgagctatacgaatacaaaaaaaagtactctgacgctgacattgagccattcttaaaaaattcctcgcaattctttcaatcctacgtagagcggggtctgcgggtaatcgagatggagagggaaggaaaggggaggatcagcacttcaacgggcatttccccccagatggaagtgacatgtgtgcctaccccgaccagcacagtgagcagcatcgggaacaccaatggcgaagaggtgggcccttcggtgtatctagagcgacttaaaatacttcggcagcgctgtggtctcgacaatacaaaacaggacgacaggccacccctcacgagcctgctctcaaagcctgccgtccccactgtggcaagttctacagatatgctacattcaaaactgagccagctgagggaatcccgcgaacagcatcaacactccgacctggatagcaaccagactcactcatcaggcacagtcacttctagctcaagtactgcaaacattgacgacctcaagaagagactggagcgaataaagtccagcagaaagta

SEQ ID NO: 182003 - DNA, 906 bp, Artificial Sequence
  derived and/or modified sequence
atgggggatgactcggagtggctaaaactgcctgtagaccagaagtgcgagcataagttgtggaaagcgaggctctccgggtacgaggaggctcttaagatctttcagaagataaaggacgagaaatctcccgagtggagtaaatttctcggccttatcaagaaattcgttaccgatagcaatgctgttgtacagttaaaaggactggaggcggctcttgtgtatgtcgaaaacgctcacgtggcaggtaaaactacaggcgaggttgttagtggcgtggtgagtaaggtcttcaatcagccaaaggccaaggcgaaggagctgggcatcgaaatttgcctgatgtatattgagatagagaaaggcgaagcagtgcaggaagagttactgaaaggtcttgacaataagaatccaaagattattgtagcgtgcattgaaacattaaggaaggcacttagtgagtttggctctaaaatcatcctgcttaagcctatcataaaggtactcccaaagttattcgagagtcgcgagaaggcagtgagggacgaggcaaagctgatcgctgtggagatctaccggtggatacgggacgccctgagaccgcctcttcaaaacataaactcagtgcagctgaaggagctggaagaagagtgggtcaaactgcctactagcgcccctagacctacaagatttctcaggagccagcaggagctggaggccaagctggagcaacagcagtccgctggaggagatgccgaggggggaggggacgacggtgatgaggtgccacagatagatgcttacgagctgctcgaggctgtagaaatcctttccaagccaaaaactttcatgaccaagttgcggcagaagaacggaaagcgtgaaaaaaggccatggagtctctag

SEQ ID NO: 182004 - DNA, 6516 bp, Artificial Sequence
  derived and/or modified sequence
actgcggggtgtgcggcggcccaagcggtttcaaacggcttagagcaggccgcttggttctgacccagctgaggaaatactcttaattctaaggaaaacctggaagcacaatgggagatgacagtgagtggttgaaactgccagttgatcagaaatgtgaacacaagctgtggaaagcaaggttaagtgggtatgaagaggccctgaagatcttccagaaaataaaggatgaaaagagcccagagtggtccaaatttttaggattgatcaaaaaatttgtcactgattccaatgcagtggttcaattgaaaggattagaagctgcacttgtttatgttgaaaatgcccatgtagcaggaaaaaccacaggagaagttgtgtcaggtgttgtaagtaaggtgttcaatcaacctaaagctaaagccaaggagctgggcatagagatctgtcttatgtacatagagattgagaaaggagaggctgttcaagaagagctcctgaaaggcttggacaataagaatcccaagatcatagtggcctgtatagagacactgaggaaagccttaagtgaatttggttccaaaatcatcttgcttaagccaattatcaaagtgttgccaaaactctttgagtctcgagagaaggctgttcgagatgaagccaaactaattgctgtggagatttacagatggattcgggatgctctgagacccccattacaaaatataaactctgttcagttgaaagaactagaagaagaatgggtcaaactgccaacaagtgctcctagacctactcgatttcttcgttcccaacaagaactagaagctaaattggaacaacaacagtctgctggtggagatgctgaaggaggtggtgatgatggtgatgaggtgccacaaatagatgcttatgagcttttagaagctgtagaaatcctttccaaacttcccaaagacttttatgacaaaattgaggcaaaaaaatggcaagagagaaaagaggccctggagtctgtagaagtactaataaaaaaccccaaactggaagctggcgattatgcagatttagtaaaagcattaaagaaggttgttggaaaggacaccaatgtcatgttggtggctttggcagcaaaatgtcttactggcctggctgttgggctaaggaagaaatttggacaatatgcaggacatgttgtgccaaccatcttggagaaattcaaagagaagaaacctcaagtggtacaagccctgcaggaggcaattgatgcaatcttccttactaccacactacagaacatcagtgaggatgttttagcagtaatggataataaaaatccaaccatcaagcagcagacatctctttttattgcaagaagtttccgccactgcactgcttctaccctgccaaagagcttgctaaagcccttttgtgctgcactacttaagcacatcaatgattctgctcctgaagtcagagatgccgcatttgaagcattgggtactgctttgaaggtggttggcgagaaagcagtaaacccattcctagctgatgtggacaaactcaagcttgataagatcaaagaatgttcagaaaaggtagaactgatacatggtaagaaagctggactagctgctgataagaaggaattcaaacctctgcctggaaggactgctgcttcaggggctgcaggagataaggacacaaaggacatttctgcacccaaaccaggacctctaaaaaaggcacctgctgctaaggctggtgggccaccaaaaaaggggaaaccagctgcaccaggaggcgcagggaatactggaaccaagaacaagaaaggactggagactaaagaaatagtggagcctgagctctcgatagaagtatgtgaagaaaaagcttcagctgttcttccccctacctgtatacagcttcttgacagcagtaactggaaagaaaggctggcttgtatggaagagttccagaaggctgttgagctaatggaccgaactgaaatgccatgccaggcattagtgaggatgctagccaagaaacctggatggaaagaaactaattttcaggtgatgcaaatgaagcttcatatagttgctttgattgcccagaagggaaatttttccaaaacgtcagctcaggttgtattagatggccttgtggacaagattggagatgtgaaatgtgggaacaatgcaaaagaagctatgacagcaatagccgaagcctgtatgttaccatggactgctgaacaggttgtgtcaatggctttctcacaaaagaatcccaaaaatcagtcagaaactctgaattggctatcaaatgccataaaagaatttggtttttctgggttgaatgtcaaagctttcattagcaatgtgaagacagctcttgctgcaacaaacccagctgtgaggactgctgccataaccctgcttggcgtgatgtatctgtatgttggtccctctttgcgaatgttctttgaggatgagaagcctgccctcctatcccagatagatgcagaatttgagaagatgcagggacaaagtccacctgctccaaccagaggaatttccaagcatagcacaagtggtacagatgaaggagaagatggagatgaaccagatgacgggagcaatgatgtcgttgatcttttgccgaggacggagatcagtgataaaatcacttcagagttggtatctaagattggtgataagaattggaagattaggaaagaaggcctagatgaagtggcaggtattattaatgacgcaaaatttatccaaccgaatataggtgaacttccaactgccttgaagggtcgactcaatgattcaaataaaatcttggtacagcaaacgctgaatatcctgcaacaactggcagtagccatgggcccaaatattaagcaacatgtaaaaaatttaggcatccctatcatcacagtccttggagacagcaagaacaatgttcgagctgctgccctagcgactgtgaatgcttgggcagaacagactggcatgaaggaatggctggaaggagaagatctttctgaagagctcaaaaaggaaaatcctttcttgaggcaagagcttctgggctggctggctgagaaactacctactcttcgttccacccctacagaccttatcctttgtgttcctcatctctactcctgcctagaagatcgaaatggagatgtgcgaaagaaggcccaagatgccttgccattcttcatgatgcatttaggatatgaaaaaatggccaaggctactgggaaactaaagccaacttctaaagatcaggtattggccatgctagagaaagccaaagttaacatgccagccaagcctgctccacccactaaagcaacttctaaaccaatgggagggtccgctccagccaaattccagcctgcatcagcacctgctgaagattgtatttccagcagtacagaacccaaacctgatccaaaaaaggccaaagctccaggattatcctctaaagcaaagagtgcacaagggaagaagatgccaagcaaaaccagcttaaaggaggatgaagacaaatccgggcctatttttattgttgttccaaatggaaaagagcaaaggatgaaagatgaaaaaggattgaaggtgctaaagtggaattttactaccccacgggatgaatacattgagcaactaaagactcaaatgtctagctgtgtggctaaatggttacaagatgagatgtttcactcagactttcagcatcataacaaagcccttgctgttatggttgatcacttggagagtgaaaaagaaggagttattggttgcctggatcttatcttaaagtggcttaccctgaggttttttgacaccaatacaagcgtcctgatgaaagcactagaatatttaaaattgctcttcaccttgctaagtgaagaagaatatcatcttactgagaatgaagcatcttccttcatcccctatcttgtcgtcaaggttggagaaccaaaggatgtcattcgtaaagatgttcgtgccatcctgaaccggatgtgccttgtctacccagctagcaagatgtttccctttatcatggaaggaaccaaatccaaaaactctaagcagagagcagagtgcctggaagagctgggatgtctggttgagtcctatggcatgaatgtttgccaaccaaccccaggaaaagccttaaaggaaatagctgttcacataggagaccgtgacaatgctgtacgcaatgctgcactcaacaccattgtaacggtgtacaatgtacatggggatcaggtgttcaaactgattggaaatctttctgaaaaggatatgagcatgctcgaggagaggattaagcggtcagcaaagagaccctctgctgcaccaataaaacaggtggaagagaaacctcagcgtgcacagaacataagctccaatgccaacatgttacgcaagggaccagctgaggacatgtcttccaaactcaaccaagcccgaagcatgagtgggcatcctgaggcagcccagatggtccgccgagaattccagctggatctagatgagattgagaatgacaatggtacagtccgatgtgaaatgccagaacttgttcagcacaaactggatgacatttttgagccagtccttattcctgaacccaagatccgggctgtttctccacacttcgatgacatgcacagtaatacagcatccacaatcaatttcattatctcccaagtagccagtggtgacatcaacacaagtatccaagctctgacacagctgtttcagatagagagccttgcccgggaggcctccactggagtactaaaagacctaatgcatggcctcatcaccttaatgctggattctcggattgaagatcttgaggaaggacaacaggtcatccgctctgtgaacctcttggtggtgaaggttctggagaagtcagaccagaccaacatcctgagtgccctacttgttttgctccaagacagcctgctagcaacagccagttctcccaaattctcagagcttgttatgaagtgtctctggagaatggttcgactgttgcctgataccatcaatagcattaacctagacagaattcttctggatatccacattttcatgaaggtcttccccaaagagaaactgaagcaatgcaaaagtgaatttcccataaggaccctaaagaccctgctacacaccttatgcaaattaaaagggcccaagatcctggaccacctaacgatgatcgacaacaaaaacgagtctgagctggaggcccatctctgccggatgatgaagcacagtatggaccagactgggagcaagtctgataaggaaacagaaaagggagcatctcgaatagatgaaaaatcatcaaaggccaaagtgaatgatttcttagctgagatttttaagaagattggctctaaagaaaacactaaagagggactagcagagttatatgaatataagaagaaatactcagatgctgacattgaaccatttctgaaaaattcctcacagttcttccagagctatgtcgaaagaggccttcgggtgattgagatggagagggagggcaaaggtcgtatttccacttcaacaggcatctcccctcagatggaagtcacatgtgtgcccacgcccacaagcacagtgtcctccataggtaacacaaatggggaagaagtggggccatctgtctacttggaaaggctaaagatcctccgacagcgatgtggtctggacaacacaaagcaagatgaccgacctcctttgacctctttgctctccaaaccagcagttcctactgtcgcctcttccacagacatgctccacagcaaactctctcagctccgggagtcacgggagcagcaccagcattcagacctggattctaaccagactcactcttcaggaactgtgacctcctcctcctccacagctaacatagacgacttgaaaaaaagactggagagaataaagagcagtcgcaaatgaagctgccccactcccccggcaccctgcagctttagtttactaaactagaagtcctcatagtttaaaatggcctcagcaggcctagtgtatacaaactggttgtatgtatcatgccgtggagctagggggaggagtcattgtggcacaagtatttgtacatactctgcttctctctgtcagcgtcctgctgctctagaagactgtccgtggatgagtttagtgtacagacttgtaaacagctgccccctctctgctcagtctagttcccagatccttttcttttctttttaattgctcatttgtaaaattgtcctaatctttcctagctttttaatagttaatattagaaactctttaatagttttcctttcagtttgtgagctcttctctgtcgccctgaagggtcactgtattctgtatgaatgcatggcatgatacaactaatttaagagtcttttataaataaagtttgcattaactatacctg

SEQ ID NO: 182005 - DNA, 6428 bp, Artificial Sequence
  derived and/or modified sequence
aattctaaggaaaacctggaagcacaatgggagatgacagtgagtggttgaaactgccagttgatcagaaatgtgaacacaagctgtggaaagcaaggttaagtgggtatgaagaggccctgaagatcttccagaaaataaaggatgaaaagagcccagagtggtccaaatttttaggattgatcaaaaaatttgtcactgattccaatgcagtggttcaattgaaaggattagaagctgcacttgtttatgttgaaaatgcccatgtagcaggaaaaaccacaggagaagttgtgtcaggtgttgtaagtaaggtgttcaatcaacctaaagctaaagccaaggagctgggcatagagatctgtcttatgtacatagagattgagaaaggagaggctgttcaagaagagctcctgaaaggcttggacaataagaatcccaagatcatagtggcctgtatagagacactgaggaaagccttaagtgaatttggttccaaaatcatcttgcttaagccaattatcaaagtgttgccaaaactctttgagtctcgagagaaggctgttcgagatgaagccaaactaattgctgtggagatttacagatggattcgggatgctctgagacccccattacaaaatataaactctgttcagttgaaagaactagaagaagaatgggtcaaactgccaacaagtgctcctagacctactcgatttcttcgttcccaacaagaactagaagctaaattggaacaacaacagtctgctggtggagatgctgaaggaggtggtgatgatggtgatgaggtgccacaaatagatgcttatgagcttttagaagctgtagaaatcctttccaaacttcccaaagacttttatgacaaaattgaggcaaaaaaatggcaagagagaaaagaggccctggagtctgtagaagtactaataaaaaaccccaaactggaagctggcgattatgcagatttagtaaaagcattaaagaaggttgttggaaaggacaccaatgtcatgttggtggctttggcagcaaaatgtcttactggcctggctgttgggctaaggaagaaatttggacaatatgcaggacatgttgtgccaaccatcttggagaaattcaaagagaagaaacctcaagtggtacaagccctgcaggaggcaattgatgcaatcttccttactaccacactacagaacatcagtgaggatgttttagcagtaatggataataaaaatccaaccatcaagcagcagacatctctttttattgcaagaagtttccgccactgcactgcttctaccctgccaaagagcttgctaaagcccttttgtgctgcactacttaagcacatcaatgattctgctcctgaagtcagagatgccgcatttgaagcattgggtactgctttgaaggtggttggcgagaaagcagtaaacccattcctagctgatgtggacaaactcaagcttgataagatcaaagaatgttcagaaaaggtagaactgatacatggtaagaaagctggactagctgctgataagaaggaattcaaacctctgcctggaaggactgctgcttcaggggctgcaggagataaggacacaaaggacatttctgcacccaaaccaggacctctaaaaaaggcacctgctgctaaggctggtgggccaccaaaaaaggggaaaccagctgcaccaggaggcgcagggaatactggaaccaagaacaagaaaggactggagactaaagaaatagtggagcctgagctctcgatagaagtatgtgaagaaaaagcttcagctgttcttccccctacctgtatacagcttcttgacagcagtaactggaaagaaaggctggcttgtatggaagagttccagaaggctgttgagctaatggaccgaactgaaatgccatgccaggcattagtgaggatgctagccaagaaacctggatggaaagaaactaattttcaggtgatgcaaatgaagcttcatatagttgctttgattgcccagaagggaaatttttccaaaacgtcagctcaggttgtattagatggccttgtggacaagattggagatgtgaaatgtgggaacaatgcaaaagaagctatgacagcaatagccgaagcctgtatgttaccatggactgctgaacaggttgtgtcaatggctttctcacaaaagaatcccaaaaatcagtcagaaactctgaattggctatcaaatgccataaaagaatttggtttttctgggttgaatgtcaaagctttcattagcaatgtgaagacagctcttgctgcaacaaacccagctgtgaggactgctgccataaccctgcttggcgtgatgtatctgtatgttggtccctctttgcgaatgttctttgaggatgagaagcctgccctcctatcccagatagatgcagaatttgagaagatgcagggacaaagtccacctgctccaaccagaggaatttccaagcatagcacaagtggtacagatgaaggagaagatggagatgaaccagatgacgggagcaatgatgtcgttgatcttttgccgaggacggagatcagtgataaaatcacttcagagttggtatctaagattggtgataagaattggaagattaggaaagaaggcctagatgaagtggcaggtattattaatgacgcaaaatttatccaaccgaatataggtgaacttccaactgccttgaagggtcgactcaatgattcaaataaaatcttggtacagcaaacgctgaatatcctgcaacaactggcagtagccatgggcccaaatattaagcaacatgtaaaaaatttaggcatccctatcatcacagtccttggagacagcaagaacaatgttcgagctgctgccctagcgactgtgaatgcttgggcagaacagactggcatgaaggaatggctggaaggagaagatctttctgaagagctcaaaaaggaaaatcctttcttgaggcaagagcttctgggctggctggctgagaaactacctactcttcgttccacccctacagaccttatcctttgtgttcctcatctctactcctgcctagaagatcgaaatggagatgtgcgaaagaaggcccaagatgccttgccattcttcatgatgcatttaggatatgaaaaaatggccaaggctactgggaaactaaagccaacttctaaagatcaggtattggccatgctagagaaagccaaagttaacatgccagccaagcctgctccacccactaaagcaacttctaaaccaatgggagggtccgctccagccaaattccagcctgcatcagcacctgctgaagattgtatttccagcagtacagaacccaaacctgatccaaaaaaggccaaagctccaggattatcctctaaagcaaagagtgcacaagggaagaagatgccaagcaaaaccagcttaaaggaggatgaagacaaatccgggcctatttttattgttgttccaaatggaaaagagcaaaggatgaaagatgaaaaaggattgaaggtgctaaagtggaattttactaccccacgggatgaatacattgagcaactaaagactcaaatgtctagctgtgtggctaaatggttacaagatgagatgtttcactcagactttcagcatcataacaaagcccttgctgttatggttgatcacttggagagtgaaaaagaaggagttattggttgcctggatcttatcttaaagtggcttaccctgaggttttttgacaccaatacaagcgtcctgatgaaagcactagaatatttaaaattgctcttcaccttgctaagtgaagaagaatatcatcttactgagaatgaagcatcttccttcatcccctatcttgtcgtcaaggttggagaaccaaaggatgtcattcgtaaagatgttcgtgccatcctgaaccggatgtgccttgtctacccagctagcaagatgtttccctttatcatggaaggaaccaaatccaaaaactctaagcagagagcagagtgcctggaagagctgggatgtctggttgagtcctatggcatgaatgtttgccaaccaaccccaggaaaagccttaaaggaaatagctgttcacataggagaccgtgacaatgctgtacgcaatgctgcactcaacaccattgtaacggtgtacaatgtacatggggatcaggtgttcaaactgattggaaatctttctgaaaaggatatgagcatgctcgaggagaggattaagcggtcagcaaagagaccctctgctgcaccaataaaacaggtggaagagaaacctcagcgtgcacagaacataagctccaatgccaacatgttacgcaagggaccagctgaggacatgtcttccaaactcaaccaagcccgaagcatgagtgggcatcctgaggcagcccagatggtccgccgagaattccagctggatctagatgagattgagaatgacaatggtacagtccgatgtgaaatgccagaacttgttcagcacaaactggatgacatttttgagccagtccttattcctgaacccaagatccgggctgtttctccacacttcgatgacatgcacagtaatacagcatccacaatcaatttcattatctcccaagtagccagtggtgacatcaacacaagtatccaagctctgacacagctgtttcagatagagagccttgcccgggaggcctccactggagtactaaaagacctaatgcatggcctcatcaccttaatgctggattctcggattgaagatcttgaggaaggacaacaggtcatccgctctgtgaacctcttggtggtgaaggttctggagaagtcagaccagaccaacatcctgagtgccctacttgttttgctccaagacagcctgctagcaacagccagttctcccaaattctcagagcttgttatgaagtgtctctggagaatggttcgactgttgcctgataccatcaatagcattaacctagacagaattcttctggatatccacattttcatgaaggtcttccccaaagagaaactgaagcaatgcaaaagtgaatttcccataaggaccctaaagaccctgctacacaccttatgcaaattaaaagggcccaagatcctggaccacctaacgatgatcgacaacaaaaacgagtctgagctggaggcccatctctgccggatgatgaagcacagtatggaccagactgggagcaagtctgataaggaaacagaaaagggagcatctcgaatagatgaaaaatcatcaaaggccaaagtgaatgatttcttagctgagatttttaagaagattggctctaaagaaaacactaaagagggactagcagagttatatgaatataagaagaaatactcagatgctgacattgaaccatttctgaaaaattcctcacagttcttccagagctatgtcgaaagaggccttcgggtgattgagatggagagggagggcaaaggtcgtatttccacttcaacaggcatctcccctcagatggaagtcacatgtgtgcccacgcccacaagcacagtgtcctccataggtaacacaaatggggaagaagtggggccatctgtctacttggaaaggctaaagatcctccgacagcgatgtggtctggacaacacaaagcaagatgaccgacctcctttgacctctttgctctccaaaccagcagttcctactgtcgcctcttccacagacatgctccacagcaaactctctcagctccgggagtcacgggagcagcaccagcattcagacctggattctaaccagactcactcttcaggaactgtgacctcctcctcctccacagctaacatagacgacttgaaaaaaagactggagagaataaagagcagtcgcaaatgaagctgccccactcccccggcaccctgcagctttagtttactaaactagaagtcctcatagtttaaaatggcctcagcaggcctagtgtatacaaactggttgtatgtatcatgccgtggagctagggggaggagtcattgtggcacaagtatttgtacatactctgcttctctctgtcagcgtcctgctgctctagaagactgtccgtggatgagtttagtgtacagacttgtaaacagctgccccctctctgctcagtctagttcccagatccttttcttttctttttaattgctcatttgtaaaattgtcctaatctttcctagctttttaatagttaatattagaaactctttaatagttttcctttcagtttgtgagctcttctctgtcgccctgaagggtcactgtattctgtatgaatgcatggcatgatacaactaatttaagagtcttttataaataaagtttgcattaactata

SEQ ID NO: 182006 - DNA, 5919 bp, Artificial Sequence
  derived and/or modified sequence
atgggcgacgacagcgagtggctgaagctgcccgtggaccagaagtgcgagcacaagctgtggaaggccagactgagcggctacgaggaggccctgaagatcttccagaagatcaaggacgagaagagccccgagtggagcaagttcctgggcctgatcaagaagttcgtgaccgacagcaacgccgtggtgcagctgaagggcctggaggccgccctggtgtacgtggagaacgcccacgtggccggcaagaccaccggcgaggtggtgagcggcgtggtgagcaaggtgttcaaccagcccaaggccaaggccaaggagctgggcatcgagatctgcctgatgtacatcgagatcgagaagggcgaggccgtgcaggaggagctgctgaagggcctggacaacaagaaccccaagatcatcgtggcctgcatcgagaccctgagaaaggccctgagcgagttcggcagcaagatcatcctgctgaagcccatcatcaaggtgctgcccaagctgttcgagagcagagagaaggccgtgagagacgaggccaagctgatcgccgtggagatctacagatggatcagagacgccctgagaccccccctgcagaacatcaacagcgtgcagctgaaggagctggaggaggagtgggtgaagctgcccaccagcgcccccagacccaccagattcctgagaagccagcaggagctggaggccaagctggagcagcagcagagcgccggcggcgacgccgagggcggcggcgacgacggcgacgaggtgccccagatcgacgcctacgagctgctggaggccgtggagatcctgagcaagctgcccaaggacttctacgacaagatcgaggccaagaagtggcaggagagaaaggaggccctggagagcgtggaggtgctgatcaagaaccccaagctggaggccggcgactacgccgacctggtgaaggccctgaagaaggtggtgggcaaggacaccaacgtgatgctggtggccctggccgccaagtgcctgaccggcctggccgtgggcctgagaaagaagttcggccagtacgccggccacgtggtgcccaccatcctggagaagttcaaggagaagaagccccaggtggtgcaggccctgcaggaggccatcgacgccatcttcctgaccaccaccctgcagaacatcagcgaggacgtgctggccgtgatggacaacaagaaccccaccatcaagcagcagaccagcctgttcatcgccagaagcttcagacactgcaccgccagcaccctgcccaagagcctgctgaagcccttctgcgccgccctgctgaagcacatcaacgacagcgcccccgaggtgagagacgccgccttcgaggccctgggcaccgccctgaaggtggtgggcgagaaggccgtgaaccccttcctggccgacgtggacaagctgaagctggacaagatcaaggagtgcagcgagaaggtggagctgatccacggcaagaaggccggcctggccgccgacaagaaggagttcaagcccctgcccggcagaaccgccgccagcggcgccgccggcgacaaggacaccaaggacatcagcgcccccaagcccggccccctgaagaaggcccccgccgccaaggccggcggcccccccaagaagggcaagcccgccgcccccggcggcgccggcaacaccggcaccaagaacaagaagggcctggagaccaaggagatcgtggagcccgagctgagcatcgaggtgtgcgaggagaaggccagcgccgtgctgccccccacctgcatccagctgctggacagcagcaactggaaggagagactggcctgcatggaggagttccagaaggccgtggagctgatggacagaaccgagatgccctgccaggccctggtgagaatgctggccaagaagcccggctggaaggagaccaacttccaggtgatgcagatgaagctgcacatcgtggccctgatcgcccagaagggcaacttcagcaagaccagcgcccaggtggtgctggacggcctggtggacaagatcggcgacgtgaagtgcggcaacaacgccaaggaggccatgaccgccatcgccgaggcctgcatgctgccctggaccgccgagcaggtggtgagcatggccttcagccagaagaaccccaagaaccagagcgagaccctgaactggctgagcaacgccatcaaggagttcggcttcagcggcctgaacgtgaaggccttcatcagcaacgtgaagaccgccctggccgccaccaaccccgccgtgagaaccgccgccatcaccctgctgggcgtgatgtacctgtacgtgggccccagcctgagaatgttcttcgaggacgagaagcccgccctgctgagccagatcgacgccgagttcgagaagatgcagggccagagcccccccgcccccaccagaggcatcagcaagcacagcaccagcggcaccgacgagggcgaggacggcgacgagcccgacgacggcagcaacgacgtggtggacctgctgcccagaaccgagatcagcgacaagatcaccagcgagctggtgagcaagatcggcgacaagaactggaagatcagaaaggagggcctggacgaggtggccggcatcatcaacgacgccaagttcatccagcccaacatcggcgagctgcccaccgccctgaagggcagactgaacgacagcaacaagatcctggtgcagcagaccctgaacatcctgcagcagctggccgtggccatgggccccaacatcaagcagcacgtgaagaacctgggcatccccatcatcaccgtgctgggcgacagcaagaacaacgtgagagccgccgccctggccaccgtgaacgcctgggccgagcagaccggcatgaaggagtggctggagggcgaggacctgagcgaggagctgaagaaggagaaccccttcctgagacaggagctgctgggctggctggccgagaagctgcccaccctgagaagcacccccaccgacctgatcctgtgcgtgccccacctgtacagctgcctggaggacagaaacggcgacgtgagaaagaaggcccaggacgccctgcccttcttcatgatgcacctgggctacgagaagatggccaaggccaccggcaagctgaagcccaccagcaaggaccaggtgctggccatgctggagaaggccaaggtgaacatgcccgccaagcccgccccccccaccaaggccaccagcaagcccatgggcggcagcgcccccgccaagttccagcccgccagcgcccccgccgaggactgcatcagcagcagcaccgagcccaagcccgaccccaagaaggccaaggcccccggcctgagcagcaaggccaagagcgcccagggcaagaagatgcccagcaagaccagcctgaaggaggacgaggacaagagcggccccatcttcatcgtggtgcccaacggcaaggagcagagaatgaaggacgagaagggcctgaaggtgctgaagtggaacttcaccacccccagagacgagtacatcgagcagctgaagacccagatgagcagctgcgtggccaagtggctgcaggacgagatgttccacagcgacttccagcaccacaacaaggccctggccgtgatggtggaccacctggagagcgagaaggagggcgtgatcggctgcctggacctgatcctgaagtggctgaccctgagattcttcgacaccaacaccagcgtgctgatgaaggccctggagtacctgaagctgctgttcaccctgctgagcgaggaggagtaccacctgaccgagaacgaggccagcagcttcatcccctacctggtggtgaaggtgggcgagcccaaggacgtgatcagaaaggacgtgagagccatcctgaacagaatgtgcctggtgtaccccgccagcaagatgttccccttcatcatggagggcaccaagagcaagaacagcaagcagagagccgagtgcctggaggagctgggctgcctggtggagagctacggcatgaacgtgtgccagcccacccccggcaaggccctgaaggagatcgccgtgcacatcggcgacagagacaacgccgtgagaaacgccgccctgaacaccatcgtgaccgtgtacaacgtgcacggcgaccaggtgttcaagctgatcggcaacctgagcgagaaggacatgagcatgctggaggagagaatcaagagaagcgccaagagacccagcgccgcccccatcaagcaggtggaggagaagccccagagagcccagaacatcagcagcaacgccaacatgctgagaaagggccccgccgaggacatgagcagcaagctgaaccaggccagaagcatgagcggccaccccgaggccgcccagatggtgagaagagagttccagctggacctggacgagatcgagaacgacaacggcaccgtgagatgcgagatgcccgagctggtgcagcacaagctggacgacatcttcgagcccgtgctgatccccgagcccaagatcagagccgtgagcccccacttcgacgacatgcacagcaacaccgccagcaccatcaacttcatcatcagccaggtggccagcggcgacatcaacaccagcatccaggccctgacccagctgttccagatcgagagcctggccagagaggccagcaccggcgtgctgaaggacctgatgcacggcctgatcaccctgatgctggacagcagaatcgaggacctggaggagggccagcaggtgatcagaagcgtgaacctgctggtggtgaaggtgctggagaagagcgaccagaccaacatcctgagcgccctgctggtgctgctgcaggacagcctgctggccaccgccagcagccccaagttcagcgagctggtgatgaagtgcctgtggagaatggtgagactgctgcccgacaccatcaacagcatcaacctggacagaatcctgctggacatccacatcttcatgaaggtgttccccaaggagaagctgaagcagtgcaagagcgagttccccatcagaaccctgaagaccctgctgcacaccctgtgcaagctgaagggccccaagatcctggaccacctgaccatgatcgacaacaagaacgagagcgagctggaggcccacctgtgcagaatgatgaagcacagcatggaccagaccggcagcaagagcgacaaggagaccgagaagggcgccagcagaatcgacgagaagagcagcaaggccaaggtgaacgacttcctggccgagatcttcaagaagatcggcagcaaggagaacaccaaggagggcctggccgagctgtacgagtacaagaagaagtacagcgacgccgacatcgagcccttcctgaagaacagcagccagttcttccagagctacgtggagagaggcctgagagtgatcgagatggagagagagggcaagggcagaatcagcaccagcaccggcatcagcccccagatggaggtgacctgcgtgcccacccccaccagcaccgtgagcagcatcggcaacaccaacggcgaggaggtgggccccagcgtgtacctggagagactgaagatcctgagacagagatgcggcctggacaacaccaagcaggacgacagaccccccctgaccagcctgctgagcaagcccgccgtgcccaccgtggccagcagcaccgacatgctgcacagcaagctgagccagctgagagagagcagagagcagcaccagcacagcgacctggacagcaaccagacccacagcagcggcaccgtgaccagcagcagcagcaccgccaacatcgacgacctgaagaagagactggagagaatcaagagcagcagaaagtag

SEQ ID NO: 182007 - DNA, 906 bp, Artificial Sequence
  derived and/or modified sequence
atgggcgacgacagcgagtggctgaagctgcccgtggaccagaagtgcgagcacaagctgtggaaggccagactgagcggctacgaggaggccctgaagatcttccagaagatcaaggacgagaagagccccgagtggagcaagttcctgggcctgatcaagaagttcgtgaccgacagcaacgccgtggtgcagctgaagggcctggaggccgccctggtgtacgtggagaacgcccacgtggccggcaagaccaccggcgaggtggtgagcggcgtggtgagcaaggtgttcaaccagcccaaggccaaggccaaggagctgggcatcgagatctgcctgatgtacatcgagatcgagaagggcgaggccgtgcaggaggagctgctgaagggcctggacaacaagaaccccaagatcatcgtggcctgcatcgagaccctgagaaaggccctgagcgagttcggcagcaagatcatcctgctgaagcccatcatcaaggtgctgcccaagctgttcgagagcagagagaaggccgtgagagacgaggccaagctgatcgccgtggagatctacagatggatcagagacgccctgagaccccccctgcagaacatcaacagcgtgcagctgaaggagctggaggaggagtgggtgaagctgcccaccagcgcccccagacccaccagattcctgagaagccagcaggagctggaggccaagctggagcagcagcagagcgccggcggcgacgccgagggcggcggcgacgacggcgacgaggtgccccagatcgacgcctacgagctgctggaggccgtggagatcctgagcaagcccaagaccttcatgaccaagctgagacagaagaacggcaagagagagaagagaccctggagcctgtag

SEQ ID NO: 182008 - protein, 1016 aa, Artificial Sequence
  derived and/or modified sequence
MVLPTCPMAEFALPRHSAVMERLRRRIELCRRHHSTCEARYEAVSPERLELERQHTFALHQRCIQAKAKRAGKHRQPPAATAPAPAAPAPRLDAADGPEHGRPATHLHDTVKRNLDSATSPQNGDQQNGYGDLFPGHKKTRREAPLGVAISSNGLPPASPLGQSDKPSGADALQSSGKHSLGLDSLNKKRLADSSLHLNGGSNPSESFPLSLNKELKQEPVEDLPCMITGTVGSISQSNLMPDLNLNEQEWKELIEELNRSVPDEDMKDLFNEDFEEKKDPESSGSATQTPLAQDINIKTEFSPAAFEQEQLGSPQVRAGSAGQTFLGPSSAPVSTDSPSLGGSQTLFHTSGQPRADNPSPNLMPASAQAQNAQRALAGVVLPSQGPGGASELSSAHQLQQIAAKQKREQMLQNPQQATPAPAPGQMSTWQQTGPSHSSLDVPYPMEKPASPSSYKQDFTNSKLLMMPSVNKSSPRPGGPYLQPSHVNLLSHQPPSNLNQNSANNQGSVLDYGNTKPLSHYKADCGQGSPGSGQSKPALMAYLPQQLSHISHEQNSLFLMKPKPGNMPFRSLVPPGQEQNPSSVPVQAQATSVGTQPPAVSVASSHNSSPYLSSQQQAAVMKQHQLLLDQQKQREQQQKHLQQQQFLQRQQHLLAEQEKQQFQRHLTRPPPQYQDPTQGSFPQQVGQFTGSSAAVPGMNTLGPSNSSCPRVFPQAGNLMPMGPGHASVSSLPTNSGQQDRGVAQFPGSQNMPQSSLYGMASGITQIVAQPPPQATNGHAHIPRQTNVGQNTSVSAAYGQNSLGSSGLSQQHNKGTLNPGLTKPPVPRVSPAMGGQNSSWQHQGMPNLSGQTPGNSNVSPFTAASSFHMQQQAHLKMSSPQFSQAVPNRPMAPMSSAAAVGSLLPPVSAQQRTSAPAPAPPPTAPQQGLPGLSPAGPELGAFSQSPASQMGGRAGLHCTQAYPVRTAGQELPFAYSGQPGGSGLSSVAGHTDLIDSLLKNRTSEEWMSDLDDLLGSQ

SEQ ID NO: 182009 - protein, 761 aa, Artificial Sequence
  derived and/or modified sequence
RGKQWGRGGGERPRLEVGSKRRLGVGPSGAGGKPAAAREPAPLPSGAWRGREAERGSRGERSPQCQPAPRGPAPGPARAARGPWCCPPAPWRSSRCRGTARSWSAFAGASSCAGATTAPARPAAPAPRLDAADGPEHGRPATHLHDTVKRNLDSATSPQNGDQQNGYGDLFPGHKKTRREAPLGVAISSNGLPPASPLGQSDKPSGADALQSSGKHSLGLDSLNKKRLADSSLHLNGGSNPSESFPLSLNKELKQEPVEDLPCMITGTVGSISQSNLMPDLNLNEQEWKELIEELNRSVPDEDMKDLFNEDFEEKKDPESSGSATQTPLAQDINIKTEFSPAAFEQEQLGSPQVRAGSAGQTFLGPSSAPVSTDSPSLGGSQTLFHTSGQPRADNPSPNLMPASAQAQNAQRALAGVVLPSQGPGGASELSSAHQLQQIAAKQKREQMLQNPQQATPAPAPGQMSTWQQTGPSHSSLDVPYPMEKPASPSSYKQDFTNSKLLMMPSVNKSSPRPGGPYLQPSHVNLLSHQPPSNLNQNSANNQGSVLDYGNTKPLSHYKADCGQGSPGSGQSKPALMAYLPQQLSHISHEQNSLFLMKPKPGNMPFRSLVPPGQEQNPSSVPVQAQATSVGTQPPAVSVASSHNSSPYLSSQQQAAVMKQHQLLLDQQKQREQQQKHLQQQQFLQRQQHLLAEQEKQQFQRHLTRPPPQYQDPTQGSFPQQVGQFTAQGLSCALPMIHSTEVLISSLCNGSAGLSAAQRSW

SEQ ID NO: 182010 - DNA, 219 bp, Artificial Sequence
  derived and/or modified sequence
atgagctaccagcagcagcagtgcaagcagccctgccagcccccccctgtttgcccaactcccaagtgtcccgagccgtgtcctcccccgaagtgtccagagccgtgcccatctcctaaatgtccccagccttgtcctccacagcagtgtcagcagaaataccccccagtcaccccctcccctccttgccagccaaaatgtccccccaaatccaaatag

SEQ ID NO: 182011 - DNA, 3051 bp, Artificial Sequence
  derived and/or modified sequence
atggtcctgcccacatgtcccatggctgaatttgccctgcctagacacagcgccgttatggaacgccttcgaagaagaatcgagctttgccggcggcaccactcaacttgcgaggcacgctacgaagccgtttcacccgagaggcttgaactagagagacagcacacttttgccctgcaccaacggtgcattcaggccaaagcaaagcgcgcagggaaacatagacagccccccgcggcgactgcccctgcacccgcggccccagctcccagactggacgcagctgacgggccagagcatggacgccctgctacccatttacacgataccgtgaagagaaacctagatagtgctacttccccccagaacggagatcagcagaatggctacggggacctctttccaggacataagaagacccggcgagaggcaccactcggcgtggcaatctccagtaacggccttccaccggcctctcccctcggtcagtccgacaaaccttctggagccgacgccctccagtcttcagggaagcatagtctcgggctggactccttgaataagaagaggctggcagattccagtctacacctgaacggtgggagtaatccctctgagtcatttcctctttcgttgaacaaagagcttaaacaagaaccagtggaggacctaccatgtatgattactggcaccgtgggtagtattagccagagtaatctcatgcccgatctgaatctaaacgagcaggagtggaaggaattgatcgaggagctgaaccgcagcgtgccagacgaggacatgaaagatctgtttaatgaggatttcgaagaaaagaaagaccctgaatccagcggttcagccacgcaaacaccattggctcaagacattaacattaagaccgagttttcacctgccgcgttcgaacaagaacagctcggatctcctcaggtccgcgcagggtctgctggacagacttttctgggcccatcctccgctcccgtgtcaactgacagcccatccttaggaggaagccagactctattccacaccagtggacagcctcgtgctgataatccaagccccaatctcatgcccgccagtgcgcaagctcaaaacgcgcagcgggccttggcaggagtggttttgccctcccaggggcccggcggcgcctccgaattgagcagtgcccatcaactgcagcaaatcgccgccaagcagaagcgtgagcagatgctgcaaaacccacagcaagcgacccccgctccagcccccggccagatgtccacatggcaacagacaggaccgtcccatagctccctggacgtaccctatcccatggagaagcccgcaagtccatcatcttataagcaagatttcactaactccaagctgctgatgatgccttctgtaaataagagcagccctagaccagggggcccctatctgcagcccagccacgtaaacttgctgtctcatcagcctcctagcaatcttaaccagaacagcgctaataatcagggcagcgtgctagactatggcaatacgaagcctttaagccactacaaggcagactgcgggcagggttcccccggaagcggacagtctaaaccagccttaatggcatacttaccacaacaactcagtcatatctctcacgagcaaaacagtcttttcctgatgaagcctaagccaggaaacatgccattcagaagtttagtcccccccgggcaggagcaaaacccttccagcgtgcctgtccaagctcaggctacctccgtgggcacccaacctcctgccgtctccgtggcttcttcacacaactcctccccatacctgagtagccaacagcaggcagccgttatgaagcaacaccagctcttactggaccaacaaaagcaacgggaacagcagcaaaagcatctccagcaacaacagtttctgcagcggcagcagcacctgttagccgagcaggagaaacagcagtttcagagacatcttacccgcccaccacctcagtatcaggacccgacacaggggagcttcccgcagcaagtaggtcaattcaccggcagctctgccgctgtgcctggcatgaataccctcggaccatcaaactctagttgccccagagtttttccccaggctggcaatctcatgcctatgggccctggccacgcgtccgtgtcttccttgcctaccaactcgggtcagcaagatagaggcgtcgctcagtttcctggatcccagaacatgccccagtcaagcttgtacggcatggcctctgggattacccagattgtcgcccagccacccccccaggccaccaacggccatgcccacattcctcgccagactaatgtgggacaaaacacatcagtgagcgccgcctacggacagaattctctcgggagcagcggcctgagccagcagcataataagggcaccctgaatccaggtctcactaagccccctgtgcccagggtatcaccggctatgggcggccagaacagttcttggcagcatcagggtatgccgaacctgagtgggcagactccaggtaatagtaatgtgagcccatttaccgccgcttcaagctttcatatgcagcagcaggcacacttgaaaatgtcctccccccagttttctcaggctgttcccaacaggcccatggcccccatgtcgtccgccgcagccgttgggagtctcctgccgccagtgagcgcacaacagcgaactagcgcccctgcccctgctccaccccctaccgcaccccagcagggcctgcccggactcagtcccgccgggccagaactgggggcattcagccagtcccctgcctctcagatggggggccgcgccggtcttcactgcacacaggcctatcccgttcgcaccgcaggacaagagcttcccttcgcctactccggtcagccaggaggctctggtttatcatccgtcgccggacacactgacttgattgatagcttgttgaaaaatcggacaagcgaggaatggatgtccgacctggacgatcttttaggctcccagtag

SEQ ID NO: 182012 - DNA, 2286 bp, Artificial Sequence
  derived and/or modified sequence
aggggtaaacagtggggtcggggcggtggtgagagaccccgtcttgaagttggctctaaacgacgcttgggtgtcggaccttccggagccgggggtaaaccagccgccgcacgtgaacccgctcccttgccatcaggcgcctggaggggccgcgaggcagagcggggttccagaggggagcgaagcccccaatgccagcccgcccctagagggccggctcccggacccgctagggccgcccgcggcccctggtgttgtcctcccgcgccttggaggtcctcacgttgtcggggaacagcccgcagctggtcggcatttgctggggcgtcctcttgcgccggagccaccaccgcgccggcaaggcccgctgccccggcccccaggttagatgcagccgacggcccagagcatggtagaccagctacgcacttgcacgataccgtgaagcggaatctggattctgcaacttccccacagaacggagaccagcagaacgggtacggagatttgttccccggccataaaaagacaagacgtgaagctcctctgggcgtagcaatctcgagcaacgggctgcctcctgctagtccacttggccagtcagacaaaccgtcgggcgccgatgctctacaatcctctgggaaacacagcctgggcctggactccttgaataaaaaaagactggctgatagcagcctgcatctgaacggcgggtctaacccttccgagtcatttcccttgtcgctgaataaggagctcaagcaagagcctgtggaggacctgccctgcatgataacggggaccgttggctccatttcccaatccaaccttatgcctgatctgaatctaaacgagcaagagtggaaggagcttatcgaggagcttaacagaagtgttcctgacgaggacatgaaggacctgtttaatgaagatttcgaggagaagaaggatccggagtcatcggggagtgcgactcaaacccctctcgctcaggacatcaatataaagactgaatttagcccagcagcgttcgaacaagaacagctggggtccccacaggtgagagctgggtcagccgggcagaccttcctggggccctcttctgccccggtgtccaccgacagtccctcgctgggcggctcccaaactttgtttcataccagtgggcaacccagggcggataatccatcccctaatctgatgccagccagcgcacaggcccagaacgcgcagcgcgctctagctggagtagtgctaccatcccagggccccggcggcgcatcagaactgtcaagcgcccaccagctgcagcaaatcgccgcaaagcagaagcgtgagcaaatgctccaaaaccctcagcaggccaccccagccccagcgccaggacagatgagcacatggcagcagactggtcccagccattcatcgctggatgtgccttaccccatggagaaacctgccagcccgtcttcctacaagcaggacttcacaaatagtaagctgttgatgatgcctagtgtgaacaaaagttcacccagacccgggggcccctacctgcagcccagccacgtgaacctcttgagccatcaacctccttcgaacttgaatcaaaactcggctaacaaccaggggtccgtactcgactatggaaacacgaaaccgttgtcacactacaaggcagactgcggccagggcagccccggatcaggccagtccaagccggcattgatggcctacctaccacagcagctctctcatatttcacacgaacagaattcactctttctcatgaagcctaagccaggcaatatgccttttcggtccttggttcccccaggccaggaacaaaacccctcatctgtacccgtgcaggcgcaggccacgagtgtgggcacacagccgcctgcagtgagcgtggcctcttcccataattcaagtccgtatttgagctctcagcagcaggcggcagtgatgaaacaacatcagttattgctcgaccagcagaagcagagagaacaacagcagaagcacctgcagcaacagcaatttctccagaggcaacagcaccttcttgctgagcaggaaaaacagcagttccagcgtcacctgacgagaccacctccccaatatcaggatccaacccaagggagctttcctcagcaagtaggccagttcactgcgcagggcctgtcatgcgctctcccaatgatccactccactgaagtgctgatttcctcgttatgtaatggatctgcaggcctgagcgccgctcagcgaagctggtag

SEQ ID NO: 182013 - DNA, 3051 bp, Artificial Sequence
  derived and/or modified sequence
atggtgctgcccacctgccccatggccgagtttgccctgcccaggcacagcgctgtgatggagcggctgcggaggagaattgagctgtgcagaagacaccacagcacctgtgaggcccgctatgaagctgtgtccccagagcggctggagctggagcggcagcacacctttgccctgcaccagcgctgcatccaggccaaggccaagagagctgggaagcaccggcagcccccagctgccacagccccagccccagctgccccagccccccggctggatgctgctgatggccctgagcacggccgcccagccacccacctgcatgacacagtgaagaggaacctggacagcgccaccagcccccagaatggagaccagcagaatggctacggggacctcttccctggccacaagaagacccggcgggaggcccccctgggcgtggccatcagcagcaatggcctgcccccagccagccccctgggccagagcgacaagcccagcggggctgatgccctgcagagcagcggcaagcacagcctgggcctggacagcctgaacaagaagaggctggccgacagcagcctgcacctgaatggaggcagcaaccccagcgagagcttccccctgagcctgaacaaggagctgaagcaggagcctgtggaggacctgccctgcatgatcactggaacagtgggcagcatcagccagagcaacctgatgccagacctgaacctgaatgagcaggagtggaaggagctgattgaggagctgaacagatctgtgcctgatgaggacatgaaggacctcttcaatgaagattttgaggagaagaaggaccctgagagcagcggcagcgccacccagacccccctggcccaggacatcaacatcaagacagagttcagccctgctgcctttgagcaggagcagctgggcagcccccaggtgcgggccggcagcgctggccagaccttcctgggccccagcagcgcccctgtgtccacagacagccccagcctgggcggcagccagaccctcttccacaccagcggccagcccagggctgacaaccccagccccaacctgatgcctgccagcgcccaggcccagaatgcccagagggccctggccggcgtggtgctgcccagccagggccctggaggagccagcgagctgagcagcgcccaccagctgcagcagattgctgccaagcagaagcgggagcagatgctgcagaacccccagcaggccaccccagccccagcccctggccagatgagcacctggcagcagacaggccccagccacagcagcctggatgtgccctaccccatggagaagccagccagccccagcagctacaagcaggacttcaccaacagcaagctgctgatgatgcccagcgtgaacaagagcagccccaggcctgggggcccctacctgcagcccagccacgtgaacctgctgagccaccagccccccagcaacctgaaccagaacagcgccaacaaccagggctctgtgctggactatggcaacaccaagcccctgagccactacaaggctgactgtggccagggcagccctggcagcggccagagcaagccagccctgatggcctacctgccccagcagctgagccacatcagccatgagcagaacagcctcttcctgatgaagcccaagccaggcaacatgcccttccgcagcctggtgcccccaggccaggagcagaaccccagctctgtgcctgtgcaggcccaggccacctctgtgggcacccagcccccagctgtgtctgtggccagcagccacaacagcagcccctacctgagcagccagcagcaggccgctgtgatgaagcagcaccagctgctgctggaccagcagaagcagcgggagcagcagcagaagcacctgcagcagcagcagttcctgcagaggcagcagcacctgctggccgagcaggagaagcagcagttccagaggcacctgacccggcccccaccccagtaccaggaccccacccagggcagcttcccccagcaggtgggccagttcaccggcagcagcgctgctgtgcccggcatgaacaccctgggccccagcaacagcagctgccccagggtcttcccccaggccggcaacctgatgcccatgggccctggccacgcctctgtgagcagcctgcccaccaacagcggccagcaggacagaggagtggcccagtttcctggcagccagaacatgccccagagcagcctgtatggcatggccagcggcatcacccagatcgtggcccagcccccaccccaggccaccaacggccacgcccacatcccccggcagaccaacgtgggccagaacacctctgtgtctgctgcctacggccagaacagcctgggcagcagcggcctgagccagcagcacaacaagggcaccctgaaccctggcctgaccaagccccctgtgccccgggtgtccccagccatgggcggccagaacagctcctggcagcaccagggcatgcccaacctgagcggccagaccccaggcaacagcaatgtgagccccttcaccgctgccagcagcttccacatgcagcagcaggcccacctgaagatgagcagcccccagttcagccaggccgtgcccaaccggcccatggcccccatgagcagcgctgctgctgtgggcagcctgctgccccctgtgtctgcccagcagaggaccagcgccccagccccagcccccccacccacagccccccagcagggcctgcccggcctgagccctgctggccctgagctgggcgccttcagccagagccctgccagccagatgggcggccgggccggcctgcactgcacccaggcctaccctgtgaggacagctggccaggagctgccctttgcctacagcggccagcccggcggcagcggcctgagctctgtggccggccacacagacctgattgacagcctgctgaagaacagaaccagcgaggagtggatgtctgacctggatgacctgctgggcagccagtag

SEQ ID NO: 182014 - DNA, 2286 bp, Artificial Sequence
  derived and/or modified sequence
cggggcaagcagtggggccggggcggcggggagcggccccggctggaggtgggcagcaagaggcggctgggcgtgggccccagcggggccggcggcaagccagctgctgcccgggagcccgcccccctgcccagcggggcctggaggggccgggaggccgagcggggcagcagaggagagaggagcccccagtgccagcctgccccccggggccctgcccctggccctgcccgggccgcccggggcccctggtgctgccccccagccccctggaggagcagccgctgccggggcacagcccgctcctggagcgcctttgctggggccagcagctgtgccggggccaccacagccccagcccggcctgctgccccagccccccggctggatgctgctgatggccctgagcacggccggcctgccacccacctgcatgacacagtgaagaggaacctggacagcgccaccagcccccagaatggagaccagcagaatggctatggagacctcttccctggccacaagaagacccggcgggaggcccccctgggcgtggccatcagcagcaatggcctgcccccagccagccccctgggccagagcgacaagcccagcggggctgatgccctgcagagcagcggcaagcacagcctgggcctggacagcctgaacaagaagaggctggccgacagcagcctgcacctgaatggaggcagcaaccccagcgagagcttccccctgagcctgaacaaggagctgaagcaggagcctgtggaggacctgccctgcatgatcaccggcaccgtgggcagcatcagccagagcaacctgatgccagacctgaacctgaatgagcaggagtggaaggagctgattgaggagctgaacagatctgtgcctgatgaggacatgaaggacctcttcaatgaagattttgaggagaagaaggaccctgagagcagcggcagcgccacccagacccccctggcccaggacatcaacatcaagacagagttctccccagctgcctttgagcaggagcagctgggcagcccccaggtgcgggccggcagcgctggccagaccttcctgggccccagcagcgcccctgtgtccacagacagccccagcctgggcggcagccagaccctcttccacaccagcggccagcccagggctgacaaccccagccccaacctgatgcctgccagcgcccaggcccagaatgcccagagggccctggccggcgtggtgctgcccagccagggccctgggggcgccagcgagctgagcagcgcccaccagctgcagcagattgctgccaagcagaagcgggagcagatgctgcagaacccccagcaggccaccccagccccagcccctggccagatgagcacctggcagcagacaggccccagccacagcagcctggatgtgccctaccccatggagaagccagccagccccagcagctacaagcaggacttcaccaacagcaagctgctgatgatgcccagcgtgaacaagagcagccccaggcctgggggcccctacctgcagcccagccacgtgaacctgctgagccaccagccccccagcaacctgaaccagaacagcgccaacaaccagggctctgtgctggactatggcaacaccaagcccctgagccactacaaggctgactgtggccagggcagccctggcagcggccagagcaagccagccctgatggcctacctgccccagcagctgagccacatcagccatgagcagaacagcctcttcctgatgaagcccaagccaggcaacatgcccttccgcagcctggtgcccccaggccaggagcagaaccccagctctgtgcctgtgcaggcccaggccacctctgtgggcacccagcccccagctgtgtctgtggccagcagccacaacagcagcccctacctgagcagccagcagcaggccgctgtgatgaagcagcaccagctgctgctggaccagcagaagcagcgggagcagcagcagaagcacctgcagcagcagcagttcctgcagaggcagcagcacctgctggccgagcaggagaagcagcagttccagaggcacctgacccggcccccaccccagtaccaggaccccacccagggcagcttcccccagcaggtgggccagttcaccgcccagggcctgagctgtgccctgcccatgatccacagcacagaggtgctgatcagcagcctgtgcaatggatctgctggcctgtctgctgcccagaggtcctggtag

SEQ ID NO: 182015 - DNA, 5723 bp, Artificial Sequence
  derived and/or modified sequence
cggccgcggcggtagcgcggaaaacaatggggccggggcggtggggagaggccgaggcttgaggtaggcagcaagcgccggctgggggtcgggccgagcggggcaggaggaaaacccgccgccgcgcgcgagcccgctccgctgccctcgggggcatggcgcggccgtgaggcggagaggggtagccgcggggagcgaagcccgcagtgccagccggccccgagaggcccggccccgggcccggcccgtgcagcccgcggcccatggtgctgcccacctgccccatggcggagttcgcgctgccgcggcacagcgcggtcatggagcgccttcgccggcgcatcgagctgtgccggcgccaccacagcacctgcgaggcccgctacgaggccgtgtcgcccgagcgcctggagctggagcgccaacacaccttcgccctgcaccagcgctgcatccaggccaaggccaagcgcgccgggaagcacaggcagccgcccgccgccacggccccggcgcccgccgccccggccccgcgcctggacgccgctgacggccccgagcacggccgcccggccacgcatcttcatgatacagttaagaggaatcttgacagcgccacttcccctcagaatggcgatcaacagaatggctacggggacctctttcctgggcataagaagactcgccgggaggcccctctgggagttgccatctcttccaatggactgcctccagcctcccccctcggtcagtctgacaagccttctggagccgacgccctgcagtccagtgggaagcactctctggggctagactctctcaacaaaaagcgtctggctgactccagccttcacttgaatggaggcagtaaccccagtgagtcatttcctctgagcctgaataaagaactgaagcaggagcctgtcgaagacctgccttgcatgatcactgggactgtcggctccatatcgcaaagcaacctcatgccagacctcaaccttaacgagcaggagtggaaggagctcatcgaggagctgaacaggtcggtgcccgatgaagacatgaaggacctgtttaatgaggacttcgaggagaagaaggacccagagtcttctggctctgccacacaaacccccttggcacaggacattaatattaagacggaattctctccagcagcctttgagcaagaacagttaggctctccacaagtgagggccgggtctgcagggcagacctttctggggccttcctctgcccctgtgagtacagattcccccagcctagggggctcccaaaccttattccacacctctggtcagccccgggcggacaatcccagtccaaacctgatgccggcatcagcccaggcccagaacgcacaaagagcccttgcaggtgtggtattgcccagtcagggcccaggaggggcctcagagctgtcctctgcccaccagctccagcagatcgctgccaagcagaagcgcgagcagatgctccagaacccacagcaggccaccccggcaccagccccgggccagatgtccacatggcagcagacggggccctcccacagttccttagatgtcccttaccccatggagaagcctgccagcccttccagctacaagcaagacttcactaactccaaactgctcatgatgcctagtgtgaataagagttcccctcggcccggaggcccctacctccagcccagccatgtgaacctgctgagtcaccagccaccgagtaacttgaatcagaactccgcgaataaccaggggtctgtgctggactacggcaatacaaaacccctttctcattacaaagcggactgtgggcaaggcagcccggggtctggccagagcaagccagccctgatggcttatcttccccagcagctgtcccatataagtcacgagcagaactccctgtttctgatgaagccaaagccaggaaatatgcctttccgatcactggttccacctggccaggagcagaacccttccagtgtccctgtgcaagcccaggctaccagtgttgggacccagccgcctgccgtgtccgtggccagctcccacaacagctccccctatctcagcagccagcaacaggccgctgtaatgaagcagcatcagttgcttttggaccaacagaaacaaagggagcagcagcaaaagcatttacagcaacagcagttccttcagaggcaacagcaccttctcgcggaacaggagaagcaacagtttcagcgccatctgacccgcccaccaccccagtaccaagacccgacacaaggcagcttcccacagcaggttggacagttcacagggtcctctgctgccgtgcccggcatgaacaccttgggtccatccaactccagctgtcctcgagtgttccctcaggctgggaatctgatgccaatgggccctggacatgcttcagtttcctctctccccacaaactcaggccaacaggaccggggtgtggctcagttccctggctcccaaaacatgcctcagagcagcctctatggcatggcttctggcataacccagatagttgcccagcccccgccacaggccaccaatggacatgcccacattccacggcagaccaacgtgggccagaacacctccgtctcagctgcctatgggcagaactctctgggaagctctggcctctcccagcagcacaataaggggaccctgaaccctggtttaacaaagccaccggtcccaagggtgtcaccagccatgggaggccagaattcctcctggcagcatcagggaatgccgaacctcagtggccagaccccagggaacagcaacgtgagtcccttcactgcagcctccagtttccacatgcagcagcaggcccacctgaaaatgtctagcccgcaattctcccaggcagtgcccaacaggcccatggctcccatgagctcagcagctgccgtggggtccttgctacccccagtgagtgcacagcagaggaccagcgcccctgccccagcaccacccccaacagcccctcagcagggcttgcctggcctgagcccagcagggcctgagctgggggccttcagccagagccctgcctcacagatgggcggtcgggcggggctgcactgcacccaggcctaccctgtgcggaccgcgggccaggagctgccttttgcctatagcgggcagccaggtggcagtgggctctctagtgtggctggacacaccgatctgatcgactccctgctgaagaacaggacttcagaggagtggatgagtgatttggacgacctgttagggtctcagtaatggaaggatttgtagtgtttttagtgttcattcatcctatatttttattctcagattcaaagaaagagcaactactttggaccaaaagcccatggcctggggagctgggcaggtagagcccaagctccaggtgaggcctggccctgggcagggtctgtggctgcgcccctcaggccagcagttgaggtccatcgggctggccccagcccatctgctggcatcagtacctggtgttgggacagcaggatagggttctaaaggtggttttctatccaaacgaccaaaaaaccaacagtaacaccagtgaaaccccacactgtcgggcttataaaaatctgtgccatcatggtgattttatccaagactgctccacttaccccagtgctggggacaagtttctgttgaaactttagatagcagaattatttgcaatttgtagcatagaaaagatttttaaatttttttacaaaaggtttttaaacagattagggtaggtgatggtttaaatcaattaagtggcattggaaacctagggtttccttttgattaagagccttttttgtttctgctctttgtcagctttcaggggagaaggaggccactggaaaattatttccctaagtgcaggctgttgactgcgtatgccaaaaagggacaggaggcatgggatagcaggtctggtgacacagctagggtcttcctagcagctcctcctcctccctcccaaggcccccaggaatcccttcctcccatgtcctggcagcaggaccccaggctacatatggaaggtagagatgtgggggtcctgtatcctggagtattatgtctccccaccttctgcagttttctctgaacatgtatgttgcccatggtgggagcgtggtcactgtgcagttgtgcacagatgtctttcctttaccgttggcctttctgtctgcctctccttcctctctgcagcccaaatggaaaacaattatttactccattggagggaaaggaagagtcttagaattcctaagggaaccttagcataaaggttttggggaaggaggccgtaggccggcccggaggaagcaattccacttggtttgacaacttctgccactcccatgtcagatgacttgcacttcttaaagagattgctttataacactaagacatcctttctaaagattcaagtggacttgactaagctgagggtccacgaaatagaatatgacatgtgagctgtttttggaaaacgaagatggagagagcacttccccgtaacgaaagcaaagtggtaagcacagggtgagacccttttacacagaatggtggagagaaaagagaatgctgaaaagtggctcagatgcagagtgttctgtggagaaactgcagccccacttctgtttccctggagtctcccaatggatcattcaggagtgtcctatgtgagaattgagccaaggaaaatactcatgcaaccagcctgagtcgcggtgaggggacgagaggttgtacacacattggtagttattttgcaccagcagtgcctttctcactgggggtacttggaccctcagatcttcttttctaatagccatttgccaccccaagtggtatgtcggccatttctccttaaaacaccttccctacctttcccatgtactcagtttagctctcaaagaaggggtgaatcataaagccagtgaaaatttcaccctctgagggagttccccaatctgaaggggaagagggtgacctcagcggcttttctcccaaaaatcggctgaaggctggttgtggatccttgttcctctcctgaccccatctggctgctgccccgtctcccacccctgtccccggggctcgctggccctgcactccgccttagtcctggggccggcgacacagtgggggctcctcacttgctgcagtgtcatagcaataaaatgtgattcttggggtccccccagggagctgcccatggctttatttatgaacctggttttcgggagtcaggggaggagatgactttgcttctgtgcacagccccgtcttccaggagccacaactcagaagaaaagggtgctcagacttttgttatacacatttgctttgtgtaaataaatgtttacaattttatatgaaagatggaataagcgctagagcttccaactgtatattttttacttttatagattttaaaactatgatcctttatatgtgtgttttgggggagctatgataagttttatggcaaacggttggtattgttaactttttattgtcatcaaaagttcataaaagtcctattaatccccatattcttctactgcccttaactctggtatacaccaaaaagaaatctttactttccttgttttatcattataaaaataaagtattttgctagtatggaaacaa

SEQ ID NO: 182016 - DNA, 2286 bp, Artificial Sequence
  derived and/or modified sequence
cgcggaaaacaatggggccggggcggtggggagaggccgaggcttgaggtaggcagcaagcgccggctgggggtcgggccgagcggggcaggaggaaaacccgccgccgcgcgcgagcccgctccgctgccctcgggggcatggcgcggccgtgaggcggagaggggtagccgcggggagcgaagcccgcagtgccagccggccccgagaggcccggccccgggcccggcccgtgcagcccgcggcccatggtgctgcccacctgccccatggcggagttcgcgctgccgcggcacagcgcggtcatggagcgccttcgccggcgcatcgagctgtgccggcgccaccacagcacctgcgaggcccgccgccccggccccgcgcctggacgccgctgacggccccgagcacggccgcccggccacgcatcttcatgatacagttaagaggaatcttgacagcgccacttcccctcagaatggcgatcaacagaatggctacggggacctctttcctgggcataagaagactcgccgggaggcccctctgggagttgccatctcttccaatggactgcctccagcctcccccctcggtcagtctgacaagccttctggagccgacgccctgcagtccagtgggaagcactctctggggctagactctctcaacaaaaagcgtctggctgactccagccttcacttgaatggaggcagtaaccccagtgagtcatttcctctgagcctgaataaagaactgaagcaggagcctgtcgaagacctgccttgcatgatcactgggactgtcggctccatatcgcaaagcaacctcatgccagacctcaaccttaacgagcaggagtggaaggagctcatcgaggagctgaacaggtcggtgcccgatgaagacatgaaggacctgtttaatgaggacttcgaggagaagaaggacccagagtcttctggctctgccacacaaacccccttggcacaggacattaatattaagacggaattctctccagcagcctttgagcaagaacagttaggctctccacaagtgagggccgggtctgcagggcagacctttctggggccttcctctgcccctgtgagtacagattcccccagcctagggggctcccaaaccttattccacacctctggtcagccccgggcggacaatcccagtccaaacctgatgccggcatcagcccaggcccagaacgcacaaagagcccttgcaggtgtggtattgcccagtcagggcccaggaggggcctcagagctgtcctctgcccaccagctccagcagatcgctgccaagcagaagcgcgagcagatgctccagaacccacagcaggccaccccggcaccagccccgggccagatgtccacatggcagcagacggggccctcccacagttccttagatgtcccttaccccatggagaagcctgccagcccttccagctacaagcaagacttcactaactccaaactgctcatgatgcctagtgtgaataagagttcccctcggcccggaggcccctacctccagcccagccatgtgaacctgctgagtcaccagccaccgagtaacttgaatcagaactccgcgaataaccaggggtctgtgctggactacggcaatacaaaacccctttctcattacaaagcggactgtgggcaaggcagcccggggtctggccagagcaagccagccctgatggcttatcttccccagcagctgtcccatataagtcacgagcagaactccctgtttctgatgaagccaaagccaggaaatatgcctttccgatcactggttccacctggccaggagcagaacccttccagtgtccctgtgcaagcccaggctaccagtgttgggacccagccgcctgccgtgtccgtggccagctcccacaacagctccccctatctcagcagccagcaacaggccgctgtaatgaagcagcatcagttgcttttggaccaacagaaacaaagggagcagcagcaaaagcatttacagcaacagcagttccttcagaggcaacagcaccttctcgcggaacaggagaagcaacagtttcagcgccatctgacccgcccaccaccccagtaccaagacccgacacaaggcagcttcccacagcaggttggacagttcacagctcagggtctgagttgtgcactgcctatgatccactccacagaagttctgatttcttctctgtgcaatggttctgccggcctttctgccgcccagaggtcctggtga

SEQ ID NO: 182017 - DNA, 3051 bp, Artificial Sequence
  derived and/or modified sequence
atggtgctgcccacctgccccatggccgagttcgccctgccccggcatagcgcggtgatggaaagattacggcggaggatcgagctgtgtcggcggcaccatagtacttgcgaggctcgttatgaggcggtaagccctgaacgccttgagctggagagacagcatacctttgctctacaccagcgctgtattcaggccaaggcgaagagagctgggaaacatcgacaacccccagcagccactgcacccgcaccggccgcgcccgcccccagactcgatgctgcagatggccccgaacatggtagacccgcaacgcacctgcacgacacggtcaagcgcaacttggattcggccacatcaccccagaatggagaccaacagaacggttacggcgacttgtttccaggacataagaaaacacggagagaagccccactcggagtcgctatctccagtaacgggctgccccctgctagcccactaggccagagtgacaagccttccggagctgacgcgctgcagagttccgggaagcatagcctaggcttagattcgctgaacaagaagcgcctcgcagattcttccttgcacctcaacggaggctccaatccgagtgagagttttccgttatccctcaataaggagctaaagcaagagcctgtggaagacctgccttgcatgatcaccggtacagttggcagcataagccaatcaaaccttatgcccgacctaaatctgaatgagcaagagtggaaggaactgatagaggagcttaatcgtagtgtgcccgatgaagatatgaaagatctcttcaacgaggatttcgaagagaagaaggacccagagagttcaggatccgccacccagactcctctggctcaggatataaatatcaaaactgagttctcccccgcagcttttgagcaagagcaactaggaagccctcaggttcgagctggtagtgccgggcagaccttccttggcccctcgtctgcacccgtgtctactgattcaccatcactagggggttcgcagactctgttccatacttccggacagccccgtgccgacaacccctcaccaaacctgatgccagcgtccgcgcaagcccagaacgctcagcgtgctctagctggggttgtcttacccagccaaggacccggaggagcgtccgagctgagcagcgctcaccagctgcagcaaatcgcagcaaaacaaaagcgtgaacagatgcttcagaacccccagcaagccacgcctgcaccagcccccggacagatgagtacttggcaacagactggcccgtcccatagttccctggatgtgccataccctatggagaagccagctagtccttcctcctataagcaagatttcacgaattctaaactcttgatgatgccttcagttaataaatccagcccgcgtccgggagggccctatttacagccctcccatgtgaatttgttaagccatcagcctcctagtaatcttaatcagaatagtgccaacaaccagggatcggtcttagattatgggaacacaaaacctctgtctcattacaaagcagattgtgggcagggttctccaggctccggtcaatccaaacctgcactgatggcctacctcccccagcagctgagccatatcagccacgagcaaaattcactctttctaatgaaacctaaacccggaaacatgcccttccgaagcctcgttccgcccggccaggagcagaacccatccagcgttccggtgcaggctcaggctacctcagtgggcactcagcccccagccgtatctgtagcttccagccacaattcttcaccttatttgagtagccagcaacaggctgcagtgatgaagcagcatcaactgctgctggaccagcagaaacagcgggagcagcaacagaagcatctgcagcagcagcaattcttacaacgccagcagcatttgttggcagaacaggagaaacaacaatttcagcggcatctcacaagacctccgcctcagtaccaggaccccacccagggctcctttccccaacaagtgggccagtttactgggtcttccgccgccgtgccaggtatgaacactctgggcccctccaacagctcatgtccgcgtgtatttccccaggctggcaatctgatgcctatgggccccgggcacgcctcagtgagtagcctgccaacgaactctgggcagcaggatcgcggagtcgctcagtttccaggaagccaaaacatgccccaaagttcactgtatggaatggcatccgggatcacgcagattgtcgctcaaccaccccctcaggccaccaatggccatgctcacattccgcggcagaccaatgtcggacaaaacacatctgtgtcggccgcatacggtcagaattctctgggatcttcgggactgtcacaacaacataacaagggcacccttaatccgggactgacgaagccccctgtgccccgagtgtcccctgccatggggggacagaacagctcctggcagcaccaggggatgcctaacctcagcgggcaaactcctggcaattccaacgtttcaccatttacggctgcctccagtttccatatgcagcagcaggcccacctgaagatgtcctcaccccaattctctcaggcagttcccaaccgccctatggctcctatgtcaagcgcggccgccgtcggtagcctgttaccgcccgtttccgctcagcagcgcacctctgcccctgcccccgcgcctccacctaccgcccctcagcaaggtctgcccggactgagtcctgccgggcctgagctgggtgccttctcccagagcccggcctctcagatgggcgggagggccggtttacattgtacgcaggcatacccagtccggacagcagggcaggagctgccgtttgcttattcgggccagccaggggggtcaggattatcctcagtggccggtcatacagacctgattgattcccttctcaagaaccggacctcggaggagtggatgagtgaccttgacgacctcttaggcagccaatag

SEQ ID NO: 182018 - DNA, 2286 bp, Artificial Sequence
  derived and/or modified sequence
cggggcaagcagtggggccggggcggcggcgagcggccccggctggaagtgggatctaagaggcggttaggagtgggaccctctggggccgggggaaagcctgcagccgcgcgcgagccagctccactgccatccggggcctggagaggccgcgaggctgaacgcggctcccgcggtgagagaagccctcagtgccagccggcaccccgcggtcctgcacctggccccgcacgagctgccagaggaccctggtgttgtcccccagccccttggaggtcctcacggtgtagaggaacagccaggagctggtcggctttcgcaggcgctagctcttgtgccggcgcaactaccgcccctgcgcgccccgccgcccctgccccacggttggatgcagccgatggtccagaacatggccgacctgcgacacacctgcacgacacagtgaagagaaacttggatagcgcaaccagtcctcagaatggagaccaacagaatggctacggtgaccttttcccagggcataagaaaacacgccgggaggcgcctctgggcgtggcgatttcctccaatggactgccccccgcctcccccttggggcagtccgataaacccagtggggccgacgcactccagagctcaggcaagcattccctgggccttgattctctaaacaagaaaaggctggccgattcgagcttacaccttaacggcgggtctaacccatccgaatcctttccgttgtcactcaataaagaactgaagcaggaacctgtggaggacctgccatgcatgattacgggcactgtgggctccatcagccaaagcaacctgatgccggacctgaatctcaacgagcaagaatggaaggagctgatagaagaattgaataggagtgtcccagatgaggacatgaaagacctgttcaacgaggatttcgaggagaagaaagaccctgagtcctctggtagcgccacgcagactccactggcccaggacattaatataaagactgaattctcgccagccgctttcgagcaggagcagctgggcagcccgcaagtacgggctggttcggcagggcaaacattcctcgggcccagttcggcgcctgtcagcactgactcgccatccctcggcgggtcccagacactcttccatacgtccgggcagccccgtgccgacaacccaagccccaacctcatgccagccagtgctcaggctcagaatgcacagcgcgcgctggcaggagtggtgctgcccagccaaggacccgggggggccagcgagttatcctcagcccaccagctgcagcagatagccgccaagcaaaaacgggagcagatgctgcaaaatccacagcaggcgaccccagcacctgctcccggccagatgagcacctggcagcagaccggaccctcccacagttcactggatgtgccatatcctatggaaaagccagcgagtcccagctcctataaacaggactttactaatagcaaattgcttatgatgccgagcgtgaataagtcctccccaaggccaggaggcccctacctgcagccttctcatgtgaacttactcagtcaccagccaccatcgaatctcaatcagaattccgcaaacaatcaaggctccgttctggactacggcaacacaaaaccactctcccactataaggcggactgtgggcagggaagccccggtagcggtcagtcaaagcccgccctgatggcatatcttccacagcaattgagccatatatcccatgagcaaaatagtttgttcctgatgaagccaaaacctggtaatatgccattccggtcgctggtgccgccagggcaggagcagaatccaagttctgtcccagtccaggctcaagcaacttctgtgggaactcagccccccgccgtgagcgttgcctcttcccacaactcttccccgtacctctctagccagcagcaggccgcggtcatgaagcagcatcagctgctgttggatcagcagaagcagcgggaacagcagcagaagcacctgcagcagcagcagttcctacaacgtcagcagcatttgctagcggaacaggagaagcaacagttccaaagacacctgacccgaccccctccacagtatcaggatcccactcagggaagctttcctcagcaggtgggacaattcaccgcccaggggctcagttgcgccctgcctatgattcatagtacggaggtgctgatctcaagtctttgcaacgggagtgctggcctgtctgccgcccagcggtcatggtag

SEQ ID NO: 182019 - DNA, 3051 bp, Artificial Sequence
  derived and/or modified sequence
atggtgttacctacctgtccaatggctgaatttgccctgcctcggcactccgccgtaatggaacgtctgaggcgcagaattgagctatgccgcaggcatcactccacttgtgaagcccgttacgaagccgtttccccagaacggttggagctggaaaggcagcataccttcgcgttacaccagcgctgtattcaagccaaggcgaagagggcgggaaagcatagacaaccccctgctgctaccgccccagcccctgccgctccagctccaaggctagacgcagccgatggacctgaacacggcagaccagctactcaccttcatgatacagtgaagcgcaacctcgactcagctactagtccccagaatggcgaccagcagaatgggtacggagacctgttccctggccacaagaagacccggcgagaggccccactaggcgtggccatcagttcaaacggcctgccgccagcctcccccctgggccagtcagacaaacccagtggagctgacgcactccagagcagcggcaaacactccctggggctagacagtctcaacaagaagcgcctggccgatagctcactgcacttgaacgggggaagcaacccctctgagtcattccccctgtccctcaacaaggagttaaagcaggaaccggtggaggacctgccctgcatgattacagggaccgttggctcaatctcacagagcaatctgatgcctgacctcaatctcaatgaacaggaatggaaagaactcatcgaggaactgaaccgcagtgtgccggacgaagacatgaaggacctttttaacgaagacttcgaggagaagaaagaccctgagtcgtcggggtcagcaacccaaaccccactggctcaggatattaacattaagaccgagttctctccggctgcattcgaacaggagcagctgggttcaccacaggttcgagccggatccgccggacagacctttctggggccatcaagcgccccagtttccaccgattcgccttctctgggaggatcacagaccctgtttcacacatcaggacaaccaagagctgataatcccagccctaatctaatgccagcttccgcccaggcacagaatgcacagagggccttagctggagttgtgctgccctctcaggggcctggtggggcaagtgaattgtcatccgcacatcagctccagcagatcgccgctaagcagaagagggaacaaatgctgcagaatcctcaacaggctacgcctgcaccagcccctggccagatgtctacatggcagcaaacagggccatctcattcctctttggacgtgccttacccaatggaaaaacctgctagtcctagcagttacaagcaggatttcaccaattctaagctcttgatgatgccttcagtaaataaaagtagccctaggcctggaggcccatacctgcagcccagtcacgtcaatctgttgagtcatcagccaccgagtaatttgaaccagaacagtgctaacaatcagggctcagtgctagactatggcaatacgaagccgctgtctcattacaaagcagattgcggacagggttcaccgggatccggccagagcaaacccgcacttatggcctacctacctcagcagctgtcacacatcagccatgaacagaattctctctttctgatgaaacctaaaccaggaaacatgccttttcggtccctggtgcccccaggccaggagcagaacccgagttctgtacccgttcaggcccaggccacaagcgttgggactcagcctcccgctgtgagtgtggccagcagccacaattcttccccttatctgtccagccagcagcaggcggcagtgatgaaacagcaccagctgctcctcgatcaacagaagcaacgcgagcagcagcagaagcacttgcaacagcaacaattcctgcaacgacagcagcatctcttggccgagcaggaaaagcaacaattccaaaggcacctgacccgacccccaccacagtaccaggatcccactcaagggtcattcccacaacaagtgggccaatttacagggtcgagcgctgcggtcccagggatgaatactctaggtccaagcaattcatcttgtcctagagtatttccacaggctggaaatctgatgccaatgggccctggtcacgcctctgtctctagcctccccaccaactccggtcaacaggatcgcggagttgcacaatttccaggtagccagaatatgccacagtcctctctatacggaatggcatccggaattacacagatagtggcccagccacccccacaggctacgaacggccatgcccacatacccagacagaccaacgttgggcagaatacaagcgtgtcagccgcatatggccagaatagcttggggtcttcaggactgtcacaacagcacaataaggggaccctcaaccccggtctcacgaagcccccagtccctcgcgtgtcccccgctatgggcggtcagaacagctcctggcaacaccaggggatgcccaacttgtctggtcagactcccggtaattccaacgtctcaccatttaccgccgcatcctcttttcacatgcagcagcaggcgcacctgaaaatgtcatccccgcagttcagccaggcagtaccgaatcgtccaatggcaccaatgtctagcgcagctgcagtggggagcctgttaccgccagtgtccgctcagcagaggacctccgccccagccccagccccacctcccaccgcgccacagcagggtttgcctggcttatcacccgcaggcccagaacttggtgctttcagtcagtccccagcaagccagatgggtggtagagccggattgcactgtacccaggcctatccagtgagaacggccggacaggaactgcctttcgcttactctggccagcccggtgggtctggcttatcatcggtcgccggtcacactgatctgattgacagcctgctgaaaaatagaacctcagaagagtggatgagcgatcttgacgacctgctgggctctcagtag

SEQ ID NO: 182020 - DNA, 2286 bp, Artificial Sequence
  derived and/or modified sequence
cgcggaaagcagtggggcagggggggaggtgagaggccgagactggaagtggggagtaagcggagacttggcgtcgggccatctggagccggagggaaacccgctgccgcacgggaaccagccccactgcctagtggagcctggaggggaagggaagccgagcggggatcaagaggggaaagatctccacagtgccagcccgctcctaggggaccagctccaggtccagcaagggccgcaagaggcccatggtgctgccctcccgctccttggcggtcaagtcggtgtaggggtaccgcaagatcctggagtgctttcgccggtgccagcagttgtgctggtgcaacaaccgcccctgctcgaccagcggcacctgctcccaggctggacgctgccgatggccctgaacatggccgtccagcaactcatctgcatgatacagttaaaagaaaccttgattctgccacgagcccccagaacggggaccagcagaacggttacggagacctatttcctggccacaaaaagacaaggcgcgaagctcccctcggagtggccattagttcaaacggtctccccccagcgtctcctctcggccagtcggacaagccttcaggcgctgacgctctacagtcatcgggcaagcattcactcggcttggattccctgaacaaaaaacggttggctgactctagcctgcacctgaatggaggttctaatccgagtgagtcatttcccctttctctaaataaggaattaaagcaggagccagtcgaagacctcccctgcatgattactggaactgttgggagcataagtcagtccaacctaatgccggatctgaatctgaatgaacaagaatggaaagagctgatcgaggagctaaacaggtccgtgcccgacgaggacatgaaagatctttttaacgaagattttgaagagaagaaggaccccgagtcaagtggctccgcaacacagacaccgctggcacaggacattaatatcaaaacagagttctctccagccgctttcgagcaagagcaattgggctcaccacaggtccgagcagggtcagctggacaaaccttccttgggccatcatcggcgccagttagcactgatagtcccagtctaggtggaagccagaccctgttccataccagcggtcagcctagggctgataatcccagtccaaacctgatgcctgcctcggcccaagcacagaacgcccagcgtgctctggccggtgttgttcttccttcccaagggcctggaggagccagtgagctcagtagtgcacaccagctgcagcagatcgccgctaaacagaagcgagaacaaatgttgcaaaacccacagcaagcaacccctgcccctgcaccaggccagatgtcaacatggcaacagaccggacctagccacagttccttggacgtcccgtaccccatggaaaaacctgccagtcccagctcatataaacaggacttcaccaatagcaagctattaatgatgcctagcgtgaacaaatcctctccaagacccggaggtccatatctccagccatcacacgtgaatctcttatcacaccagcctcccagcaatctgaatcagaatagtgcaaacaatcagggctctgtacttgattacggcaataccaagccccttagccattacaaggcagactgtgggcaaggtagccccggaagcggacagtccaagcctgctctcatggcatatctgcctcagcaactgtctcacatcagccatgagcagaatagtctttttttaatgaagcccaaacccggtaatatgccatttcggtccttggtgccgcctggccaagagcagaatccttccagtgtgccagtgcaagcccaagccacatcggtagggacccaaccacctgctgttagtgttgcctccagccacaatagcagcccctacttgtcatctcagcagcaggcagcggtgatgaaacagcatcagctcctgctggatcagcagaagcaaagggaacagcagcagaagcacctgcagcagcagcagttcttgcagaggcagcaacacctcctggcagaacaggagaaacagcagttccagcggcatcttacgagaccccctccgcaatatcaggaccctactcagggctcttttccacagcaggtgggtcagttcacagcccagggactctcctgcgctctgccaatgatccatagtacagaggtcctcattagcagtctttgcaacggatcagcaggtctgtccgcggcacagagatcctggtag

SEQ ID NO: 182021 - DNA, 3051 bp, Artificial Sequence
  derived and/or modified sequence
atggtgctgcccacctgccccatggccgagttcgccctgcccagacacagcgccgtgatggagagactgagaagaagaatcgagctgtgcagaagacaccacagcacctgcgaggccagatacgaggccgtgagccccgagagactggagctggagagacagcacaccttcgccctgcaccagagatgcatccaggccaaggccaagagagccggcaagcacagacagccccccgccgccaccgcccccgcccccgccgcccccgcccccagactggacgccgccgacggccccgagcacggcagacccgccacccacctgcacgacaccgtgaagagaaacctggacagcgccaccagcccccagaacggcgaccagcagaacggctacggcgacctgttccccggccacaagaagaccagaagagaggcccccctgggcgtggccatcagcagcaacggcctgccccccgccagccccctgggccagagcgacaagcccagcggcgccgacgccctgcagagcagcggcaagcacagcctgggcctggacagcctgaacaagaagagactggccgacagcagcctgcacctgaacggcggcagcaaccccagcgagagcttccccctgagcctgaacaaggagctgaagcaggagcccgtggaggacctgccctgcatgatcaccggcaccgtgggcagcatcagccagagcaacctgatgcccgacctgaacctgaacgagcaggagtggaaggagctgatcgaggagctgaacagaagcgtgcccgacgaggacatgaaggacctgttcaacgaggacttcgaggagaagaaggaccccgagagcagcggcagcgccacccagacccccctggcccaggacatcaacatcaagaccgagttcagccccgccgccttcgagcaggagcagctgggcagcccccaggtgagagccggcagcgccggccagaccttcctgggccccagcagcgcccccgtgagcaccgacagccccagcctgggcggcagccagaccctgttccacaccagcggccagcccagagccgacaaccccagccccaacctgatgcccgccagcgcccaggcccagaacgcccagagagccctggccggcgtggtgctgcccagccagggccccggcggcgccagcgagctgagcagcgcccaccagctgcagcagatcgccgccaagcagaagagagagcagatgctgcagaacccccagcaggccacccccgcccccgcccccggccagatgagcacctggcagcagaccggccccagccacagcagcctggacgtgccctaccccatggagaagcccgccagccccagcagctacaagcaggacttcaccaacagcaagctgctgatgatgcccagcgtgaacaagagcagccccagacccggcggcccctacctgcagcccagccacgtgaacctgctgagccaccagccccccagcaacctgaaccagaacagcgccaacaaccagggcagcgtgctggactacggcaacaccaagcccctgagccactacaaggccgactgcggccagggcagccccggcagcggccagagcaagcccgccctgatggcctacctgccccagcagctgagccacatcagccacgagcagaacagcctgttcctgatgaagcccaagcccggcaacatgcccttcagaagcctggtgccccccggccaggagcagaaccccagcagcgtgcccgtgcaggcccaggccaccagcgtgggcacccagccccccgccgtgagcgtggccagcagccacaacagcagcccctacctgagcagccagcagcaggccgccgtgatgaagcagcaccagctgctgctggaccagcagaagcagagagagcagcagcagaagcacctgcagcagcagcagttcctgcagagacagcagcacctgctggccgagcaggagaagcagcagttccagagacacctgaccagaccccccccccagtaccaggaccccacccagggcagcttcccccagcaggtgggccagttcaccggcagcagcgccgccgtgcccggcatgaacaccctgggccccagcaacagcagctgccccagagtgttcccccaggccggcaacctgatgcccatgggccccggccacgccagcgtgagcagcctgcccaccaacagcggccagcaggacagaggcgtggcccagttccccggcagccagaacatgccccagagcagcctgtacggcatggccagcggcatcacccagatcgtggcccagccccccccccaggccaccaacggccacgcccacatccccagacagaccaacgtgggccagaacaccagcgtgagcgccgcctacggccagaacagcctgggcagcagcggcctgagccagcagcacaacaagggcaccctgaaccccggcctgaccaagccccccgtgcccagagtgagccccgccatgggcggccagaacagcagctggcagcaccagggcatgcccaacctgagcggccagacccccggcaacagcaacgtgagccccttcaccgccgccagcagcttccacatgcagcagcaggcccacctgaagatgagcagcccccagttcagccaggccgtgcccaacagacccatggcccccatgagcagcgccgccgccgtgggcagcctgctgccccccgtgagcgcccagcagagaaccagcgcccccgcccccgcccccccccccaccgccccccagcagggcctgcccggcctgagccccgccggccccgagctgggcgccttcagccagagccccgccagccagatgggcggcagagccggcctgcactgcacccaggcctaccccgtgagaaccgccggccaggagctgcccttcgcctacagcggccagcccggcggcagcggcctgagcagcgtggccggccacaccgacctgatcgacagcctgctgaagaacagaaccagcgaggagtggatgagcgacctggacgacctgctgggcagccagtag

SEQ ID NO: 182022 - DNA, 2286 bp, Artificial Sequence
  derived and/or modified sequence
agaggcaagcagtggggcagaggcggcggcgagagacccagactggaggtgggcagcaagagaagactgggcgtgggccccagcggcgccggcggcaagcccgccgccgccagagagcccgcccccctgcccagcggcgcctggagaggcagagaggccgagagaggcagcagaggcgagagaagcccccagtgccagcccgcccccagaggccccgcccccggccccgccagagccgccagaggcccctggtgctgcccccccgccccctggagaagcagcagatgcagaggcaccgccagaagctggagcgccttcgccggcgccagcagctgcgccggcgccaccaccgcccccgccagacccgccgcccccgcccccagactggacgccgccgacggccccgagcacggcagacccgccacccacctgcacgacaccgtgaagagaaacctggacagcgccaccagcccccagaacggcgaccagcagaacggctacggcgacctgttccccggccacaagaagaccagaagagaggcccccctgggcgtggccatcagcagcaacggcctgccccccgccagccccctgggccagagcgacaagcccagcggcgccgacgccctgcagagcagcggcaagcacagcctgggcctggacagcctgaacaagaagagactggccgacagcagcctgcacctgaacggcggcagcaaccccagcgagagcttccccctgagcctgaacaaggagctgaagcaggagcccgtggaggacctgccctgcatgatcaccggcaccgtgggcagcatcagccagagcaacctgatgcccgacctgaacctgaacgagcaggagtggaaggagctgatcgaggagctgaacagaagcgtgcccgacgaggacatgaaggacctgttcaacgaggacttcgaggagaagaaggaccccgagagcagcggcagcgccacccagacccccctggcccaggacatcaacatcaagaccgagttcagccccgccgccttcgagcaggagcagctgggcagcccccaggtgagagccggcagcgccggccagaccttcctgggccccagcagcgcccccgtgagcaccgacagccccagcctgggcggcagccagaccctgttccacaccagcggccagcccagagccgacaaccccagccccaacctgatgcccgccagcgcccaggcccagaacgcccagagagccctggccggcgtggtgctgcccagccagggccccggcggcgccagcgagctgagcagcgcccaccagctgcagcagatcgccgccaagcagaagagagagcagatgctgcagaacccccagcaggccacccccgcccccgcccccggccagatgagcacctggcagcagaccggccccagccacagcagcctggacgtgccctaccccatggagaagcccgccagccccagcagctacaagcaggacttcaccaacagcaagctgctgatgatgcccagcgtgaacaagagcagccccagacccggcggcccctacctgcagcccagccacgtgaacctgctgagccaccagccccccagcaacctgaaccagaacagcgccaacaaccagggcagcgtgctggactacggcaacaccaagcccctgagccactacaaggccgactgcggccagggcagccccggcagcggccagagcaagcccgccctgatggcctacctgccccagcagctgagccacatcagccacgagcagaacagcctgttcctgatgaagcccaagcccggcaacatgcccttcagaagcctggtgccccccggccaggagcagaaccccagcagcgtgcccgtgcaggcccaggccaccagcgtgggcacccagccccccgccgtgagcgtggccagcagccacaacagcagcccctacctgagcagccagcagcaggccgccgtgatgaagcagcaccagctgctgctggaccagcagaagcagagagagcagcagcagaagcacctgcagcagcagcagttcctgcagagacagcagcacctgctggccgagcaggagaagcagcagttccagagacacctgaccagaccccccccccagtaccaggaccccacccagggcagcttcccccagcaggtgggccagttcaccgcccagggcctgagctgcgccctgcccatgatccacagcaccgaggtgctgatcagcagcctgtgcaacggcagcgccggcctgagcgccgcccagagaagctggtag

SEQ ID NO: 182023 - protein, 992 aa, Artificial Sequence
  derived and/or modified sequence
MKTETVPPFQETPAGSSCHLNNLLSSRKLMAVGVLLGWLLVIHLLVNVWLLCLLSALLVVLGGWLGSSLAGVASGRLHLERFIPLATCPPCPEAERQLEREINRTIQMIIRDFVLSWYRSVSQEPAFEEEMEAAMKGLVQELRRRMSVMDSHAVAQSVLTLCGCHLQSYIQAKEATAGKNGPVEPSHLWEAYCRATAPHPAVHSPSAEVTYTRGVVNLLLQGLVPKPHLETRTGRHVVVELITCNVILPLISRLSDPDWIHLVLVGIFSKARDPAPCPASAPEQPSVPTSLPLIAEVEQLPEGRASPVAAPVFLSYSEPEGSAGPSPEVEEGHEAVEGDLGGMCEERKVGNNSSHFLQPNVRGPLFLCEDSELESPLSELGKETIMLMTPGSFLSDRIQDALCALESSQALEPKDGEASEGAEAEEGPGTETETGLPVSTLNSCPEIHIDTADKEIEQGDVTASVTALLEGPEKTCPSRPSCLEKDLTNDVSSLDPTLPPVLLSSSPPGPLSSATFSFEPLSSPDGPVIIQNLRITGTITAREHSGTGFHPYTLYTVKYETALDGENSSGLQQLAYHTVNRRYREFLNLQTRLEEKPDLRKFIKNVKGPKKLFPDLPLGNMDSDRVEARKSLLESFLKQLCAIPEIANSEEVQEFLALNTDARIAFVKKPFMVSRIDKMVVSAIVDTLKTAFPRSEPQSPTEELSEAETESKPQTEGKKASKSRLRFSSSKISPALSVTEAQDKILYCLQEGNVESETLSMSAMESFIEKQTKLLEMQPTKAPEKDPEQPPKGRVDSCVSDAAVPAQDPSNSDPGTETELADTALDLLLLLLTEQWKWLCTENMQKFLRLIFGTLVQRWLEVQVANLTSPQRWVQYLLLLQESIWPGGVLPKFPRPVRTQEQKLAAEKQALQSLMGVLPDLVVEILGVNKCRLSWGLVLESLQQPLINRHLIYCLGDIILEFLDLSASVEESAATTSASDTPGNSKRMGVSS

SEQ ID NO: 182024 - protein, 435 aa, Artificial Sequence
  derived and/or modified sequence
MYETALDGENSSGLQQLAYHTVNRRYREFLNLQTRLEEKPDLRKFIKNVKGPKKLFPDLPLGNMDSDRVEARKSLLESFLKQLCAIPEIANSEEVQEFLALNTDARIAFVKKPFMVSRIDKMVVSAIVDTLKTAFPRSEPQSPTEELSEAETESKPQTEGKKASKSRLRFSSSKISPALSVTEAQDKILYCLQEGNVESETLSMSAMESFIEKQTKLLEMQPTKAPEKDPEQPPKGRVDSCVSDAAVPAQDPSNSDPGTETELADTALDLLLLLLTEQWKWLCTENMQKFLRLIFGTLVQRWLEVQVANLTSPQRWVQYLLLLQESIWPGGVLPKFPRPVRTQEQKLAAEKQALQSLMGVLPDLVVEILGVNKCRLSWGLVLESLQQPLINRHLIYCLGDIILEFLDLSASVEESAATTSASDTPGNSKRMGVSS

SEQ ID NO: 182025 - DNA, 2979 bp, Artificial Sequence
  derived and/or modified sequence
atgaagaccgagaccgtgccccccttccaggagacccccgccggcagcagctgccacctgaacaacctgctgagcagcagaaagctgatggccgtgggcgtgctgctgggctggctgctggtgatccacctgctggtgaacgtgtggctgctgtgcctgctgagcgccctgctggtggtgctgggcggctggctgggcagcagcctggccggcgtggccagcggcagactgcacctggagagattcatccccctggccacctgccccccctgccccgaggccgagagacagctggagagagagatcaacagaaccatccagatgatcatcagagacttcgtgctgagctggtacagaagcgtgagccaggagcccgccttcgaggaggagatggaggccgccatgaagggcctggtgcaggagctgagaagaagaatgagcgtgatggacagccacgccgtggcccagagcgtgctgaccctgtgcggctgccacctgcagagctacatccaggccaaggaggccaccgccggcaagaacggccccgtggagcccagccacctgtgggaggcctactgcagagccaccgccccccaccccgccgtgcacagccccagcgccgaggtgacctacaccagaggcgtggtgaacctgctgctgcagggcctggtgcccaagccccacctggagaccagaaccggcagacacgtggtggtggagctgatcacctgcaacgtgatcctgcccctgatcagcagactgagcgaccccgactggatccacctggtgctggtgggcatcttcagcaaggccagagaccccgccccctgccccgccagcgcccccgagcagcccagcgtgcccaccagcctgcccctgatcgccgaggtggagcagctgcccgagggcagagccagccccgtggccgcccccgtgttcctgagctacagcgagcccgagggcagcgccggccccagccccgaggtggaggagggccacgaggccgtggagggcgacctgggcggcatgtgcgaggagagaaaggtgggcaacaacagcagccacttcctgcagcccaacgtgagaggccccctgttcctgtgcgaggacagcgagctggagagccccctgagcgagctgggcaaggagaccatcatgctgatgacccccggcagcttcctgagcgacagaatccaggacgccctgtgcgccctggagagcagccaggccctggagcccaaggacggcgaggccagcgagggcgccgaggccgaggagggccccggcaccgagaccgagaccggcctgcccgtgagcaccctgaacagctgccccgagatccacatcgacaccgccgacaaggagatcgagcagggcgacgtgaccgccagcgtgaccgccctgctggagggccccgagaagacctgccccagcagacccagctgcctggagaaggacctgaccaacgacgtgagcagcctggaccccaccctgccccccgtgctgctgagcagcagcccccccggccccctgagcagcgccaccttcagcttcgagcccctgagcagccccgacggccccgtgatcatccagaacctgagaatcaccggcaccatcaccgccagagagcacagcggcaccggcttccacccctacaccctgtacaccgtgaagtacgagaccgccctggacggcgagaacagcagcggcctgcagcagctggcctaccacaccgtgaacagaagatacagagagttcctgaacctgcagaccagactggaggagaagcccgacctgagaaagttcatcaagaacgtgaagggccccaagaagctgttccccgacctgcccctgggcaacatggacagcgacagagtggaggccagaaagagcctgctggagagcttcctgaagcagctgtgcgccatccccgagatcgccaacagcgaggaggtgcaggagttcctggccctgaacaccgacgccagaatcgccttcgtgaagaagcccttcatggtgagcagaatcgacaagatggtggtgagcgccatcgtggacaccctgaagaccgccttccccagaagcgagccccagagccccaccgaggagctgagcgaggccgagaccgagagcaagccccagaccgagggcaagaaggccagcaagagcagactgagattcagcagcagcaagatcagccccgccctgagcgtgaccgaggcccaggacaagatcctgtactgcctgcaggagggcaacgtggagagcgagaccctgagcatgagcgccatggagagcttcatcgagaagcagaccaagctgctggagatgcagcccaccaaggcccccgagaaggaccccgagcagccccccaagggcagagtggacagctgcgtgagcgacgccgccgtgcccgcccaggaccccagcaacagcgaccccggcaccgagaccgagctggccgacaccgccctggacctgctgctgctgctgctgaccgagcagtggaagtggctgtgcaccgagaacatgcagaagttcctgagactgatcttcggcaccctggtgcagagatggctggaggtgcaggtggccaacctgaccagcccccagagatgggtgcagtacctgctgctgctgcaggagagcatctggcccggcggcgtgctgcccaagttccccagacccgtgagaacccaggagcagaagctggccgccgagaagcaggccctgcagagcctgatgggcgtgctgcccgacctggtggtggagatcctgggcgtgaacaagtgcagactgagctggggcctggtgctggagagcctgcagcagcccctgatcaacagacacctgatctactgcctgggcgacatcatcctggagttcctggacctgagcgccagcgtggaggagagcgccgccaccaccagcgccagcgacacccccggcaacagcaagagaatgggcgtgagcagctag

SEQ ID NO: 182026 - DNA, 1308 bp, Artificial Sequence
  derived and/or modified sequence
atgtacgagaccgccctggacggcgagaacagcagcggcctgcagcagctggcctaccacaccgtgaacagaagatacagagagttcctgaacctgcagaccagactggaggagaagcccgacctgagaaagttcatcaagaacgtgaagggccccaagaagctgttccccgacctgcccctgggcaacatggacagcgacagagtggaggccagaaagagcctgctggagagcttcctgaagcagctgtgcgccatccccgagatcgccaacagcgaggaggtgcaggagttcctggccctgaacaccgacgccagaatcgccttcgtgaagaagcccttcatggtgagcagaatcgacaagatggtggtgagcgccatcgtggacaccctgaagaccgccttccccagaagcgagccccagagccccaccgaggagctgagcgaggccgagaccgagagcaagccccagaccgagggcaagaaggccagcaagagcagactgagattcagcagcagcaagatcagccccgccctgagcgtgaccgaggcccaggacaagatcctgtactgcctgcaggagggcaacgtggagagcgagaccctgagcatgagcgccatggagagcttcatcgagaagcagaccaagctgctggagatgcagcccaccaaggcccccgagaaggaccccgagcagccccccaagggcagagtggacagctgcgtgagcgacgccgccgtgcccgcccaggaccccagcaacagcgaccccggcaccgagaccgagctggccgacaccgccctggacctgctgctgctgctgctgaccgagcagtggaagtggctgtgcaccgagaacatgcagaagttcctgagactgatcttcggcaccctggtgcagagatggctggaggtgcaggtggccaacctgaccagcccccagagatgggtgcagtacctgctgctgctgcaggagagcatctggcccggcggcgtgctgcccaagttccccagacccgtgagaacccaggagcagaagctggccgccgagaagcaggccctgcagagcctgatgggcgtgctgcccgacctggtggtggagatcctgggcgtgaacaagtgcagactgagctggggcctggtgctggagagcctgcagcagcccctgatcaacagacacctgatctactgcctgggcgacatcatcctggagttcctggacctgagcgccagcgtggaggagagcgccgccaccaccagcgccagcgacacccccggcaacagcaagagaatgggcgtgagcagctag

SEQ ID NO: 182027 - DNA, 2979 bp, Artificial Sequence
  derived and/or modified sequence
atgaagacagaaacagtgccacccttccaggaaacgccagccggctcatcgtgtcacttaaataacctactctcctcacgtaaactcatggccgtgggggtgcttttagggtggttattggtcatccaccttctagtgaacgtatggctgttgtgtttactatcagccttgcttgtggtgctgggaggctggctgggatcttcactggctggcgtggcttcagggcgtctccacctggagcgcttcatacctctcgccacttgtcccccttgtccagaggctgagaggcagctggaacgtgagataaacaggacaatccagatgatcattagggattttgttctgtcatggtacaggtctgtgagtcaggaacctgcctttgaggaagaaatggaagccgccatgaagggattagtgcaggaactgaggaggcgaatgagcgtgatggatagccacgccgtcgcccagtccgtccttacactgtgcggctgccacttgcagagctatatccaggctaaagaggccaccgctgggaagaacgggcccgtagagccctcacatctgtgggaggcttactgtagggctaccgcccctcaccctgctgtgcacagcccgtcagctgaggtgacctacaccaggggagtggtcaatttgctgttgcagggtttggtcccaaaaccacacttggagacacggacaggacggcacgtggtagttgaacttataacctgtaatgtgatacttccactgatcagccgtctgagtgatcccgactggattcacttggttctcgtaggtatcttctcaaaggcccgagatccggccccttgcccagcctccgcacctgagcagccatctgttcccacttctctccccctcatcgcagaggtagaacaattgccagaaggccgggcttctcctgtcgccgcgcctgtgttcctctcctattccgaaccagaaggtagcgccggtccttcgccagaggtggaggaaggccatgaagccgttgagggagacctaggagggatgtgcgaagaacgaaaggtggggaacaacagcagtcatttcttgcaaccaaacgtgcgaggaccactgtttctttgcgaagatagcgaactggaatctcccctatcagagctgggcaaagagaccattatgcttatgacacccggatccttcctcagcgatcgtattcaagacgccctgtgtgcgctggagtctagtcaagcgctagaaccaaaagatggcgaggcaagtgagggcgctgaagcggaggaaggccctggcactgaaacagagacagggctgcctgtgtccactttgaattcttgtcccgagatccatattgataccgccgataaagagattgagcaaggggacgtcactgcttctgtgactgctctgctagaaggccccgagaaaacatgtccaagccgccctagttgcctggagaaggacctcactaacgatgtgagctctcttgatcccaccctgcctcccgttttgctgtccagcagtccgcctgggcccttgtcttccgccactttcagtttcgagccacttagcagtcctgatggcccagtgatcatccagaacctgcgaatcacaggcaccattacagcgagagaacattccggcactggtttccacccgtacactttgtacactgtgaagtatgagactgctcttgacggggagaattcctccggactgcagcagctcgcatatcacacagtgaatagaagatatcgagagttcctgaaccttcagactagactggaggagaagcctgacctacggaagttcattaaaaatgtgaagggaccaaaaaagctgttccctgacttgccactgggcaacatggatagcgaccgggttgaagctcggaagagcttgctggagtcttttttgaagcaattgtgcgcaattccagaaatcgcaaacagtgaggaagtacaggagttcctggcacttaacactgacgcaagaatcgcattcgtgaaaaagcccttcatggtgtctcggatcgataaaatggtagtcagcgctatcgtagataccttaaagaccgccttcccccggtccgagccacagagtccgacagaggagctaagtgaggctgaaacggaatcgaaaccgcagactgagggcaaaaaggctagtaagtctcgcctccgcttttctagtagcaagatttcccctgcactctcagtgaccgaagcacaggataaaattctgtactgcttacaggagggaaacgttgagagtgagactctaagtatgtctgccatggaatcgtttatagaaaagcagacaaagttgttggaaatgcagccaacaaaagccccagagaaggatcccgagcagccaccaaagggcagagtggacagctgtgtaagtgatgcggccgttccagcgcaggatccaagtaatagcgatcccgggacggaaaccgaactcgctgataccgcgttagacctgcttctgctcctgctgaccgagcagtggaaatggctgtgcaccgagaatatgcagaaattccttcggctaatatttggcaccctcgttcaacgttggctggaggtccaagtggccaatttgacttccccacagcggtgggtgcaatatctactgctgctgcaggagtcaatttggccagggggggtgctgcctaagttccctagaccagtgaggacacaggagcagaagcttgccgcagagaagcaagccctgcagtcacttatgggagtgctgcccgaccttgtggtggaaatcctcggggtcaacaagtgccgtttgagctggggtctggtcctggagtcactccaacagccactgattaacagacacctcatctattgcctgggggatatcattttagaatttctggaccttagcgcctccgtggaggagtctgctgcaactacctcagcctctgatactcccggtaactccaaacgcatgggggtgagtagctag

SEQ ID NO: 182028 - DNA, 1308 bp, Artificial Sequence
  derived and/or modified sequence
atgtatgaaactgcactggatggagagaacagtagtggattgcagcaattagcttaccatacagtcaatcgcaggtaccgagagtttcttaacctccagactcggctcgaagagaagcccgacctgaggaagtttatcaagaatgtgaagggccccaaaaaactatttcccgatctccccctggggaacatggattccgaccgggtggaggcccgtaagtctctcctggagagtttcctgaagcaactctgcgctatacctgagatcgcaaattctgaggaggtacaggagtttctggccctcaataccgacgccagaattgcctttgttaagaagccattcatggtgtcgcgaattgacaagatggtagtcagcgccatcgtcgacaccctcaaaaccgcttttcctcgctctgaacctcagagcccaacggaagagctgagcgaggcagaaactgagtcaaagcctcagaccgagggcaagaaagcctctaagagccgtctgcggtttagcagctcaaagatttcaccagctcttagcgtgactgaggcacaggacaagattttgtattgtctccaggagggaaacgtggaatcagagactctgagtatgagcgcaatggaaagcttcatcgaaaaacagacaaagctgctggaaatgcagcctacaaaggcacctgagaaggatccggagcagcctcccaaaggccgggttgactcatgcgtgtccgacgcggccgtccccgcccaggacccatccaactcagatcccggcacggagaccgagctggctgacacagccttagacctgctactgctgttgctgacggagcagtggaaatggctctgtaccgagaacatgcaaaaattcctgagactgattttcgggacactggtgcagaggtggcttgaagtgcaggtggccaacctgactagccctcagcggtgggtgcagtacctgctactcctccaagagtcaatctggcctgggggagtcctcccgaaattcccaaggccggtgcgaactcaggagcagaagttagcagctgagaagcaggccctccagagcctgatgggggtgctaccggacttggtggtggagattctgggtgtgaacaagtgtcgtctatcatgggggctggtgctcgagtctctacagcagccgctgatcaatcgtcatttgatttattgtctgggagacatcatcttagaatttctggatctaagtgcaagcgtggaggagtctgccgccactactagtgcgtccgataccccaggaaatagcaagcgcatgggcgtgtctagttag

SEQ ID NO: 182029 - DNA, 2979 bp, Artificial Sequence
  derived and/or modified sequence
atgaagacagaaacagtgccccccttccaggagaccccagctggcagcagctgccacctgaacaacctgctgagcagcaggaagctgatggctgtgggcgtgctgctgggctggctgctggtgatccacctgctggtgaatgtgtggctgctgtgcctgctgagcgccctgctggtggtgctgggcggctggctgggcagcagcctggccggcgtggccagcggccgcctgcacctggagcgcttcatccccctggccacctgccccccctgcccagaggccgagcggcagctggagcgggagatcaacagaaccatccagatgatcatccgggactttgtgctgtcctggtacagatctgtgtcccaggagcccgcctttgaggaggagatggaggccgccatgaagggcctggtgcaggagctgcggcggaggatgtctgtgatggacagccatgctgtggcccagagcgtgctgaccctgtgtggctgccacctgcagagctacatccaggccaaggaggccacagctgggaagaatggacctgtggagcccagccacctgtgggaggcctactgccgggccacagccccccaccctgctgtgcacagccccagcgctgaggtgacctacacccggggcgtggtgaacctgctgctgcagggcctggtgcccaagccccacctggagaccaggacaggccgccacgtggtggtggagctgatcacctgcaacgtcatcctgcccctcatcagccggctgagtgaccctgactggatccacctggtgctggtgggcatcttcagcaaggcccgggaccctgccccctgcccagccagcgcccctgagcagcccagcgtgcccaccagcctgcccctgattgctgaggtggagcagctgcctgagggccgggccagccctgtggccgcccctgtgttcctgagctacagcgagcctgagggcagcgctggccccagccctgaggtggaggagggccatgaagctgtggagggggacctgggcggcatgtgtgaggagaggaaggtgggcaacaacagcagccacttcctgcagcccaacgtgcggggccccctcttcctgtgtgaagattctgagctggagagccccctgtctgagctgggcaaggagaccatcatgctgatgaccccaggcagcttcctgagtgaccgcatccaggatgccctgtgtgccctggagagcagccaggccctggagcccaaggatggagaggccagcgagggcgctgaggccgaggagggccctggaacagaaacagagaccggcctgcctgtgtccaccctgaacagctgcccagagatccacatcgacacagctgacaaggagattgagcagggagatgtgacagcctctgtgacagccctgctggagggccctgagaagacctgccccagccggcccagctgcctggagaaggacctgaccaatgatgtgagcagcctggaccccaccctgccccctgtgctgctgagcagcagccccccaggccccctgagcagcgccaccttctcctttgagcccctgagcagcccagatggccctgtgatcatccagaacctgcgcatcaccggcaccatcacagcccgggagcacagcggcaccggcttccacccctacaccctgtacacagtgaagtatgaaacagccctggatggagagaacagcagcggcctgcagcagctggcctaccacacagtgaacagacgctaccgggagttcctgaacctgcagacccggctggaggagaagccagacctgaggaagttcatcaagaatgtgaagggccccaagaagctgttcccagacctgcccctgggcaacatggacagcgacagagtggaggccaggaagagcctgctggagagcttcctgaagcagctgtgtgccatccctgagatcgccaacagcgaggaggtgcaggagttcctggccctgaacacagatgcccgcatcgcctttgtgaagaagcccttcatggtgtccagaattgacaagatggtggtgtctgccatcgtggacaccctgaagacagccttccccaggtctgagccccagagccccacagaggagctgtctgaggccgagacagagagcaagccccagacagagggcaagaaggccagcaagagccggctgcgcttcagcagcagcaagatcagccctgccctgtctgtgacagaggcccaggacaagatcctgtactgcctgcaggagggcaatgtggagagcgagaccctgtccatgtctgccatggagagcttcatcgagaagcagaccaagctgctggagatgcagcccaccaaggcccctgagaaggaccctgagcagccccccaagggccgggtggacagctgtgtgtctgatgctgctgtgcctgcccaggaccccagcaacagcgaccccggcacagaaacagagctggccgacacagccctggacctgctgctgctgctgctgacagagcagtggaagtggctgtgcacagagaacatgcagaagttcctgcggctcatcttcggcaccctggtgcagcgctggctggaggtgcaggtggccaacctgaccagcccccagcgctgggtgcagtacctgctgctgctgcaggagagcatctggccaggcggcgtgctgcccaagttccccaggcctgtgaggacccaggagcagaagctggccgctgagaagcaggccctgcagagcctgatgggcgtgctgcctgacctggtggtggagatcctgggcgtgaacaagtgccgcctgtcctggggcctggtgctggagagcctgcagcagcccctcatcaacagacacctgatctactgcctgggggacatcatcctggagttcctggacctgagcgcctctgtggaggagagcgctgccaccaccagcgccagtgacaccccaggcaacagcaagaggatgggcgtgagcagctag

SEQ ID NO: 182030 - DNA, 1308 bp, Artificial Sequence
  derived and/or modified sequence
atgtatgaaacagccctggatggagagaacagcagcggcctgcagcagctggcctaccacacagtgaacagacgctaccgggagttcctgaacctgcagacccggctggaggagaagccagacctgaggaagttcatcaagaatgtgaagggccccaagaagctgttcccagacctgcccctgggcaacatggacagcgacagagtggaggccaggaagagcctgctggagagcttcctgaagcagctgtgtgccatccctgagatcgccaacagcgaggaggtgcaggagttcctggccctgaacacagatgccagaattgcctttgtgaagaagcccttcatggtgtccagaattgacaagatggtggtgtctgccatcgtggacaccctgaagacagccttccccaggtctgagccccagagccccacagaggagctgtctgaggccgagacagagagcaagccccagacagagggcaagaaggccagcaagagccggctgcgcttcagcagcagcaagatcagccctgccctgtctgtgacagaggcccaggacaagatcctgtactgcctgcaggagggcaatgtggagagcgagaccctgtccatgtctgccatggagagcttcatcgagaagcagaccaagctgctggagatgcagcccaccaaggcccctgagaaggaccctgagcagccccccaagggccgggtggacagctgtgtgtctgatgctgctgtgcctgcccaggaccccagcaacagcgaccctggaacagaaacagagctggccgacacagccctggacctgctgctgctgctgctgacagagcagtggaagtggctgtgcacagagaacatgcagaagttcctgcggctcatcttcggcaccctggtgcagcgctggctggaggtgcaggtggccaacctgaccagcccccagcgctgggtgcagtacctgctgctgctgcaggagagcatctggccaggaggagtgctgcccaagttccccaggcctgtgaggacccaggagcagaagctggccgctgagaagcaggccctgcagagcctgatgggcgtgctgcctgacctggtggtggagatcctgggcgtgaacaagtgccgcctgtcctggggcctggtgctggagagcctgcagcagcccctcatcaacagacacctgatctactgcctgggggacatcatcctggagttcctggacctgagcgcctctgtggaggagagcgctgccaccaccagcgccagtgacaccccaggcaacagcaagaggatgggcgtgagcagctag

SEQ ID NO: 182031 - DNA, 2979 bp, Artificial Sequence
  derived and/or modified sequence
atgaagaccgagaccgtgccccccttccaggagacccccgccggcagttcgtgtcatttaaataatcttctgagctctcggaagctgatggcagtgggagtgctacttggctggttgctagttattcacttgctggttaacgtatggctcctatgtctcctgtcggctctcctagtggtattgggcgggtggctcgggtccagcctcgccggagttgcgagcggccggcttcatctcgagcgctttatccctcttgcgacatgtcccccatgtccagaggccgaaaggcagctcgagcgggagattaatagaacaattcagatgattattagagacttcgtgctgtcatggtataggtccgtgagtcaggaaccggcctttgaagaagaaatggaggcagctatgaagggattggtgcaagagctgaggcgtaggatgagtgttatggatagccatgccgtggcccagtccgtgcttaccttgtgtggttgtcacttgcaatcctatattcaagcaaaggaggccacggcaggaaaaaatggaccagtggagcctagccatctttgggaagcatactgtagagctaccgccccccaccccgcagtgcactccccatccgccgaagtgacctatacaagaggggtcgtaaacttactcttacagggacttgtgccaaaacctcatctcgaaaccagaactgggcgacatgtagtggtcgagcttatcacctgcaatgtcattcttcccttgatttcccgcctaagcgaccctgactggatccatctggtgctcgttggaatattctctaaagcaagggaccctgccccctgccccgcgagtgctccagaacagccatcagtgcccacctccctccccctgatagccgaggtggagcagttacccgagggccgggcttctcctgttgcagctccggtgttcctctcatactccgagccggaagggagtgcagggccgtcacccgaagtggaagagggccacgaagctgtggagggagatctgggaggtatgtgcgaggaacgtaaagtcgggaacaacagcagtcattttttgcagcccaatgttagaggaccattatttctctgcgaggactccgaactcgaatcgccgctgtctgagctgggaaaagagaccatcatgctgatgacacctggttcctttctgtcagacaggattcaggacgccctatgcgccttggagagctcgcaggctttggagcctaaggacggcgaagcttcggaaggggcggaggccgaggaaggtcccggaaccgagaccgagaccgggctccccgtctccacactcaacagctgcccagagatccacatcgacacagcggacaaggaaatagagcagggcgacgtgactgctagtgtgaccgctctgcttgagggcccagagaagacctgtccgtcacgcccctcatgcttggaaaaggacctgacaaacgacgtcagctcgctcgatcctacactgccaccagtgttgctgtcgtcttcccccccaggacccttatctagcgccacattctccttcgagcccttgtcctctcctgatgggcccgtgatcattcagaatcttcgcattactggtacgatcaccgcacgcgagcattcgggaacgggattccatccatatactctgtacaccgtcaaatatgaaacggcactggacggtgaaaattccagcggactgcagcagctcgcctatcacactgtgaaccggcgatatagagagtttttaaacctccaaacaagattggaagagaaacctgatctgagaaaatttatcaaaaacgtgaaagggccaaagaagctatttccagatttgccattagggaacatggatagtgatcgcgtggaagccaggaagtctctgctggagtcatttctcaagcagctctgcgcaatccccgaaatagcgaattcagaggaagtgcaggaatttctggccctcaatacagatgccagaatcgcgtttgtgaagaagccgttcatggtctccagaatcgacaaaatggtggtctccgccatcgtcgacactctcaaaacggcattccctcggagcgagccccagtctcccactgaggagctctcagaggcggagaccgagtcgaagccacagaccgaagggaagaaagcttccaagtctcggcttaggttcagctcaagcaagatttcaccagccctgtcggtcaccgaagcccaggacaagattctctattgcttgcaagagggtaatgtcgagtctgaaaccctgtctatgagcgctatggagtctttcattgagaagcagaccaaattgctcgagatgcagccaaccaaggctcctgagaaagatccagagcagcctcctaaggggcgagtcgattcatgtgtttcggacgctgcagttcctgcccaggacccctccaactctgaccccggcacagaaaccgagctggccgacaccgccttggatctgctgctccttctcctgactgagcaatggaaatggctgtgcaccgagaatatgcagaagttccttcgtctgatttttggcaccctagtccagcgatggctggaagtccaggtggctaacctgacgagtccacaacgttgggtccaatacctcttgcttctgcaggagagcatctggccaggtggagtgctgcccaaatttcctagacccgtcaggacgcaggagcagaaactggcggctgagaagcaggcactgcagtctctcatgggcgtgctccccgacctggttgtggagattttgggggtcaataaatgccgcttgtcttggggactggtccttgaatccctgcaacagcccctgattaataggcacctcatatactgcttaggagatattatcctcgagttcctggatctgtcagcttctgtggaggagagtgccgccacaacaagcgcctcagacacccccggtaactcaaagagaatgggggtgagctcctag

SEQ ID NO: 182032 - DNA, 1308 bp, Artificial Sequence
  derived and/or modified sequence
atgtacgagaccgccctggacggcgagaacagcagcggcctgcagcagctagcatatcatacggtcaataggcgctaccgcgagtttctgaatcttcagacccgactggaagaaaaacccgacctccgcaagttcatcaagaatgtaaagggtccaaagaaacttttccccgacctccccctcggaaatatggatagcgatcgggttgaagcccggaagtccctgcttgagagttttctgaagcagctctgcgcaattcccgagattgcaaactccgaagaagtgcaggaatttctggctctgaacactgacgctcgcatcgcatttgtaaagaagccattcatggtgtcccgtatcgataagatggtggtgtctgccattgtggatacactgaagaccgccttcccgcggtctgaaccacagtcaccaaccgaggaattgtctgaggctgagaccgagtctaagccacagacggagggcaaaaaggctagcaagagccgtctaaggttctcgtctagcaagatctccccggccctgtcggtgaccgaggcccaggataagatcctgtattgcttacaggaagggaacgtcgagtcggagaccctcagtatgtcggctatggagtccttcatagaaaagcagaccaaactgcttgagatgcagcctaccaaagcaccagaaaaggaccctgagcagcccccaaaggggagggtcgactcttgcgtgtcagacgccgctgtgcccgctcaagacccctcaaactctgaccctgggacagaaaccgagttggcagacactgccctggacctgttgctgctgctgctcactgagcaatggaagtggctctgcacagaaaatatgcagaagttcctgaggttaatcttcggaacgttggttcagagatggctggaggtccaggtggctaatttgacttcccctcagcgttgggtccagtatctgctgttgctacaggagtcaatttggccgggaggggtgctgccgaagttcccacggcctgttcgcactcaggagcagaaattggcggccgagaagcaggctctgcagtcattaatgggcgtcttacccgacctcgtggttgagatcctcggagttaataagtgtcggctgtcttgggggctagtgctggagagcttacagcagcccctgatcaaccggcaccttatatattgcctgggggatattattttagagtttctggatctgtccgcgagcgttgaggagtccgctgccacaactagcgcatctgacactcctgggaattctaaaaggatgggagtaagttcatag

SEQ ID NO: 182033 - DNA, 2979 bp, Artificial Sequence
  derived and/or modified sequence
atgaagaccgagactgtccctccgtttcaggaaacacccgctggatcaagttgccacttaaataatctgttgtcctcgaggaagttaatggccgtaggggtgctgctgggctggttactggtgatacacttgttggtgaatgtctggctcctgtgtctgctgagcgctttgctcgtggttctcggagggtggctgggtagctcccttgctggcgtggcgagcggcaggttacacctggaacgattcattcctctagccacctgccctccatgcccggaggctgaacgccaactggagcgggagatcaataggaccatacagatgatcattcgtgatttcgtcttgtcttggtatagatctgtgtcccaggagccagccttcgaggaggagatggaggccgctatgaagggtctcgttcaggaactgcgcagacgaatgtccgtaatggattctcacgccgttgcacagtccgtgctgacactgtgtggttgccatctgcaaagttatatccaggccaaggaagcgaccgcaggcaagaatgggcctgtggagccgagccacctttgggaagcctattgcagggccacagctccacacccagccgtacactcaccttctgccgaggtcacatatacgcgcggagtggtcaaccttctactgcagggtcttgtccccaagccacacctggaaaccagaacaggaaggcacgtagttgttgagctcatcacttgcaatgtgatcttgccactgatctcccgcctgtccgacccggattggatccacttagttctagtggggatcttcagcaaagcaagagaccctgctccgtgtccagcttccgcccctgaacagcctagtgtcccaacttcattgccactgatcgccgaggttgagcaactccccgaggggcgagcttccccagtggcagctcccgtgtttctctcctatagtgaacccgaaggttccgccggaccgagtcccgaagttgaggaagggcatgaggcggtggaaggcgatctcggcggtatgtgcgaggagaggaaagtcgggaataactctagtcacttccttcagcccaatgtgcgcggaccactcttcctgtgtgaggattctgagctcgagtcacctctgtctgagctcggaaaagaaaccattatgctaatgactcctgggtctttcctgagcgaccggattcaagatgctctctgtgctctcgagagttcccaggcactggagccaaaggacggggaagcctctgaaggggctgaggctgaagagggtcctggcaccgaaacagaaacaggtctgcccgtatcaacacttaactcctgcccggaaattcatatcgacaccgccgataaagaaattgagcagggtgatgttaccgccagcgtgactgcgcttctcgaaggcccagaaaagacttgcccgagtagaccgagttgcctggaaaaagacttgactaacgacgtgagtagtctggaccccacacttcccccagtcctgctgtcgagttccccacccggtccccttagctctgccacctttagctttgagcctctcagttcccccgatggtccggtgatcatccagaatcttagaatcaccggaacgattaccgcgagagagcattctggcactggcttccatccctataccctgtatactgtgaaatacgaaacagcactcgacggagagaattcctccgggctccagcagctagcttatcacaccgtaaatagaagatacagagaattccttaatctccagacccgtcttgaggaaaaacccgacctgcgaaaattcataaagaacgttaaggggcctaagaaactttttcccgacctgccccttggaaacatggactctgatcgcgttgaagccagaaagagcctcctcgagtctttcctgaagcagctgtgtgccatccccgaaattgcaaacagcgaggaagtccaggagtttctggccctaaacacagacgctcgcattgctttcgttaaaaaacctttcatggtgtcccgaattgataagatggtagtttccgcaatagtggacacccttaaaactgccttcccgaggagcgagccgcaaagcccaacggaagagctgtcagaagcagagaccgagagcaagccacagacagaaggaaaaaaggcttctaaaagccgcctgcggtttagttcatccaaaattagtccggctctgagcgtaacagaagcacaggacaaaatactttactgcttgcaagagggtaacgtggagagtgagactttgagtatgagtgctatggagtccttcatcgagaagcagacaaagttgctggaaatgcagccaacaaaggcacctgagaaagacccagaacagcctcccaaagggagggtggacagttgtgtgtccgatgcagcagtgcccgcacaagatccaagcaatagcgaccctggaactgaaaccgaattagcggacactgccttggatcttctgctgctgcttttaacggagcaatggaagtggctgtgtaccgagaacatgcagaagtttctgaggctaatctttggcactctggtccagaggtggctcgaggttcaagtcgccaatttaacgagtcctcagcgctgggtccaatacctgctcctgttgcaagagtccatttggcccggtggcgtgctccctaaatttcccaggcccgtgcggacccaggagcagaagctcgctgctgagaagcaggctctccagtccctcatgggcgtgctccccgatctggtcgtggagatcctcggggtcaataaatgtaggctgtcctggggccttgtcttagagtctctccagcaacctttgattaatcgccacctaatttactgtctgggagacattatcttagagttcctcgatctatcagcgtcggttgaagaaagtgctgccactacatcagcaagcgacactcccggtaacagcaagaggatgggcgtcagcagctag

SEQ ID NO: 182034 - DNA, 1308 bp, Artificial Sequence
  derived and/or modified sequence
atgtacgaaaccgctctggacggagagaattcaagtggactgcagcaactcgcctatcatactgtcaatagaaggtaccgtgagttcttgaacctccagactaggctagaggagaagccagatcttcggaagttcataaagaatgtcaagggccctaagaagttgtttcccgatctgcctttgggcaacatggactccgacagagttgaggcgagaaaatcactcctggaatcatttttgaaacagctctgcgctattccagagatcgccaattccgaagaagtgcaggagttcctggcgcttaataccgacgcacgcatcgcttttgttaagaaaccctttatggtgagtagaattgacaaaatggtagtgtctgctatcgtagacaccctaaaaaccgccttcccacggagcgagcctcagagccccaccgaggagctgtccgaggcagagactgaaagcaaaccccaaactgagggtaagaaggcgagcaagagccgcctgcgattctcttcttcaaagatttccccggctctgtccgtcaccgaagcgcaggataaaattttgtattgccttcaggaaggcaacgtagaatccgaaaccttgtcgatgtctgccatggaaagttttattgaaaagcagaccaaactcctggaaatgcagcccacgaaggctcccgaaaaggaccccgagcagccacccaaagggcgagtggactcctgcgtgtccgatgcagcagtcccagcccaggacccgtcaaatagcgatccgggtaccgagaccgaactggccgatacagcgttagacctgttactgttgctcctgaccgaacaatggaaatggctttgtactgagaatatgcagaaattcctgcgacttatcttcggaacactcgtccagcggtggttggaggttcaggtcgcaaacctcaccagcccacagcgatgggtacaatatctcctgctgcttcaagagtcaatctggccaggaggcgttttgccaaagtttcctaggcccgtgcggactcaggaacagaagctagccgctgagaagcaggccctgcagagcttaatgggtgtgctacccgatctggtggtggaaatactgggagtgaataagtgtcgcctaagctggggactagtgttggagtcattgcaacaacccctaattaataggcatttaatctattgtttaggcgacataatattggagttcctggatctctccgcaagcgtggaggagagtgccgcaaccacgtccgcctctgataccccagggaactccaagaggatgggagtgtccagctag

SEQ ID NO: 182035 - DNA, 6535 bp, Artificial Sequence
  derived and/or modified sequence
atgcctcgctcccgtcgacgtcgacccggaagctgtcgccggcggccggccggcggtcagccttcacacaggcccggctgcggagcgcagtcgcccaggtttacggcggcagagggccgaggctcccggagaggaccgcgatgagtccacttcaggtcggggctgagtgtgggcgcgcggttcccggcggcgtgtgacccagtcttcgccggccgctgcccgctgcgtgtgtaagtgtccgtgggccccagggccttgcagcgcccgccccgaggccccgaagaggccttccgcctggggcagtgtgaaggccacagagttttcctccaaagccacacctcagctggaaggggcgagttggagggctctgttagtggtagccatggggagacgcggagctgcagctgtcgctttgcagtgcctgtaggactttgagggcctggagccccggttccctgaacagcacccagatcgccccatatctgagacacagttcatgccccccttccctaactctgaagtaaaatcttgagggctgtcatctggggaagccaccttgtccgttcagccatgaagacagaaacagtgccaccgttccaggaaactccagctggatcgagctgtcacctcaataacctgttgagtagccggaagctgatggctgtgggggtcttgcttggctggctcctggtcatacaccttctggtcaacgtgtggctgctgtgccttctgtcggcattgctagtggtgctgggaggatggctgggctccagcctcgctggagtggcttcaggtcgactgcatctggaacgcttcatcccgttggccacctgtcctccatgccctgaggcagaaaggcagctggaacgggagatcaaccgcaccatccagatgattattcgagattttgtgttatcttggtaccgttccgtgagccaggagccagcctttgaggaagaaatggaggcagccatgaaagggttggtccaggagcttcggagaaggatgagcgtgatggacagtcatgctgttgcccagagtgttctgactctctgcggttgtcacctgcagagctacattcaggcaaaggaggccactgcagggaagaatggtccagttgagccttcccacctctgggaggcttactgccgggcgactgccccacatcctgctgtgcacagccccagtgctgaagtcacctatacgcgtggcgttgtgaatttgttgcttcaagggctggtgcccaagccccacttggagactcgtaccggacgccatgtagtggtcgaactcatcacatgcaatgtaatcttaccactgatcagcaggctgtcagatcctgactggatccaccttgtactcgtgggtatcttttccaaggccagagatccagcaccctgcccagccagtgcccccgaacagccctcagtgccgacatctctgccactgattgctgaggtagagcagcttccagaagggagagcttctccagtagcagccccagtattcctaagttacagtgagccagagggttctgcaggcccctctccagaggttgaagaaggccacgaagctgtagagggagatttgggtgggatgtgtgaagaaagaaaagtaggaaacaactcatctcatttcctacagccaaatgttcgaggtcccctgttcttatgtgaagactcagagctggagtctccgctgtctgaactgggcaaagaaaccatcatgctcatgactccaggcagctttctctctgacaggattcaggatgccctgtgtgccctagagagttcccaggctctggaacccaaagatggtgaggcatctgaaggagcagaggctgaggagggtccagggacagaaacagagacaggcctgccggtctccacactgaattcctgcccagagatccatattgacacagcagacaaggagatagaacaaggagatgttaccgcctctgttacagctttgctggaggggccagaaaagacctgcccctcacggccgtcatgcttagagaaggatctcaccaatgatgtgagctcccttgatcctactctgccaccagttctgctttcctcctctccacctggtcctctcagctcagccaccttcagctttgagcccctaagcagtcccgatggtccagttatcatccagaaccttcgtatcactggcaccattacagcccgagagcacagtggcactggattccacccatacacactctatactgtgaagtacgagacagcccttgacggtgaaaacagcagcggcctgcagcagctggcctaccacactgtgaatcgtcgctatcgggagttcttgaatctgcagacccgtctggaggagaaaccagatctacgaaagttcatcaaaaatgtgaagggtcctaaaaagctctttccagatcttccattgggaaacatggacagtgacagagtagaagcccgtaagagcctcctagaatcattcctaaagcaactctgtgccattccggagatcgctaacagtgaggaggtgcaggagttccttgctctgaacacagatgctcgtattgcctttgtcaagaaaccatttatggtctctagaatagacaagatggtggtgagtgccattgtggacaccttgaagacagcgtttcctcgctctgaaccccagagccccacagaggagctgagtgaggccgagaccgaaagcaagccccagacagaaggcaagaaggctagcaagtctaggctgaggttctcatccagtaaaatttctccagcactaagtgtgactgaagcacaagacaagattctttattgtctccaggaaggcaatgtggagtctgagactctatccatgtctgcgatggaatcttttattgaaaaacagacaaagttactggaaatgcagccaacaaaagccccagaaaaagatcctgaacaacctcccaaaggacgtgtggacagttgcgtgtcagatgcagccgtgccagcccaagaccccagcaacagcgatccaggaacagagacagagttagctgacacagccctggatctgctcctcttgctactaacagaacagtggaaatggctatgtaccgaaaacatgcaaaagtttcttcgtcttatctttgggaccctagttcaaaggtggctagaggtgcaggtagctaatttaacaagtccacagcgctgggtgcagtacctcctgcttcttcaggagtccatctggcctggtggagttttgcctaagtttccacggcccgtaaggacccaagagcagaaactggctgctgagaaacaggctttgcagagcctgatgggagtcctcccagatctcgtagtagaaattcttggggtgaacaaatgccggctgagctggggtctagtcctggagtcactacaacaacccctcatcaacaggcatttgatttactgccttggggacatcatcctggaattcttggatctcagtgcctctgttgaggagtctgctgctaccacctctgcctcagataccccaggcaactctaagaggatgggtgtctcctcttagctggttattcacgccttcttcccaggtcagggaagtagagttactcggccaccagagaccagtcaggaagcccgtgccctcttcaagtaggctacagctaagaaggcctaggttctcggtggctcacttctctcccacttctgctccatttgtagcaggtgacaggggtctgtgtgtcccagttgtatgcacgtttatttccctgttccttttgtgatgttgggattgttgctggtgagtagatcctgtttcctttgggaaaagaagctgtgaggtagaggaatgaaccccttttgcttctccttttgccatcctccctgagattgtttgccagaatcctggccctgtgcacacatgtgcttaatccaccagcacacaagctctagatagaacaggaaaaaaactgtggccagatttccttggaggagaaaacaaccttctcagctctctgttcctacccggaaactaaaaattcattcagggccattctcaaaaaccagactcctgggtctaatctagtttcccaacagttccagaagaagaaggagggaagaaaatttttcaaggaacttcttgctcatgtgttgctgtttcccaacacatcagccttatggaagatgtcatgaggctgcttgcctgggaggctacactttcctttccagaagacttcaaagctgactgccaaagcttctggtaaatccaccccacccttcacaccctttcctgaaaggcatttataccacccattttatttattggctttgctcccaaccccctgccctagagcaattgagtttttgaatttttgaccctctctctgtcttcagcaaaactgcatgacaagctgcatattcagcctcagtttttccaaggagaatggaaagcacttgcctcctgtcttaagaatgcacaaagagtaggactagcaaggctgggggatgaaatctcccttcctaagtctttgacagagaacttttattattctgaacagataagattagcaaacttacaaggaatagcttcttatttcccattccttacggttataatcagtcctttaacaacaccagcatgaaggcaaaggtgttttgtcagactgcaacatctattagaaaggcaaggcaactgggaattgctggagaaggataaatcaggaggaattgctggtagaaaaggctgcagacagtcacagggaagtgctgtatattaaatgcatgtgaatagctggcaaaaagatgtcaaggatgtcactgggagccctttggcttcacactcgcctgttagcgccttgctttcgctgaattaccagagcctaccactcggaggaaggtcttggagttagactgatgagaaggcaatggggtgtcaaaaacaagtgtcaaagttctcttagattctgaagtcggtgatgagcacacaattaaagtggtttgtggaagaaagttgtaaaatctttttacttttttgcccctctggaggcttttaaccctaaattgtgtctgatgtattcgggaggcttaggtgtgcaattcttgcccaaaggcaaggagatgaatgagatgtctcatggcctcttctagccttaaaagttgaccattacagtgactttatggctccaaagttcttgaagcatctccagccctagactttgacaagaaaaggtagctcagcatctctactttccgtgagtacctgcaggagtccagccaatgtattagagctgatcattaagctccttcagtgagggctaagatcctattctcgatgagcatagggggacagccttgttttatgccacttttctctccccatacctaccttcccctcatgtgtacttagccacctgtgttgctttgaatctgctgccagttctggctcaaatgtggcacaaaatcagtacatcagacacaccatgaaatccctgtggctataaattctaaggaatcttttgacacttccagcccaaagaacttatttttatttcgtattatataagagtccccacctctactccacgtaccccaaaaagataagctgtcctcagatcctccttctacccaggagggaaataatggatattgccaagggaacaatcagaactcatctggctttgaaaacgacctgccaagtttggctagcaggttcagacaacaagagagtaacaattggtagagagccacaggtagaaaagatactcccagctgacagggtgataaaaggcagggaagaattgggcctgtgctgatccaggaaggttttattgtttgcttgttttttgtatttactcgtgactaaattttattcatttaagtcagaattttgatatttgaaataagactactttcccttttcttactatctataaaaaagacgaggcagggatgctgtgttctttctgtcaaattctaaatgtgatctttgccattgcttatttgaattcaagaaagctatactttttcatcacatataactcacagtttcatttttgcattgttggattagacttaataaaacctaaatggaaaataaattcctaaatctgagcctaggagcatgtataaattttatttttattattattatacattaagttctagggaacatgtgcacaacatgcaggtttgttgcatatgtatacatgtgccgtgttggtgtgctgcacccgttaactcgtcatttacattaggtatatctcctgatgctatcccttccccctcccccgacctcacaacaggccccagtgtgtgatgttcaccttcctgtgtccaagtgttctcattgttcaattcccacctatgagtgagagcatgtataaattttaaaatcaatacaagctactccaatttccattttggaaatttccagtttacaaggtgattttcttattgttgtaaagaaacacataatgtgagatctaccctcttaagtgtacagtacattatttatttattttgagacggtacattattaactagaagcagcacag

SEQ ID NO: 182036 - DNA, 1562 bp, Artificial Sequence
  derived and/or modified sequence
agccttcacacaggcccggctgcggagcgcagtcgcccaggtttacggcggcagagggccgaggctcccggagaggaccgcgatgagtccacttcaggtcggggctgagtgtgggcgcgcggttcccggcggcgtgtgacccagtcttcgccggccgctgcccgctgcgtgtgattcaggatgccctgtgtgccctagagagttcccaggctctggaacccaaagatgtacgagacagcccttgacggtgaaaacagcagcggcctgcagcagctggcctaccacactgtgaatcgtcgctatcgggagttcttgaatctgcagacccgtctggaggagaaaccagatctacgaaagttcatcaaaaatgtgaagggtcctaaaaagctctttccagatcttccattgggaaacatggacagtgacagagtagaagcccgtaagagcctcctagaatcattcctaaagcaactctgtgccattccggagatcgctaacagtgaggaggtgcaggagttccttgctctgaacacagatgctcgtattgcctttgtcaagaaaccatttatggtctctagaatagacaagatggtggtgagtgccattgtggacaccttgaagacagcgtttcctcgctctgaaccccagagccccacagaggagctgagtgaggccgagaccgaaagcaagccccagacagaaggcaagaaggctagcaagtctaggctgaggttctcatccagtaaaatttctccagcactaagtgtgactgaagcacaagacaagattctttattgtctccaggaaggcaatgtggagtctgagactctatccatgtctgcgatggaatcttttattgaaaaacagacaaagttactggaaatgcagccaacaaaagccccagaaaaagatcctgaacaacctcccaaaggacgtgtggacagttgcgtgtcagatgcagccgtgccagcccaagaccccagcaacagcgatccaggaacagagacagagttagctgacacagccctggatctgctcctcttgctactaacagaacagtggaaatggctatgtaccgaaaacatgcaaaagtttcttcgtcttatctttgggaccctagttcaaaggtggctagaggtgcaggtagctaatttaacaagtccacagcgctgggtgcagtacctcctgcttcttcaggagtccatctggcctggtggagttttgcctaagtttccacggcccgtaaggacccaagagcagaaactggctgctgagaaacaggctttgcagagcctgatgggagtcctcccagatctcgtagtagaaattcttggggtgaacaaatgccggctgagctggggtctagtcctggagtcactacaacaacccctcatcaacaggcatttgatttactgccttggggacatcatcctggaattcttggatctcagtgcctctgttgaggagtctgctgctaccacctctgcctcagataccccaggcaactctaagaggatgggtgtctcctcttagctggttattcacgccttcttcccaggtca

SEQ ID NO: 182037 - DNA, 1430 bp, Artificial Sequence
  derived and/or modified sequence
aagatgtgaagggtcctaaaaagctctttccagatcttccattgggaaacatggacagtgacagagtagaagcccgtaagagcctcctagaatcattcctaaagcaactctgtgccattccggagatcgctaacagtgaggaggtgcaggagttccttgctctgaacacagatgctcgtattgcctttgtcaagaaaccatttatggtctctagaatagacaaggtctaggctgaggttctcatccagtaaaatttctccagcactaagtgtgactgaagcacaagacaagattctttattgtctccaggaaggcaatgtggagtctgagactctatccatgtctgcgatggaatcttttattgaaaaacagacaaagttactggaaatgcagccaacaaaagccccagaaaaagatcctgaacaacctcccaaaggacgtgtggacagttgcgtgtcagatgcagccgtgccagcccaagaccccagcaacagcgatccaggaacagagacagagttagctgacacagccctggatctgctcctcttgctactaacagaacagtggaaatggctatgtaccgaaaacatgcaaaagtttcttcgtcttatctttgggaccctagttcaaaggtggctagaggtgcaggtagctaatttaacaagtccacagcgctgggtgcagtacctcctgcttcttcaggagtccatctggcctggtggagttttgcctaagtttccacggcccgtaaggacccaagagcagaaactggctgctgagaaacaggctttgcagagcctgatgggagtcctcccagatctcgtagtagaaattcttggggtgaacaaatgccggctgagctggggtctagtcctggagtcactacaacaacccctcatcaacaggcatttgatttactgccttggggacatcatcctggaattcttggatctcagtgcctctgttgaggagtctgctgctaccacctctgcctcagataccccaggcaactctaagaggatgggtgtctcctcttagctggttattcacgccttcttcccaggtcagggaagtagagttactcggccaccagagaccagtcaggaagcccgtgccctcttcaagtaggctacagctaagaaggcctaggttctcggtggctcacttctctcccacttctgctccatttgtagcaggtgacaggggtctgtgtgtcccagttgtatgcacgtttatttccctgttccttttgtgatgttgggattgttgctggtgagtagatcctgtttcctttgggaaaagaagctgtgaggtagaggaatgaaccccttttgcttctccttttgccatcctccctgagattgtttgccagaatcctggccctgtgcacacatgtgcttaatccaccagcacacaagctctagatagaa

SEQ ID NO: 182038 - protein, 360 aa, Artificial Sequence
  derived and/or modified sequence
MLGSGFKAERLRVNLRLVINRLKLLEKKKTELAQKARKEIADYLAAGKDERARIRVEHIIREDYLVEAMEILELYCDLLLARFGLIQSMKELDSGLAESVSTLIWAAPRLQSEVAELKIVADQLCAKYSKEYGKLCRTNQIGTVNDRLMHKLSVEAPPKILVERYLIEIAKNYNVPYEPDSVVMAEAPPGVETDLIDVGFTDDVKKGGPGRGGSGGFTAPVGGPDGTVPMPMPMPMPMPSANTPFSYPLPKGPSDFNGLPMGTYQAFPNIHPPQIPATPPSYESMTLMLIRISLLHRLLVLDPSQKPLQSFLPDLQITMTTLSYQSCHLCQTHYQLHLLVPAPQHLKTLTLMIFPGGLKS

SEQ ID NO: 182039 - DNA, 1083 bp, Artificial Sequence
  derived and/or modified sequence
atgctgggcagcggcttcaaggccgagagactgagagtgaacctgagactggtgatcaacagactgaagctgctggagaagaagaagaccgagctggcccagaaggccagaaaggagatcgccgactacctggccgccggcaaggacgagagagccagaatcagagtggagcacatcatcagagaggactacctggtggaggccatggagatcctggagctgtactgcgacctgctgctggccagattcggcctgatccagagcatgaaggagctggacagcggcctggccgagagcgtgagcaccctgatctgggccgcccccagactgcagagcgaggtggccgagctgaagatcgtggccgaccagctgtgcgccaagtacagcaaggagtacggcaagctgtgcagaaccaaccagatcggcaccgtgaacgacagactgatgcacaagctgagcgtggaggccccccccaagatcctggtggagagatacctgatcgagatcgccaagaactacaacgtgccctacgagcccgacagcgtggtgatggccgaggccccccccggcgtggagaccgacctgatcgacgtgggcttcaccgacgacgtgaagaagggcggccccggcagaggcggcagcggcggcttcaccgcccccgtgggcggccccgacggcaccgtgcccatgcccatgcccatgcccatgcccatgcccagcgccaacacccccttcagctaccccctgcccaagggccccagcgacttcaacggcctgcccatgggcacctaccaggccttccccaacatccaccccccccagatccccgccaccccccccagctacgagagcatgaccctgatgctgatcagaatcagcctgctgcacagactgctggtgctggaccccagccagaagcccctgcagagcttcctgcccgacctgcagatcaccatgaccaccctgagctaccagagctgccacctgtgccagacccactaccagctgcacctgctggtgcccgccccccagcacctgaagaccctgaccctgatgatcttccccggcggcctgaagagctag

SEQ ID NO: 182040 - DNA, 2356 bp, Artificial Sequence
  derived and/or modified sequence
gaaccctgaagtcggtgtctgctgcgttcacggcaggattcggttaggaggaacagcacagcatgctgggctctggatttaaagctgagcgcttaagagtgaatttgagattagtcataaatcgccttaaactattggagaaaaagaaaacggaactggcccagaaagcaaggaaggagattgctgactatctggctgctgggaaagatgaacgagctcggatccgtgtggagcacattatccgggaagactacctcgtggaggccatggagatcctggagctgtactgtgacctgctgctggctcggtttggccttatccagtctatgaaggaactagattctggtctggctgaatctgtgtctacattgatctgggctgctcctcgactccagtcagaagtggctgagttgaaaatagttgctgatcagctctgtgccaagtatagcaaggaatatggcaagctatgtaggaccaaccagattggaactgtgaatgacaggctaatgcacaagctgagtgtggaagccccacccaaaatcctggtggagagatacctgattgaaattgcaaagaattacaacgtaccctatgaacctgactctgtggtcatggcagaagctcctcctggggtagagacagatcttattgatgttggattcacagatgatgtgaagaaaggaggccctggaagaggagggagtggtggcttcacagcaccagttggtggacctgatggaacggtgccaatgcccatgcccatgcccatgcctatgccatctgcaaatacgcctttctcatatccactgccaaagggaccatcagatttcaatggactgccaatggggacttatcaggcctttcccaatattcatccacctcagataccagcaactcccccatcgtatgaatctatgacattaatgctgataagaatatctcttctgcacagattgttggtcctggacccaagccagaagcctctgcaaagcttccttccagacctgcagataactatgacaactttgtcctaccagagttgccatctgtgccagacacactaccaactgcatctgctggtgccagcacctcagcatctgaagacattgactttgatgatctttcccggaggtttgaagagctgaaaaagaaaacataggtctcttaaaccaggcaactttcacgttttgggagttgagactgagcaatttctccttgtaacaaagaatctccatgaaattctgtttcatctgttaaccgtcactcagcacaacactccctctgggctctcttcctgctcctccagattctgctgctttccagttctctgttgatcctgagactaacaattggagactgaggccagagcaactggctcctggcagctgtgcttgtccgtttcctgtcagagtgatcccaggtttcctcctggcccgtcccatggtccctccacaggagtgtgagaggatgggggaagcactgtgggaagaccaccaaagatggctggacagtgggagagagcacgttgtgaagcatcccagcctcgtgttgaggttccagacttagaaacagacccctctgtacagggggattgtggtgagtgagaatcaaggccaccttgtgtgttttctcactctcgaatgcaagtgggagagggaaaatgactcgggacgccattgtaacggttcctggaagctgggccctctcattggcatatacagtactcctcgctgcagggcactgtcccaccgggatccagttgcaaagtttgtcttgacagttgaaggcctcgcttagttgtactggattctcagggagccctctgtggccttttgctttgcgtgctgtttcccttgtaccagagggcggcaccgtggaaattctgttttccctgtagcatattgtgttggattgcattactggcagagaaaggacaaggtgccattcaagtcctagggtgggcttccagctgccttaatagaagtactcaagtcttttgggtagtgagctggaaagcctacaggaaaagaggggtacctgttttcatttgaaaactttgattcatggaacctttaaaactaatctcagaaaaatttttggtgcccatgcagctgtagttgttcactgctttcctggatggatgggactcttatgtcataacttctgttactcctttggcccatagctaaggtcatccttccccacaggggtggctttgggattggatgatacagcttttgcttctgtgtagtatacctgtacatacttgtttcaggcagcctttctttaatgttttcagttggtttgtattctgtagctcagtagctgctaataaagttaaagatcctgtgtcctg

SEQ ID NO: 182041 - DNA, 1083 bp, Artificial Sequence
  derived and/or modified sequence
atgctgggtagcgggttcaaagccgaaaggttgcgggtgaacctgcgtctggtgatcaacagactcaagcttctggaaaaaaagaaaaccgagctggcccagaaggcccgcaaagagatagccgattacttagccgccggaaaggatgaacgcgcacgcatcagggtcgagcatattatacgtgaggattatctcgtggaagctatggaaattttagagctgtattgcgacctgcttcttgctagatttggattaatccagagcatgaaggagttagacagtggcctcgccgaatcagttagtactttaatctgggctgcaccgcgcctacagtctgaggtggccgagctcaagatagtggccgatcagctttgtgctaagtatagcaaagagtacggtaaactgtgtcgcaccaaccagatcggaacagttaacgaccggctcatgcataaactgtccgtggaagcacccccaaagatcctggtcgaaaggtatctgatagaaatagccaagaattacaatgttccttatgaacccgacagtgtcgtgatggccgaagctccgccgggagtggagactgatctcatagatgttgggtttaccgatgacgttaaaaagggcggccccggtagaggcggctcaggtgggttcaccgctcctgtggggggacccgatggaacagtgcccatgcccatgcctatgcctatgcccatgcccagcgcaaataccccctttagttatccactccccaaaggtcccagcgacttcaacggattgccgatgggcacgtatcaggccttccccaacatccacccaccacagattcctgctactcctccatcatacgaaagcatgactcttatgctaatcagaatttccctgcttcatcggctgctggtccttgacccatcccagaagccattgcagtcctttctcccagacttacagatcacaatgactaccctctcataccagagctgccacctgtgccaaacccactaccagctacacctcttagtgcccgcccctcagcacttgaaaacactcacacttatgatcttccctggtggcctgaagagctag

SEQ ID NO: 182042 - DNA, 1083 bp, Artificial Sequence
  derived and/or modified sequence
atgctgggcagcggcttcaaggccgagcggctgcgggtgaacctgcggctggtgatcaaccggctgaagctgctggagaagaagaagacagagctggcccagaaggccaggaaggagattgctgactacctggccgccggcaaggatgagcgggcccgcatccgggtggagcacatcatccgggaggactacctggtggaggccatggagatcctggagctgtactgtgacctgctgctggccaggtttggcctcatccagagcatgaaggagctggacagcggcctggccgagagcgtgtccaccctcatctgggccgccccccggctgcagagcgaggtggccgagctgaagatcgtggccgaccagctgtgtgccaagtacagcaaggagtatggcaagctgtgcaggaccaaccagattggaacagtgaatgaccggctgatgcacaagctgtctgtggaggccccacccaagatcctggtggagcgctacctgattgaaattgccaagaactacaacgtgccctatgagccagattctgtggtgatggccgaggcccctcctggggtggagacagacctgattgatgtgggcttcacagatgatgtgaagaagggcggccctggccggggcggcagcggcggcttcaccgcccctgtgggcggcccagatggcaccgtgcccatgcccatgcccatgcccatgcccatgcccagcgccaacacccccttctcctaccccctgcccaagggccccagcgacttcaacggcctgcccatgggcacctaccaggccttccccaacatccaccccccccagatcccagccaccccacccagctatgagagcatgaccctgatgctgatccgcatcagcctgctgcaccggctgctggtgctggaccccagccagaagcccctgcagagcttcctgcctgacctgcagatcaccatgaccaccctgagctaccagagctgccacctgtgccagacccactaccagctgcacctgctggtgcctgccccccagcacctgaagaccctgaccctgatgatcttccctgggggcctgaagagctag

SEQ ID NO: 182043 - DNA, 1083 bp, Artificial Sequence
  derived and/or modified sequence
atgctgggcagcggcttcaaggccgagcggctgcgggtgaacctgagactggtgattaataggcttaagttgcttgaaaaaaaaaagacggagttggcgcagaaggcaagaaaagagatagccgattacctcgccgccggaaaggatgaacgcgccaggatacgggtggagcacataatcagggaagattatcttgtcgaggccatggaaattctggagttgtactgcgatctgctcttggccagattcggcttaatccaaagcatgaaggaactcgactccggcttggcagaatctgtgagcacgctgatctgggcggcaccaagactgcagagtgaggtggccgaacttaaaatagtggcagatcagttgtgcgcaaagtatagcaaggagtacggcaagctctgccgaacaaatcagattggaacggtgaatgaccggctgatgcataaattgagtgttgaagcaccgccgaagatcctggtcgagcgttacctcattgaaattgctaagaattataacgtcccttacgaacccgattctgtagtgatggctgaagcgcctcccggagtcgaaaccgaccttattgatgtcggcttcacagacgacgtgaaaaaaggtggaccggggagaggcggcagtggaggctttactgcccccgtgggaggtccagacggaacagttcctatgcccatgcctatgcctatgccaatgcctagcgccaatacaccgttctcatatccgctcccaaaaggtccgtccgatttcaatggactccccatgggaacatatcaagctttcccgaatatccatccaccccagatacccgcaactccaccctcctatgagagcatgacgcttatgctaataagaatcagtctgctgcatagactgcttgtactcgatccgtcccaaaaacccttgcagagctttctccccgatctgcaaattacaatgactactttgagttaccagtcttgccacctctgtcagacccactatcagctgcacttgctggtcccagcccctcagcatttgaaaactcttaccctgatgatctttcccgggggactcaaaagctag

SEQ ID NO: 182044 - DNA, 1083 bp, Artificial Sequence
  derived and/or modified sequence
atgttaggttcaggattcaaggcagaacgcctgcgagtgaacctgagactggttattaataggctgaaactgcttgagaagaaaaagacggaactcgcccagaaagccagaaaggaaattgctgactacctggccgctgggaaagacgaacgagccagaatcagagtggaacacatcattagagaggattacctggtggaggctatggaaattcttgaattatactgcgacctcctgttggccagatttggcctgatacagtccatgaaagaattagattctggactcgctgagagtgtatccacgcttatctgggcagcacctaggctccaatctgaggtagccgaactcaaaatagttgcagaccagctgtgtgccaagtactccaaagagtacgggaaattgtgtaggacaaaccagatcggtacagttaatgaccgtctgatgcataagctgtccgtcgaggcccctcccaagattcttgtcgagaggtatctgattgagatcgcgaagaactacaacgtcccttacgagccagacagtgtcgtaatggcagaggcaccaccgggagtggagactgatttgatcgacgttggatttaccgacgacgttaagaaggggggaccgggtcggggaggttctggagggttcacggccccagtgggcggacccgacggtaccgtgcccatgcctatgccgatgcctatgcccatgccatcagccaacactccattctcgtatccacttccaaagggtccgagtgacttcaatggcctcccaatgggaacttatcaagcctttcccaacatacatccacctcagatccccgctacccccccaagttatgagtcaatgacacttatgcttattagaattagtctgttgcatcgcctcctggtcctagatccttcccagaaaccactacaatctttcctgcccgacctgcagataaccatgaccacactgagctaccagtcttgccacctctgccaaacccactaccagctccatcttctggtccctgcaccccagcatctaaaaacacttactctaatgatcttccccggaggattgaaatcatag

SEQ ID NO: 182045 - protein, 292 aa, Artificial Sequence [sequence omitted]

SEQ ID NO: 182046 - protein, 79 aa, Artificial Sequence
  derived and/or modified sequence
KVPVNELKVKMKPKPWSKRWERPNFNIKGIRFDLCLTEQQMKEAQKWNQPWLEFDMMREYDTSKIEAAIWKEIEASKRS

SEQ ID NO: 182047 - DNA, 879 bp, Artificial Sequence
  derived and/or modified sequence
atggcggcctgtatcgctgctgggcactgggcggccatggggctggggcgaagctttcaggctgcccgcaccttacttcctccacctgcttccatcgcgtgtcgtgtccacgcaggtccagtccgacagcagagtacaggaccttccgagccgggggccttccaaccaccccccaagccagtcattgtcgataaacatcggcccgttgaacctgagcggcgattcctgagtcctgagtttattccccgaaggggccgcactgatcctctgaagttccaaattgagaggaaggatatgctggagagaaggaaagtactgcacattcccgagttttatgtcggatcaatcctgagggtcacaacagctgacccttatgcttcaggcaagatatctcagtttttaggcatttgcatccagaggtcaggaaggggactgggtgccacttttatcctccgaaatgtgatcgaaggtcagggagtggagatctgctttgagctctacaacccccgggttcaggaaatccaggtcgtgaagctcgaaaagagactggacgactctcttctgtatctgcgggatgccttgcccgaatactctacgtttgatgtgaatatgaagccagttgtccaggagccgaatcagaaagttcccgtgaatgaactcaaagtgaaaatgaagcctaagccatggagtaagcgctgggaacgtcccaatttcaatatcaagggcatccggttcgatttgtgcctgactgaacagcagatgaaagaggcacagaagtggaaccagccctggctcgagtttgatatgatgcgggaatacgataccagtaaaattgaagccgcaatctggaaggaaattgaggcctcgaaaagatcatag

SEQ ID NO: 182048 - DNA, 879 bp, Artificial Sequence
  derived and/or modified sequence
atggcagcctgtatcgcggccggccactgggctgccatgggcttgggccgctcttttcaagcagctaggacactgctgccaccacccgcctccatcgcttgccgggttcatgccgggcctgtgcggcagcagtctactggccctagcgagccgggagccttccagccccccccaaagccggtcattgtggataaacatcggcctgtggaacccgaaagacggtttctgtccccggagttcattccccgacgcgggaggacggacccattaaaatttcagatcgagagaaaagatatgctggaacggaggaaggtgttacatatcccggaattctatgtggggagtatcctccgtgtgaccaccgctgacccttacgccagcgggaaaatctcccaattcctggggatttgtatccaacgctcaggaaggggcctgggggcaacgtttatcctcaggaatgttatcgagggacagggggtggaaatctgcttcgaactgtataacccaagagttcaggaaatacaggtggttaagctggaaaaacgcttggatgatagtttgctatacctgcgcgacgctctcccagaatactctaccttcgacgtcaacatgaaacccgtcgtacaagagccaaatcagaaagtgcctgtgaacgagctgaaggtgaagatgaaaccaaagccttggagcaaaaggtgggagaggcccaacttcaatataaaggggatccggttcgatctttgccttacggagcagcagatgaaggaagcacagaagtggaatcaaccctggctcgaatttgatatgatgcgtgaatatgatacaagtaagatcgaagccgcgatctggaaggagatagaggccagcaagagaagctag

SEQ ID NO: 182049 - DNA, 240 bp, Artificial Sequence
  derived and/or modified sequence
aaagtaccagtgaacgaactaaaagttaagatgaaacccaaaccctggtctaaaaggtgggaacgcccgaactttaacataaagggaattcggttcgatttgtgcctaactgagcaacagatgaaggaagcccagaaatggaaccagccctggctggagttcgacatgatgcgtgagtacgacacttctaaaatcgaagccgcaatatggaaggaaattgaagcctccaaaagatcatag

SEQ ID NO: 182050 - DNA, 879 bp, Artificial Sequence
  derived and/or modified sequence
atggccgcctgcatcgctgctggccactgggccgccatgggcctgggccgctccttccaggccgcccggaccctgctgcccccaccagccagcatcgcctgccgggtgcacgccggccctgtgcggcagcagagcacaggccccagcgagcccggggccttccagcccccacccaagcctgtgattgtggacaagcacaggcctgtggagcctgagcggcgcttcctgagccctgagttcatcccccggcggggccgcacagaccccctgaagttccagatcgagaggaaggacatgctggagaggaggaaggtgctgcacatccctgagttctacgtgggcagcatcctgcgggtgaccacagctgacccctatgccagcggcaagatcagccagttcctgggcatctgcatccagaggagcggccggggcctgggcgccaccttcatcctgagaaatgtgattgagggccagggcgtggagatctgctttgagctgtacaacccccgggtgcaggagatccaggtggtgaagctggagaagaggctggatgacagcctgctgtacctgagagatgccctgcctgagtacagcacctttgatgtgaacatgaagcctgtggtgcaggagcccaaccagaaggtgcctgtgaatgagctgaaggtgaagatgaagcccaagccctggagcaagcgctgggagcggcccaacttcaacatcaagggcatccgctttgacctgtgcctgacagagcagcagatgaaggaggcccagaagtggaaccagccctggctggagtttgacatgatgagagaatatgacaccagcaagattgaggccgccatctggaaggagattgaggccagcaagaggagctag

SEQ ID NO: 182051 - DNA, 240 bp, Artificial Sequence
  derived and/or modified sequence
aaggtgcctgtgaatgagctgaaggtgaagatgaagcccaagccctggagcaagcgctgggagcggcccaacttcaacatcaagggcatccgctttgacctgtgcctgacagagcagcagatgaaggaggcccagaagtggaaccagccctggctggagtttgacatgatgagagaatatgacaccagcaagattgaagctgccatctggaaggagattgaggccagcaagaggagctag

SEQ ID NO: 182052 - DNA, 3479 bp, Artificial Sequence
  derived and/or modified sequence
gtagtcttgacgtgagctagctggcatggcggcctgcattgcagcggggcactgggctgcaatgggcctaggccggagtttccaagccgccaggactctgctccccccgccggcctctatcgcctgcagggtccacgcggggcctgtccggcagcagagcactgggccttccgagcccggtgcgttccaaccgccgccgaaaccggtcatcgtggacaagcaccgccccgtggaaccggaacgcaggttcttgagtcctgaattcattcctcgaaggggaagaacagatcctctgaaatttcaaatagaaagaaaagatatgttagaaaggagaaaagtactccacattccagagttctatgttggaagtattcttcgtgttactacagctgacccatatgccagtggaaaaatcagccagtttctggggatttgcattcagagatcaggaagaggacttggagctactttcatccttaggaatgttatcgaaggacaaggtgtcgagatttgctttgaactttataatcctcgggtccaggagattcaggtggtcaaattagagaaacggctggatgatagcttgctatacttacgagatgcccttcctgaatatagcacttttgatgtgaatatgaagccagtagtacaagagcctaaccaaaaagttcctgttaatgagctgaaagtaaaaatgaagcctaagccctggtctaaacgctgggaacgtccaaattttaatattaaaggaatcagatttgatctttgtttaactgaacagcaaatgaaagaagctcagaagtggaatcagccatggcttgaatttgatatgatgagggaatatgatacttcaaaaattgaagctgcaatatggaaggaaattgaagcgtcgaaaaggtcttgattctgagaatgaatttggttagttgcagaagatacattggctctaagaggatatattttgagaccaatttaatttcatttataagaacatagtaattaagtgaactaagcattcattgttttattaatactttttttctaaaataaaacttgtacaccagtttattactctaaaaagagaattacacatgccaaatggaccaatgtccatttgcttattggaggcaaagctacaatagaagtcagagcatcaccagaatggtctttaatgagcatggaacctgagcaaagggaataggtgggatgaattttttttttaattgtgaaacaattcataagcacaatatgatttacagaataataaacattcatgtacccactatcaggttaagaaatagaacatttattaatatgtaggaatgttaagaaataaaacatttaataagatctcagaagactccagtaaatctgcaattgtatctctctcctttttaaatgtaaatatcatcttgacttgttaattattcccttgcatttcttttagtttactgccaacacatatattcttcaacaatatatttaattttgaaaaacctgaaaaaaaaaacctgttagcaagtataaaggggcagtattactattattgcatgaaggcttcaagggaaacgttacagtctttgggtcatagtctggcttcagcttcctctgagagtttacagaggccaattttgagcaaattcatggctaaggttatgagtgagttctgctaaacagaaggctcaccacaaggtatctggcaggattatactgggtagctggatgttgcagaaatgtggttagaggaagtaaactgttttttgatgctcacagcatgatgaatcaaactctgtatcttaggattaggttaaaacaatacctttggtatgatatgagtgttgttgctgatccatgcagcatggattggaaagctggggtataagcacacatgctaaagaaaaacatgtaatttggtccatactcacctggatatactgttcctcaggttaaaaaatacagtactatcctaaatcttgaaggcaactctcagcctatccattgagttaccttcagatctgccctctggttcctagctgtcttgggactaacttctttcctgcgctcagctgttttctggattccatgttttccattttattgagtactaacttgttttgctgcagcacatcctttggtagcttctagaggaagtttgtgtggaggtaaaatttttgagaccttgcatgtctcatgtttgattgatactttatacgtttaggtaggaggtaattttccttcaggactttaaaaatattgttgctccattttctttgtttctattgttgtattgagaaatccaatgccattttgatttccccatcataaatttcatgatgatgtgtcttggtgtgggtctatatttatccattgtattgggttttaggtgaacccttccagatagtaactcatttctgtcagttctgggaaacacttagcattggttgatgatttattctctgctgctttgttctcccaactattatttggatgttggatatccagcactgggtatctattttcttacctccctcccttgaccccagtctctgttttttagctctttagctcaatcttccaactctttgctattgtattttaaaatcttaagaccccttcttgatttgtagaagttccttttcttacaaccaaaaagcctttatctatggatttgttcacagataaggggtattcaatatagtgtatttttttttcatttaaaattgtttgcgcatctatttcctccaaatttctttctgtatttattttttgttgtctatatttcagacttttccaggatatctgataatctttggctgtcttcttatggttgaaagagggactaaaaagcttggaaagcctttgggttgtgggaaggggctgtctttaggattatctgaatgggcttttttgggagtcccctcctccacatgaatattttggttttgtcagattccctagaatagaggcttccaatctccttcctggaggggtctgtccaggaaggagattgtctaggggtctgtcagacagcagctttcagctacttccttgatctttttcactaatgattatatagtcatctaactactgtcaacaagtaatagatatcctatccttcacttgtttagattatttgctgagataacctctcaaaagaacctctcaaaataaaaggttaacaagagcctatatcttatatttttcttctctttatcttgttagaagatagctattaaaacctgttctttttctgtcttgataaacacacttcaatcttggtagaatggtagatgggacagtatattttaggacctaaagctctgcaaatgtatgatcagcttgtaagtacaggtgctcaaaaacatgtaaacaatcatgctttttactctgtaggaatatctttaaaattcttgtgaatttttccccagaagtaaagcaaatcttcccccagaaataaaattaaatgtgcataatctaaa

SEQ ID NO: 182053 - DNA, 1076 bp, Artificial Sequence
  derived and/or modified sequence
ctggcatggcggcctgcattgcagcggggcactgggctgcaatgggcctaggccggagtttccaagccgccaggactctgctccccccgccggcctctatcgcctgcagggtccacgcggggcctgtccggcagcagagcactgggccttccgagcccggtgcgttccaaccgccgccgaaaccggtcatcgtggacaagcaccgccccgtggaaccggaacgcaggttcttgagtcctgaattcattcctcgaaggggaagaacagatcctctgaaatttcaaatagaaagaaaagatatgttagaaaggagaaaagtactccacattccagagttctatgttggaagtattcttcgtgttactacagctgacccatatgccagtggaaaaatcagccagtttctggggatttgcattcagagatcaggaagaggacttggagctactttcatccttaggaatgttatcgaaggacaaggtgtcgagatttgctttgaactttataatcctcgggtccaggagattcaggtggtcaaattagagaaacggctggatgatagcttgctatacttacgagatgcccttcctgaatatagcacttttgatgtgaatatgaagccagtagtacaagagcctaaccaaaaagttcctgttaatgagctgaaagtaaaaatgaagcctaagccctggtctaaacgctgggaacgtccaaattttaatattaaaggaatcagatttgatctttgtttaactgaacagcaaatgaaagaagctcagaagtggaatcagccatggcttgaatttgatatgatgagggaatatgatacttcaaaaattgaagctgcaatatggaaggaaattgaagcgtcgaaaaggtcttgattctgagaatgaatttgccgggggccatcaagtataagaccacaggaccacgtgattcataaagaactactgtcaaaactagggccgccattaccaacatgtgaccttgagaaggcaatcaacgctgagagcttcattcctctgatacataaagatttataatcacctttgagtttgaagataacttggatt

SEQ ID NO: 182054 - DNA, 475 bp, Artificial Sequence
  derived and/or modified sequence
aaagttcctgttaatgagctgaaagtaaaaatgaagcctaagccctggtctaaacgctgggaacgtccaaattttaatattaaaggaatcagatttgatctttgtttaactgaacagcaaatgaaagaagctcagaagtggaatcagccatggcttgaatttgatatgatgagggaatatgatacttcaaaaattgaagctgcaatatggaaggaaattgaagcgtcgaaaaggtcttgattctgagaatgaatttggtaccttcgagattcaatctcttctaaaatccactgagttttttcatctactgagaagtttccacttgtggatgtctcatctttgcctgttaataaataaaattgacttcatactacaaattctcaaaagaaaaaagtaaaatgctttgaaaataaaggtaatatcatggatgtataaacatatgcatatgtaaatacataaatatgcttaaattttg

SEQ ID NO: 182055 - DNA, 879 bp, Artificial Sequence
  derived and/or modified sequence
atggccgcctgcatcgccgccggccactgggccgccatgggcctgggtcggtcttttcaggctgcgcgcaccttgctgccaccacccgcctctattgcctgtagagtccatgcggggcccgtccgccagcagagcaccgggccgtccgaacccggggcatttcagccgcctccaaagccagtgatcgtggataaacaccgtcccgttgagcccgaacgtcgattcctttcaccggagtttattcccagacgagggaggactgacccactcaagttccaaatcgagcggaaggatatgttagaacgcagaaaagttctgcacattcctgagttttacgtgggctccattctgcgcgtgaccactgccgacccttacgccagtggaaaaatcagccaattcttaggaatctgcatacaaagaagcggcaggggcctgggcgctacctttatccttcgaaacgtgatcgagggacagggcgtggagatttgcttcgagctgtacaatcctcgcgtgcaagagatacaggtggtgaaactcgaaaagagactcgacgactcactgttgtatctgcgcgacgctctgcctgaatactccacttttgacgtgaatatgaaacctgttgtgcaggagccaaatcagaaggtacccgttaatgagcttaaggtgaagatgaagccaaagccatggagcaagcgatgggagcggccaaacttcaatattaagggtattaggtttgacctctgcctcacagagcagcagatgaaggaggcccagaaatggaaccagccttggctggagttcgacatgatgcgggaatatgacacgtctaagattgaggccgccatttggaaagaaatcgaggcttccaagaggtcttag

SEQ ID NO: 182056 - DNA, 879 bp, Artificial Sequence
  derived and/or modified sequence
atggccgcctgcatcgccgccggccactgggccgccatgggcctggggcgatcttttcaggccgcccgcaccctgcttcccccacctgctagtattgcatgtcgtgtccacgccgggccagtcagacaacagtcgacgggacctagtgaacccggcgcctttcagcccccccccaagccagtcatcgtcgacaagcaccgacccgtggaaccggaaagacggttcctaagtcccgagttcattcctcggagaggcagaacagaccccttaaagttccagatcgagcgcaaagacatgttagaacgcaggaaggtactccacatccctgaattctacgttggatccatcctgcgagttacgactgcagatccatacgcatccggaaagatcagccaattcctgggtatctgtatccagcggagtggacgaggcctgggagcaaccttcattcttagaaatgtgattgaaggacaaggtgtggaaatttgtttcgagttgtataaccctagagttcaggagatccaggtggtgaagctagagaagcgcctggacgactcgttattgtacctgagggacgccctacctgagtactccacattcgatgtcaatatgaagcctgtagtccaggagcccaaccagaaagtgccagttaatgagttgaaagtgaaaatgaagcccaaaccttggagtaagaggtgggaacgacctaattttaacatcaagggcatccggtttgacctgtgtttgacagaacagcaaatgaaggaagctcagaagtggaatcagccctggttagaattcgatatgatgagggagtatgacacgagcaagatcgaagcagcgatttggaaagaaatcgaggcctctaagcgctcctag

SEQ ID NO: 182057 - DNA, 240 bp, Artificial Sequence
  derived and/or modified sequence
aaggtgcccgtgaacgagctgaaggtgaagatgaagcccaagccctggtctaagagatgggagaggcctaacttcaacatcaaaggaatccggttcgatctgtgcctgacagaacagcagatgaaggaggcccaaaaatggaatcagccttggttggaattcgatatgatgcgcgagtatgacacttcaaaaattgaagccgccatatggaaagagattgaggcaagcaaaaggagttag

SEQ ID NO: 182058 - DNA, 879 bp, Artificial Sequence
  derived and/or modified sequence
atggctgcctgcatcgcggcaggacattgggccgctatgggactgggtagatctttccaggctgctcggacgctgctgccaccgccagcttctattgcctgcagagtacacgcaggtcctgttcggcagcaatcaaccgggccaagcgaacctggggctttccagccccctcctaagcctgtcattgtggacaagcatcggccagtcgagcctgaacggaggttcttgtccccagaatttatcccgagacggggtagaacggacccattgaaatttcagattgaaaggaaagacatgcttgagcgacgaaaggttctacatattcctgaattctacgtagggagcattcttcgtgtcactaccgctgacccttacgcaagcggcaaaatcagccagtttctcggtatttgcattcagagaagcggaagaggacttggcgctacctttatattgagaaacgtgatcgagggccagggtgttgaaatctgcttcgagctctataacccacgcgtgcaggagatccaggtagttaaactggagaaacgcctggacgactctttactgtatcttcgcgatgccctgcccgaatatagcacatttgatgtgaacatgaaacccgtagtgcaagaaccgaaccagaaggtcccagtgaatgagctgaaggtcaagatgaagcctaaaccctggagcaaaagatgggaaagacccaatttcaatattaaggggatccgatttgacctgtgcctgacagagcagcagatgaaagaagcacaaaagtggaaccagccatggttagagttcgatatgatgcgggaatatgacaccagtaagatcgaggccgcaatttggaaagaaattgaagcgtccaagagaagctag

SEQ ID NO: 182059 - DNA, 879 bp, Artificial Sequence
  derived and/or modified sequence
atggcagcatgcattgctgcaggccactgggccgctatggggcttgggagatcattccaggctgcccgtactctattacctcctcctgcatcaatcgcttgcagggttcacgccggtcctgtgagacagcagtctactggtccaagcgagcctggcgcttttcagcctcccccaaaacctgtgattgtggacaaacaccgacctgtcgaacctgagcgtcggttcctttctcctgagtttataccgagaagaggccgtaccgaccctctgaaattccagatcgagcggaaggatatgttagagcggcgaaaggtattacatatcccggagttttacgtcggttcaattttgagggtgacgactgcggatccctatgcttcagggaagatttcccaattcctcggcatctgtatacagagaagtgggcgtggattaggggcaacatttattctcagaaatgttatcgaagggcaaggtgtggaaatctgctttgagttgtataaccccagagtgcaggaaatccaggtcgttaaacttgagaaacggctagatgattctctgctttacttaagagacgctctgcccgaatactctacattcgatgtgaacatgaaaccggtagtgcaggagcctaaccagaaagttcctgtgaatgagctgaaagttaagatgaagccaaagccctggtctaaacgatgggagcggccaaactttaatataaagggtattagattcgatctgtgcctcaccgaacagcagatgaaggaagcccagaaatggaaccaaccgtggctggaatttgacatgatgcgggaatatgacaccagtaagattgaggccgctatttggaaggagatcgaggcttcaaagcgatcctag

SEQ ID NO: 182060 - DNA, 240 bp, Artificial Sequence
  derived and/or modified sequence
aaagtgccagtcaacgaacttaaagtgaaaatgaaacccaaaccatggtcgaaacgatgggagaggcctaacttcaatatcaagggcattcgattcgacttgtgcctcaccgaacagcagatgaaggaggctcaaaaatggaatcagccctggctggaatttgatatgatgcgggaatatgatacatctaagatcgaagccgcaatatggaaggaaatcgaagccagcaagcgaagttag

SEQ ID NO: 182061 - DNA, 879 bp, Artificial Sequence
  derived and/or modified sequence
atggccgcctgcatcgccgccggccactgggccgccatgggcctgggcagaagcttccaggccgccagaaccctgctgcccccccccgccagcatcgcctgcagagtgcacgccggccccgtgagacagcagagcaccggccccagcgagcccggcgccttccagcccccccccaagcccgtgatcgtggacaagcacagacccgtggagcccgagagaagattcctgagccccgagttcatccccagaagaggcagaaccgaccccctgaagttccagatcgagagaaaggacatgctggagagaagaaaggtgctgcacatccccgagttctacgtgggcagcatcctgagagtgaccaccgccgacccctacgccagcggcaagatcagccagttcctgggcatctgcatccagagaagcggcagaggcctgggcgccaccttcatcctgagaaacgtgatcgagggccagggcgtggagatctgcttcgagctgtacaaccccagagtgcaggagatccaggtggtgaagctggagaagagactggacgacagcctgctgtacctgagagacgccctgcccgagtacagcaccttcgacgtgaacatgaagcccgtggtgcaggagcccaaccagaaggtgcccgtgaacgagctgaaggtgaagatgaagcccaagccctggagcaagagatgggagagacccaacttcaacatcaagggcatcagattcgacctgtgcctgaccgagcagcagatgaaggaggcccagaagtggaaccagccctggctggagttcgacatgatgagagagtacgacaccagcaagatcgaggccgccatctggaaggagatcgaggccagcaagagaagctag

SEQ ID NO: 182062 - DNA, 240 bp, Artificial Sequence
  derived and/or modified sequence
aaggtgcccgtgaacgagctgaaggtgaagatgaagcccaagccctggagcaagagatgggagagacccaacttcaacatcaagggcatcagattcgacctgtgcctgaccgagcagcagatgaaggaggcccagaagtggaaccagccctggctggagttcgacatgatgagagagtacgacaccagcaagatcgaggccgccatctggaaggagatcgaggccagcaagagaagctag

SEQ ID NO: 182063 - protein, 168 aa, Artificial Sequence
  derived and/or modified sequence
MNSKGQYPTQPTYPVQPPGNPVYPQTLHLPQAPPYTDAPPAYSELYRPSFVHPGAATVPTMSAAFPGASLYLPMAQSVAVGPLGSTIPMAYYPVGPIYPPGSTVLVEGGYDAGARFGAGATAGNIPPPPPGCPPNAAQLAVMQGANVLVTQRKGNFFMGGSDGGYTIW

SEQ ID NO: 182064 - DNA, 507 bp, Artificial Sequence
  derived and/or modified sequence
atgaacagcaagggccagtaccccacccagcccacctaccccgtgcagccccccggcaaccccgtgtacccccagaccctgcacctgccccaggcccccccctacaccgacgccccccccgcctacagcgagctgtacagacccagcttcgtgcaccccggcgccgccaccgtgcccaccatgagcgccgccttccccggcgccagcctgtacctgcccatggcccagagcgtggccgtgggccccctgggcagcaccatccccatggcctactaccccgtgggccccatctacccccccggcagcaccgtgctggtggagggcggctacgacgccggcgccagattcggcgccggcgccaccgccggcaacatccccccccccccccccggctgcccccccaacgccgcccagctggccgtgatgcagggcgccaacgtgctggtgacccagagaaagggcaacttcttcatgggcggcagcgacggcggctacaccatctggtag

SEQ ID NO: 182065 - DNA, 507 bp, Artificial Sequence
  derived and/or modified sequence
atgaactcaaaaggtcaataccccacacagccgacttatccggttcagccgccagggaaccctgtctaccctcagaccctacacctgccacaagcgccaccatatacagatgctcctcctgcctactcagagctgtatcgccctagcttcgttcatccaggcgccgcaacagttccaactatgagcgccgctttcccaggggcctctctgtacctgcctatggcccaatccgtggccgtgggcccactgggatccacaatccctatggcatattatccagtgggcccgatttatccacctggctcaaccgttctcgttgaggggggatatgacgccggtgctaggtttggcgctggtgcgaccgccggaaacataccaccgccgccccccgggtgtccccctaatgccgctcagctagcagtaatgcagggagccaatgttctggttacccaacgcaaaggtaacttcttcatgggcgggtccgacggtggatatactatctggtag

SEQ ID NO: 182066 - DNA, 507 bp, Artificial Sequence
  derived and/or modified sequence
atgaacagcaagggccagtaccccacccagcccacctaccctgtgcagcccccaggcaaccctgtgtacccccagaccctgcacctgccccaggccccaccctacacagatgcccccccagcctacagcgagctgtaccggcccagctttgtgcaccctggagctgccaccgtgcccaccatgtctgctgccttccctggggccagcctgtacctgcccatggcccagagcgtggccgtgggccccctgggcagcaccatccccatggcctactaccctgtgggccccatctacccacctggcagcacagtgctggtggagggcggctatgatgctggggccaggtttggagctggggccacagctggcaacatccccccacctcctcctggctgccccccaaatgctgcccagctggccgtgatgcagggcgccaacgtgctggtgacccagaggaaaggaaacttcttcatgggcggcagtgatggcggctacaccatctggtag

SEQ ID NO: 182067 - DNA, 507 bp, Artificial Sequence
  derived and/or modified sequence
atgaacagcaagggccagtaccccacccagcccacctaccccgtgcaaccccctggaaacccagtttacccgcagactctccacttaccgcaggccccaccctacaccgacgccccacctgcatattcagaactctaccggcctagctttgtacaccctggggctgccactgtcccaactatgtcggccgcatttccaggtgctagcttgtacttacccatggcccaaagcgtcgccgtggggccgctcggctccactatccccatggcctactatcccgtcggaccaatctatccacccggcagtacagtgctcgttgagggaggttacgatgcaggcgcccggtttggagctggggcaaccgcggggaatattcctccgccaccccccggctgccctccaaatgcggctcagctggccgtcatgcaaggcgctaacgtgttggtgacccagcgcaagggcaattttttcatggggggctcagatggtggctatacgatttggtag

SEQ ID NO: 182068 - DNA, 507 bp, Artificial Sequence
  derived and/or modified sequence
atgaacagtaagggccagtatccaacccagcccacttatccggtccagccgccaggtaaccccgtgtaccctcagacactgcatctgccgcaggcccctccttataccgatgctccacccgcatactccgaactgtataggccaagctttgtgcatccaggcgctgccaccgtaccgaccatgtccgccgcttttccaggagccagtctctacctcccaatggcccagagtgtggcagtcggcccactcggctcgactattcctatggcctattatcctgtcggtccaatttatccgcctggcagcactgtgctggtggagggaggctatgatgccggtgccagatttggagccggagctaccgcaggcaatattcccccaccgccaccagggtgtccccctaacgccgctcagcttgcagtgatgcaaggcgcaaatgtgctcgtgacccagaggaagggaaacttttttatgggcggatccgacggaggttataccatttggtag

SEQ ID NO: 182069 - protein, 145 aa, Artificial Sequence
  derived and/or modified sequence
MVGRNSAIAAGVCGALFIGYCIYFDRKRRSDPNFKNRLRERRKKQKLAKERAGLSKLPDLKDAEAVQKFFLEEIQLGEELLAQGEYEKGVDHLTNAIAVCGQPQQLLQVLQQTLPPPVFQMLLTKLPTISQRIVSAQSLAEDDVE

SEQ ID NO: 182070 - DNA, 438 bp, Artificial Sequence
  derived and/or modified sequence
atggtgggcagaaacagcgccatcgccgccggcgtgtgcggcgccctgttcatcggctactgcatctacttcgacagaaagagaagaagcgaccccaacttcaagaacagactgagagagagaagaaagaagcagaagctggccaaggagagagccggcctgagcaagctgcccgacctgaaggacgccgaggccgtgcagaagttcttcctggaggagatccagctgggcgaggagctgctggcccagggcgagtacgagaagggcgtggaccacctgaccaacgccatcgccgtgtgcggccagccccagcagctgctgcaggtgctgcagcagaccctgcccccccccgtgttccagatgctgctgaccaagctgcccaccatcagccagagaatcgtgagcgcccagagcctggccgaggacgacgtggagtag

SEQ ID NO: 182071 - DNA, 438 bp, Artificial Sequence
  derived and/or modified sequence
atggtgggccgcaacagtgccatcgcagcaggggtttgcggcgccttgtttatcggttactgtatctactttgatcggaagcgcagatctgaccctaacttcaagaatcgcctacgggagcggagaaagaaacagaagcttgccaaggagcgagccgggctcagcaagctgcccgatctgaaggacgccgaggccgtgcaaaaattctttcttgaggagattcagttgggagaagaattgcttgcacaaggcgaatacgaaaaaggcgtcgaccatctcacgaacgcaattgccgtgtgcggtcaaccacagcagctgttacaagttctgcaacaaaccctgcccccaccagtcttccagatgttgctgactaaacttccaactatatcccagaggatcgtaagcgcccaaagccttgcagaggatgacgttgaatag

SEQ ID NO: 182072 - DNA, 438 bp, Artificial Sequence
  derived and/or modified sequence
atggtgggcaggaacagcgccatcgccgccggcgtgtgtggggccctcttcatcggctactgcatctactttgacaggaagagaagaagtgaccccaacttcaagaaccggctgcgggagaggaggaagaagcagaagctggccaaggagcgggccggcctgagcaagctgcctgacctgaaggatgctgaggccgtgcagaagttcttcctggaggagatccagctgggggaggagctgctggcccagggcgagtatgagaagggcgtggaccacctgaccaatgccatcgctgtgtgtggccagccccagcagctgctgcaggtgctgcagcagaccctgcccccacctgtgttccagatgctgctgaccaagctgcccaccatcagccagagaattgtgtctgcccagagcctggctgaagatgatgtggagtag

SEQ ID NO: 182073 - DNA, 438 bp, Artificial Sequence
  derived and/or modified sequence
atggtgggccggaacagcgccatcgccgccggcgtgtgcggcgccctgttcatcggctattgcatctactttgatagaaagaggaggtctgacccgaattttaagaataggcttcgagagcgcagaaagaagcaaaaattagccaaggaaagagcaggcctgtccaagctacctgatttgaaagatgcagaagccgtgcagaagttttttttggaagaaatccagcttggagaagagctcctggctcagggcgagtacgagaagggcgttgaccatttgacaaacgccattgccgtatgcggacagccccagcagttgcttcaggttctgcagcagacgctcccacctccagtctttcaaatgctcctgactaagctgccaacaataagccagaggatcgttagtgcccagtccctcgctgaagacgacgtggagtag

SEQ ID NO: 182074 - DNA, 438 bp, Artificial Sequence
  derived and/or modified sequence
atggtaggaaggaattccgcgatagccgctggagtttgtggggctctcttcataggctactgcatatactttgacagaaaacgccgtagcgatccgaatttcaaaaaccgcctgagggagcggaggaaaaaacagaagcttgccaaagaaagagctggactgtctaaactgcccgacctgaaggacgcagaggccgtgcagaaattttttctcgaagagatccaacttggagaggaactgctggcccaaggcgaatacgaaaagggagtggaccatctcactaacgctatcgccgtctgcggccagcctcagcagcttttgcaggtgcttcagcaaactctccctccaccggtgttccagatgttgttaacaaagttgccgacaatcagccagcgcatcgtgtcggcccaatcccttgccgaggatgacgtagagtag

SEQ ID NO: 182075 - DNA, 3387 bp, Artificial Sequence
  derived and/or modified sequence
gcaggcgcaggagccgcgctctgggcctctgctcaggctctgccgcggacgacctcgaggcccttagttgactgggaccggaagtggcgtgtgctcggcctttctgtgttcctggcccgcggccgtcgggtgtgagctgcgccgaccgctctgagggttcgtggcccaccgctccttcgcggtccctgccgccaccgtccacgctcagcgttgtagagaagatggtgggtcggaacagcgccatcgccgccggtgtatgcggggcccttttcattgggtactgcatctacttcgaccgcaaaagacgaagtgaccccaacttcaagaacaggcttcgagaacgaagaaagaaacagaagcttgccaaggagagagctgggctttccaagttacctgaccttaaagatgctgaagctgttcagaagttcttccttgaagaaatacagcttggtgaagagttactagctcaaggtgaatatgagaagggcgtagaccatctgacaaatgcaattgctgtgtgtggacagccacagcagttactgcaggtcttacagcaaactcttccaccaccagtgttccagatgcttctgactaagctcccaacaattagtcagagaattgtaagtgctcagagcttggctgaagatgatgtggaatgagaaacaaatgtcaacataataaaatctcagttaaaaatattttaaaaattcttggtagttgagcagctctgggggaataagggcaaatatgcttgttatgaactacactgaaatctaccaaagttaatgtttactttgtgtagatccatttgtctattttatttatttttcccagtgaaaagtgtattttgatagagaacttttcattctataaatacactatgagttactaaaatatcatggattttgtttattcctgaaacatagttacatagttaaactgtacatatgacatggcttatgttaaaaatacccagtgctcagttttgaaagataggcaaaaaaaaaaaagtataggagaaactgaagaatgtacacttttttagagggcacattttgctgtaaatctggaaatttgatagacttgactgtgtttgtgaaaactgagcattaaaggttttgattgatcctttctttccatttaatctctgagacgtaaatatgtgaggtgtgctgctgtgctgggttaacagcttccttccctttctgtgtagcagtcttgaaatgttctgtttaaatcagtaggcttaatgtgttctgggtatttatctccttgtattttaaatatatgtagttgcaaatagcaccaggaattagatttctgtacacccctaatctagccttgtgagcttcgctagttaatgtgtgctcactttccctccatttgttacgtgagagaatgcgtctgctgatcactgaagtgtcccttttagcttctgattcattgggttctgttgggcatctttaaatccaccttaacctgaggaatgtatgtgggcaaccaggccctgcatttttttatattctgaattttgcatgcttgcctgacttagtatttctgaattgatgttttttttaatggtataactatcttgattttcactgaaattatatggttctgtcactactctgtaaattaatccgaaacttttaaggtaactgggatgatctgcttgtaaaaatgcttgttgccttttgctttatcttcagtgtacctccttaatcctgcttcaacttgattatcttgtgaaacgatgagagtaagttgcaaccttgtgactgaaaacttgaaaagagtggagcaggtgggacctcttattctcaaatagtgacatattctccgtagtcacagtttcagaactgagtaaggatccttggtacttggtggcatctgttgaactgaggagcatttctcattgtaaagattgcctttgttctgtctaaaagtctggagaaatcccaaagacttttcctatgtactaggcattttattttgattgacttacaaactcttcttaatcattatcaatctcggtttttttgtggtgcagtggaaggagaaataggtctagtttctgcctctgattagccgcacagccttgaacaaatcacatttcatctttgaacttacctctactgttagactaggcgactcacatttgaggacttttctcgggtatcttgagggtttgtgatcctgaacccttaaacagtgcttttttgttacacaggagggcttttttggggggatgaccagtacagacatgccagttagttttactagtgggatcccaaatccaaagcagtgtagtggtgattggtcagtgactaaccaggcagctaagaagtcttaggcagcagcccagacatgtatagaggggcagttagagggagaacaggggtgggaaagggagcaaggggcagatagctcagcaaggaaagaatgggctcagaaaaaggagggctggctggaggagtgaggggcagcttaagtttggggagggtagaaacgccgtttccttgggaactggagtgcagtatgagctgggtgtcacttggctctgaacatactggctttgctgtaatgcttgaaaaggcgttggtatcttcattttacagttcattaacccaagtacgttttcttatttaaatgacaactttggtgctttaaaatgaggtaccactttttaaagctagctgtgtcgagttaaagaaaaaatcagcagttttttctcccagaaatgtaattgccaaacactattcatccccatcttaagttttacaaggtgatgtaatcagcttgttgtagtgatgctggccaaatggtgctcagcaggtgagaacaaaaaaaccccagatctcagtgaactaatacacagcttgagcgtttccatgtgctaatgttgcacacttactaaaaaactttggaaatggaaaataatgtattagtgcaacagttgatgtgcttctttgggcaaagatatagttttgttccacaatttgtacttaaaagcgaaagaacattgaaaacatagacttactggctgtagcaatgctggcctgttaactgataactagaacttaggttcacgtttatgtaaagtgtgtaaaacctagtagagcttgcatagtcggcactcagtaaatgtttggttccttttgccccttggtaagtttattttaccatcctcccacctgccattctgactttattaaatcaacatgtggaccagagtgttaatgagatgttattgcagaagagattgagaaaattggtatatcatgcagataacatacaaaatctttttgtaacgtaaaaaatgcagttttattattgcttgtgcctcaactgtttaagtgaatattaaagggcttggagaaaactttg

SEQ ID NO: 182076 - protein, 414 aa, Artificial Sequence
  derived and/or modified sequence
MAAAPPSYCFVAFPPRAKDGLVVFGKNSARPRDEVQEVVYFSAADHEPESKVECTYISIDQVPRTYAIMISRPAWLWGAEMGANEHGVCIANEAINTREPAAEIEALLGMDLVRLGLERGETAKEALDVIVSLLEEHGQGGNYFEDANSCHSFQSAYLIVDRDEAWVLETIGKYWAAEKVTEGVRCICSQLSLTTKMDAEHPELRSYAQSQGWWTGEGEFNFSEVFSPVEDHLDCGAGKDSLEKQEESITVQTMMNTLRDKASGVCIDSEFFLTTASGVSVLPQNRSSPCIHYFTGTPDPSRSIFKPFIFVDDVKLVPKTQSPCFGDDDPAKKEPRFQEKPDRRHELYKAHEWARAIIESDQEQGRKLRSTMLELEKQGLEAMEEILTSSEPLDPAEVGDLFYDCVDTEIKFFK

SEQ ID NO: 182077 - protein, 346 aa, Artificial Sequence
  derived and/or modified sequence
MISRPAWLWGAEMGANEHGVCIANEAINTREPAAEIEALLGMDLVRLGLERGETAKEALDVIVSLLEEHGQGGNYFEDANSCHSFQSAYLIVDRDEAWVLETIGKYWAAEKVTEGVRCICSQLSLTTKMDAEHPELRSYAQSQGWWTGEGEFNFSEVFSPVEDHLDCGAGKDSLEKQEESITVQTMMNTLRDKASGVCIDSEFFLTTASGVSVLPQNRSSPCIHYFTGTPDPSRSIFKPFIFVDDVKLVPKTQSPCFGDDDPAKKEPRFQEKPDRRHELYKAHEWARAIIESDQEQGRKLRSTMLELEKQGLEAMEEILTSSEPLDPAEVGDLFYDCVDTEIKFFK

SEQ ID NO: 182078 - DNA, 738 bp, Artificial Sequence
  derived and/or modified sequence
atggccgccgccccccccagctactgcttcgtggccttcccccccagagccaaggacggcctggtggtgttcggcaagaacagcgccagacccagagacgaggtgcaggaggtggtgtacttcagcgccgccgaccacgagcccgagagcaaggtggagtgcacctacatcagcatcgaccaggtgcccagaacctacgccatcatgatcagcagacccgcctggctgtggggcgccgagatgggcgccaacgagcacggcgtgtgcatcgccaacgaggccatcaacaccagagagcccgccgccgagatcgaggccctgctgggcatggacctggtgagactgggcctggagagaggcgagaccgccaaggaggccctggacgtgatcgtgagcctgctggaggagcacggccagggcggcaactacttcgaggacgccaacagctgccacagcttccagagcgcctacctgatcgtggacagagacgaggcctgggtgctggagaccatcggcaagtactgggccgccgagaaggtgaccgagggcgtgagatgcatctgcagccagctgagcctgaccaccaagatggacgccgagcaccccgagctgagaagctacgcccagagccagggctggtggaccggcgagggcgagttcaacttcagcgaggtgttcagccccgtggaggaccacctggactgcggcgccggcaaggacagcctggagaagcagtag

SEQ ID NO: 182079 - DNA, 426 bp, Artificial Sequence
  derived and/or modified sequence
atggccgccgccccccccagctactgcttcgtggccttcccccccagagccaaggacggcctggtggtgttcggcaagaacagcgccagacccagagacgaggtgcaggaggtggtgtacttcagcgccgccgaccacgagcccgagagcaaggtggagtgcacctacatcagcatcgaccaggtgcccagaacctacgccatcatgatcagcagacccgcctggctgtggggcgccgagatgggcgccaacgagcacggcgtgtgcatcgccaacgaggccatcaacaccagagagcccgccgccgagatcgaggccctgctgggcatggacctggtgagactgggcctggagagaggcgagaccgccaaggaggccctggacgtgatcgtgagcctgctggaggagcacggccagggcggctag

SEQ ID NO: 182080 - DNA, 1245 bp, Artificial Sequence
  derived and/or modified sequence
atggcagcggcccccccttcctattgctttgtcgcttttccacccagagctaaggacggtctggtggtatttggcaaaaatagtgctagaccaagagatgaagtgcaggaggtggtgtattttagtgccgctgatcatgaacctgagtccaaggtggaatgtacttacattagtattgatcaagtccctaggacatacgccatcatgatatctcggcccgcctggctgtggggtgctgagatgggggctaatgagcacggggtgtgtattgcaaatgaagctatcaatacccgcgaaccggctgcagaaatcgaggctttgttgggtatggatctggtacggctgggcctcgagcgtggcgaaacagcaaaggaagccttggacgtcattgtcagcctgctggaagaacatgggcagggcgggaattacttcgaggatgctaattcatgtcacagtttccagtcagcttacctgatagtggaccgggacgaggcctgggtgttagagacgatcggcaaatactgggctgccgagaaggttaccgagggggtccgttgcatctgtagccaactaagtttaacaacgaaaatggacgcagaacaccccgaactccgctcttacgcccaatcccagggctggtggactggagaaggcgaattcaatttttccgaggtgttttcccctgtcgaagatcacttagattgtggggccgggaaggactcattggagaagcaggaagagagcattactgtgcagactatgatgaacactctgagagacaaagcttcgggtgtgtgtatagactccgaatttttcctgacaacagcctcaggcgtttctgtgttacctcagaaccgaagttctccttgcatccactacttcaccggaacccccgatccctctcgctccatctttaaacctttcatttttgtggatgacgtaaaactcgtacctaagactcaatctccgtgtttcggggatgatgaccccgcaaagaaagaaccacggtttcaggagaaaccagaccgtcggcatgagctgtataaagctcacgaatgggcccgagcaattatcgagtcagatcaagagcagggacgcaaattacggagcacgatgctggagctggagaagcagggcttggaggcgatggaggagattctgacttcaagcgagccgttggatcccgccgaagtgggtgacctgttttacgactgtgtggatactgagattaaattctttaagtag

SEQ ID NO: 182081 - DNA, 1245 bp, Artificial Sequence
  derived and/or modified sequence
atggcagccgcccctccctcctattgtttcgtcgccttccccccaagagcgaaggatggcctggtggtcttcggtaagaatagcgcacgacctagggacgaggtgcaggaagtggtttacttctccgccgccgatcacgagcctgaatccaaggtggagtgcacttacatttctattgatcaagttccacggacctacgctatcatgatcagccggcctgcctggctgtggggtgcagaaatgggggccaacgagcacggcgtatgtattgccaatgaagctatcaataccagggagcccgcggccgagatagaggcactgttgggtatggacctggtacggcttggcctcgagaggggcgaaaccgccaaggaagctctcgacgttattgtatccctcttagaggagcacggccaggggggcaattactttgaagacgccaatagctgccactctttccagtctgcctacttgatcgtcgaccgcgacgaggcatgggtactagagactatcgggaaatactgggccgccgagaaggtcactgaaggagttcgctgcatatgctcccagttatctcttacgaccaaaatggacgcagagcatccagaacttcgctcctacgctcaaagtcaaggatggtggacaggagaaggcgagttcaacttctctgaagtttttagccctgtggaggaccatctggattgcggagccggcaaagacagtttggagaagcaggaggaatcaataaccgtacagaccatgatgaacactttgcgagacaaagcctcaggtgtgtgcattgacagcgaattttttctcaccactgcaagcggagttagtgtgctgccacagaatagaagctctccatgcattcactatttcaccggtaccccagatccttcaagatccattttcaagccttttatctttgtggacgatgtgaaactagtccctaagacccagagcccgtgtttcggagatgatgaccccgccaaaaaggagcctcggttccaagaaaaacctgaccgcaggcatgaactgtataaagctcacgagtgggccagagccatcatcgagagcgaccaggagcaggggaggaagctgagaagcaccatgttggaactcgaaaagcagggcctcgaagcaatggaggagatcttaacgagctccgaaccactggatcccgctgaggtcggggacctgttctatgactgtgtcgacaccgaaattaagttctttaagtag

SEQ ID NO: 182082 - DNA, 738 bp, Artificial Sequence
  derived and/or modified sequence
atggcggctgcgcctcctagttactgttttgtcgcattcccaccgcgggcaaaagatggcctggttgttttcggaaagaattcagcccgcccccgggacgaggtgcaggaagttgtgtatttttctgcagccgaccatgagcctgaatcaaaggtagagtgcacatacatcagcattgaccaggtcccacgaacctacgctataatgatctcgcggcccgcgtggttgtggggagccgagatgggagcgaatgagcatggtgtatgcatcgctaacgaggccatcaatacccgagagcccgcagcagaaatcgaggccctactgggaatggatcttgtaaggctgggtctggagaggggtgaaactgccaaggaggcactcgacgtgatcgtgtctctccttgaagaacatggccagggaggcaattatttcgaggatgcgaactcttgtcatagcttccagtcggcatatctcatcgttgacagggatgaggcctgggttctggaaactattgggaaatactgggcagcagagaaagtgacagagggagtgagatgcatctgttctcagctgagtctgacgaccaaaatggacgccgagcacccggaactccggtcgtacgcccagtcccagggctggtggacaggagaaggagaattcaatttttctgaagtttttagtcccgtggaggaccacctagattgcggagcagggaaagacagcctggaaaaacagtag

SEQ ID NO: 182083 - DNA, 1245 bp, Artificial Sequence
  derived and/or modified sequence
atggccgctgccccaccttcctactgcttcgtggcttttccccctagagcgaaagatggactggttgtcttcggaaaaaattctgctcgtcctcgggatgaggttcaagaagtggtctatttcagtgcagccgatcacgagccagaatccaaggtagagtgcacctatatctctattgatcaggttcctcgtacatatgccatcatgatttctcggcctgcttggttgtggggcgctgagatgggcgccaatgaacacggggtgtgcatagccaatgaggcaatcaatactcgcgaacccgcggccgagattgaggcgcttctggggatggaccttgtgcgcctcggactcgaacgcggggaaaccgctaaggaggctctggacgtaatagtttccttgttggaggagcacggtcagggtggtaattattttgaggacgccaactcctgccactcgttccagagtgcctaccttattgtcgatagggatgaagcctgggtgttagagactattggtaagtactgggctgctgaaaaagtgacagaaggtgtccgatgtatttgcagccagctctccctcaccaccaaaatggatgccgaacatccagagctcagatcgtatgcccagagccagggctggtggactggcgaaggagaattcaattttagcgaagttttctctccggtggaagatcacctcgactgtggggcgggaaaggactcactggaaaagcaagaggaaagtatcacagttcagaccatgatgaatacgctgcgggacaaagctagcggtgtctgcatcgactctgaatttttcctcacaactgcaagtggcgtcagcgttctacctcagaacaggagcagtccctgcattcactactttactggcacccccgatccttctagaagcatttttaaaccttttatcttcgtggacgacgtgaaactggtgcccaagacccaatcaccttgcttcggagatgatgacccagctaagaaagagccgagattccaggaaaaacccgacagacggcacgagctttataaagcccatgagtgggctagagctatcatcgagagtgatcaggagcaagggcggaagctccggtctaccatgctcgagctcgagaagcaggggctggaggccatggaagagatacttacaagcagcgaacctctagaccccgccgaggtgggcgacttattttacgattgtgtggatacggaaataaagttcttcaaatag

SEQ ID NO: 182084 - DNA, 426 bp, Artificial Sequence
  derived and/or modified sequence
atggcagccgcaccaccttcctactgcttcgtggcatttcctccccgcgcaaaagacgggctggtagtgttcggcaagaattccgctaggccccgtgatgaagtgcaggaggttgtctacttctccgccgcagaccatgaacccgaatctaaagtcgagtgtacctacatcagcatagatcaggtgccccgcacttatgcgatcatgattagccgacctgcttggctctggggggccgagatgggcgcgaacgagcacggtgtctgcatcgcgaacgaggctataaataccagagagcctgctgccgaaatagaggccctgctcggcatggatctggtccgtctcgggcttgaacgtggggagaccgcaaaagaagccctagatgtaattgttagtctgctggaagagcacggccaaggggggtag

SEQ ID NO: 182085 - DNA, 1245 bp, Artificial Sequence
  derived and/or modified sequence
atggctgctgcccctccttcctactgctttgtggccttccccccccgggccaaggatggcctggtggtgtttgggaagaacagcgcccggcccagagatgaggtgcaggaggtggtgtacttctctgctgctgaccacgagcctgagagcaaggtggagtgcacctacatcagcattgaccaggtgcccaggacctacgccatcatgatcagcaggcctgcctggctgtggggcgctgagatgggcgccaatgagcacggcgtgtgcatcgccaatgaggccatcaacacccgggagcctgctgctgagattgaggccctgctgggcatggacctggtgcggctgggcctggagcggggggagacagccaaggaggccctggatgtgattgtgtccctgctggaggagcacggccagggcggcaactactttgaagatgccaacagctgccacagcttccagagcgcctacctgattgtggacagagatgaggcctgggtgctggagaccatcggcaagtactgggccgctgagaaggtgacagaaggagtgcgctgcatctgcagccagctgagcctgaccaccaagatggatgctgagcaccctgagctgcggagctatgcccagagccagggctggtggacaggagagggggagttcaacttcagcgaggtgttcagccctgtggaggaccacctggactgtggggccggcaaggacagcctggagaagcaggaggagagcatcaccgtgcagaccatgatgaacaccctgcgggacaaggccagcggcgtgtgcattgattctgagttcttcctgaccacagccagcggcgtgtctgtgctgccccagaacagaagcagcccctgcatccactacttcaccggcaccccagaccccagccgcagcatcttcaagcccttcatctttgtggatgatgtgaagctggtgcccaagacccagagcccctgctttggagatgatgatcctgccaagaaggagccccgcttccaggagaagccagacagaagacatgagctgtacaaggcccacgagtgggcccgggccatcatcgagagtgaccaggagcagggcaggaagctgcggagcaccatgctggagctggagaagcagggcctggaggccatggaggagatcctgaccagcagcgagcccctggaccctgctgaggtgggggacctcttctatgactgtgtggacacagagatcaagttcttcaagtag

SEQ ID NO: 182086 - DNA, 738 bp, Artificial Sequence
  derived and/or modified sequence
atggctgctgcccctccttcctactgctttgtggccttccccccccgggccaaggatggcctggtggtgtttgggaagaacagcgcccggcccagagatgaggtgcaggaggtggtgtacttctctgctgctgaccacgagcctgagagcaaggtggagtgcacctacatcagcattgaccaggtgcccaggacctacgccatcatgatcagcaggcctgcctggctgtggggcgctgagatgggcgccaatgagcacggcgtgtgcatcgccaatgaggccatcaacacccgggagcctgctgctgagattgaggccctgctgggcatggacctggtgcggctgggcctggagcggggggagacagccaaggaggccctggatgtgattgtgtccctgctggaggagcacggccagggcggcaactactttgaagatgccaacagctgccacagcttccagagcgcctacctgattgtggacagagatgaggcctgggtgctggagaccatcggcaagtactgggccgctgagaaggtgacagaaggagtgcgctgcatctgcagccagctgagcctgaccaccaagatggatgctgagcaccctgagctgcggagctatgcccagagccagggctggtggacaggagagggggagttcaacttcagcgaggtgttcagccctgtggaggaccacctggactgtggggccggcaaggacagcctggagaagcagtag

SEQ ID NO: 182087 - DNA, 426 bp, Artificial Sequence
  derived and/or modified sequence
atggctgctgcccctccttcctactgctttgtggccttccccccccgggccaaggatggcctggtggtgtttgggaagaacagcgcccggcccagagatgaggtgcaggaggtggtgtacttctctgctgctgaccacgagcctgagagcaaggtggagtgcacctacatcagcattgaccaggtgcccaggacctacgccatcatgatcagcaggcctgcctggctgtggggcgctgagatgggcgccaatgagcacggcgtgtgcatcgccaatgaggccatcaacacccgggagcctgctgctgagattgaggccctgctgggcatggacctggtgcggctgggcctggagcggggggagacagccaaggaggccctggatgtgattgtgtccctgctggaggagcacggccagggcggctag

SEQ ID NO: 182088 - DNA, 1245 bp, Artificial Sequence
  derived and/or modified sequence
atggccgccgccccccccagctactgcttcgtggccttccccccccgggctaaggatgggctggtcgtgtttggaaaaaacagtgcacgcccccgcgatgaggtgcaggaggtggtctacttcagcgccgccgaccacgagccagaaagcaaggtagagtgcacctatatttcgatagatcaggtgcccaggacttatgccattatgatttctaggcccgcctggctatggggagcggaaatgggcgcaaatgaacacggtgtgtgcatcgcaaatgaggctattaatacccgcgagcctgccgccgagattgaagcactcctgggaatggacttagtcagattaggtctcgaacgcggagaaactgctaaggaggcactagacgtgatcgtgagcctgctagaggagcatggacagggaggcaactattttgaggatgccaactcctgccatagcttccaatctgcctatctcatcgtggaccgcgacgaggcttgggtactcgagactataggcaaatactgggctgcagaaaaagtgaccgaaggtgtacgatgtatttgtagtcagttgagtctcactaccaagatggatgcagaacatccagaactccggtcctacgcacagtctcagggatggtggacaggagagggcgagtttaacttctcagaggtgttttcccccgtggaagaccatctggattgtggcgcaggcaaggatagcctcgagaagcaggaagagagcatcacagtccagaccatgatgaatacattgcgggataaagctagcggcgtgtgcattgatagcgagttctttctcaccactgcttccggggttagtgtgctgccgcagaataggtcatctccctgtatacactactttaccggaacgcccgacccatcccgctctattttcaaacctttcatttttgttgatgacgtgaagctggtgccaaaaacccagtcgccttgctttggggacgacgatcccgccaaaaaagagcctcgcttccaagagaagcccgatagaagacacgaactgtacaaagctcatgagtgggctagagccatcattgaatctgatcaggagcagggcaggaagttgaggtccaccatgttggaactagagaagcaaggacttgaggcaatggaagagatattgactagtagtgaaccgctggaccccgccgaagtgggagaccttttttacgattgtgtcgacactgagatcaagttcttcaagtag

SEQ ID NO: 182089 - DNA, 1245 bp, Artificial Sequence
  derived and/or modified sequence
atggccgccgccccccccagctactgcttcgtggccttcccccccagggccaaagacggccttgtggtctttgggaagaattctgcaaggccaagggacgaggttcaggaagtagtgtacttctcggccgctgatcatgaacctgaatctaaggtggaatgcacgtatattagcatcgaccaggtgccccgaacctatgccatcatgatctcccggccggcatggctgtggggggccgagatgggggccaacgagcatggcgtttgcatcgcgaatgaggccattaatactcgggagccagcagcagagatagaggccttgctgggtatggacctagtgaggctcgggttagagcgtggagagacagctaaagaggcgctagacgtgattgtttcactgctagaagaacatggacaggggggaaattacttcgaagacgccaactcttgccattcttttcagtctgcgtacctcatagtggacagggacgaggcctgggttctcgaaactatcgggaagtattgggccgcagaaaaggtgaccgagggtgtaaggtgcatatgtagtcaactctccctgactacaaaaatggatgcggaacacccagagcttcggtcatacgcacagtctcaaggatggtggactggagagggggagttcaatttcagcgaggtgttttctcccgttgaggatcacctagattgcggtgctggcaaggacagtctggaaaagcaagaggaaagcataactgtgcagaccatgatgaatacgttgagagataaggcgagcggcgtctgcatcgactctgaattctttctgaccacagcttccggagtgtctgtcctgccgcagaatcgaagcagcccttgcatccactactttaccggcacccctgacccatcccggagcatatttaagcccttcatttttgttgatgatgttaagttggtgcctaagacacagtctccctgctttggtgacgacgacccggcaaaaaaagaacctcggttccaggaaaaaccggatcggcgtcacgagctatacaaagcgcacgaatgggccagggctatcattgagtccgatcaggaacaggggcgaaaactcagatccacaatgttggaactggagaagcaagggctcgaggccatggaggagatcctaacttcaagcgagccactggatcccgctgaagttggtgatttgttctacgattgtgtggacacggaaatcaagttcttcaagtag

SEQ ID NO: 182090 - DNA, 738 bp, Artificial Sequence
  derived and/or modified sequence
atggccgccgccccccccagctactgcttcgtggccttcccccccagagctaaagacggattggtggtgtttggaaagaactccgctaggccccgcgatgaggtgcaagaggtggtttatttctccgcagctgatcatgaacccgagtctaaggtggagtgtacctatatttccattgatcaggtgccgcggacttacgcaatcatgatcagcaggccagcttggctttggggtgctgagatgggggctaatgagcatggggtttgcattgcgaacgaagcaatcaacaccagggagccagccgctgaaattgaggccttgctggggatggatctagtgcgattaggactcgaaagaggcgagactgctaaggaagccctggatgtcattgtatctttgctcgaggagcatggtcagggagggaattactttgaagacgcaaattcctgccactcgtttcagagtgcatacctgattgttgaccgagacgaggcttgggtgctggagaccatcggaaagtactgggctgcagaaaaagtgaccgagggtgtaagatgcatctgctcacagctgtctcttaccactaagatggatgctgagcatccagagctgcgctcctacgcccagtcacagggatggtggacaggtgaaggcgagttcaactttagtgaggtgttttcaccagtcgaagatcatcttgattgcggggcgggcaaagattcactggagaaacagtag

SEQ ID NO: 182091 - DNA, 1245 bp, Artificial Sequence
  derived and/or modified sequence
atggccgccgccccccccagctactgcttcgtggccttcccccccagagccaaggacgggctggtggtcttcgggaagaattccgcccggccccgcgacgaggtccaggaagtagtttacttttcagccgctgatcatgagcccgagtcgaaagtcgaatgtacctatatcagtatcgatcaagtgccccggacctacgccatcatgatatcacggcccgcctggctgtggggtgctgaaatgggagcaaatgagcacggggtgtgcatcgcaaatgaggctattaacactagagagccggctgcagagattgaggctctgctcggcatggacctggtgaggctcgggcttgagcggggtgagactgccaaagaggctcttgacgttattgtgtcacttttagaagagcacggtcaggggggcaactattttgaggacgctaattcctgccatagtttccagtcagcatacctgatcgtggaccgggatgaagcttgggttctggagaccataggtaagtactgggcggcagagaaggttactgagggagtcaggtgcatatgcagtcagttgagcctgactaccaaaatggacgccgaacaccctgagcttagatcctacgcccaaagtcagggatggtggacgggtgagggagagttcaacttctcagaggtgttctcccctgtcgaggaccacctcgactgtggagctggtaaagatagcctcgaaaagcaagaagaatccatcactgtacaaacaatgatgaacacccttcgggataaagctagcggggtatgcatagactccgaattctttctaacaactgcttcaggcgtgagtgttctgccccagaataggagtagtccttgcatccactatttcacaggaactcccgatcctagtcgatctatcttcaagcctttcattttcgtggacgatgttaaactcgtccccaaaacgcaaagcccctgctttggagacgacgaccctgctaagaaggagcctaggttccaggagaagccagatagacgacatgaactttataaggctcatgaatgggcgcgggccatcattgaatccgaccaggagcaaggacgtaaactgagatctactatgcttgaactagagaaacaaggcctcgaggccatggaggaaattctgacttcaagtgaacctctcgatcccgcggaggttggggacctgttctacgactgtgtcgacacagaaattaaattcttcaaatag

SEQ ID NO: 182092 - DNA, 426 bp, Artificial Sequence
  derived and/or modified sequence
atggccgccgccccccccagctactgcttcgtggccttccccccccgggccaaggacggcctggtcgtttttggaaagaacagcgcccgaccacgcgatgaggtgcaggaggtcgtgtatttctccgcggcagatcacgagcccgagagcaaagttgagtgtacgtacatatctatcgatcaggtgcctaggacatacgccattatgatcagccgtcctgcatggctctggggcgcggagatgggtgccaatgaacacggagtgtgtatagcaaacgaggccatcaatactcgagaaccggcagccgagatcgaagcgctgctgggaatggatttagtaaggctgggtctggaacggggtgagacagctaaggaggcccttgatgtgattgtgtccctgttggaagagcatgggcaaggggggtag

SEQ ID NO: 182093 - DNA, 5257 bp, Artificial Sequence
  derived and/or modified sequence
tctgggtagggggaagcgcccggcggccgcctccgccactgcagctgcagcccccgaggtcgccgcagtaatccggacccggcagcacccgcaccctcggcggccgcagcctcagcaccgcagagcggagagcggagcccggagcccgccgccccaggatggctgcagctcctccaagttactgttttgttgccttccctccacgtgctaaggatggtctggtggtatttgggaaaaattcagcccggcccagagatgaagtgcaagaggttgtgtatttctcggctgctgatcacgaaccggagagcaaggttgagtgcacttacatttcaatcgaccaagttccaaggacctatgccataatgataagcagacccgcctggctctggggagcagaaatgggagccaatgaacatggagtgtgcatagccaatgaagccatcaacaccagagagccagctgccgagatagaagccttgctggggatggatctggtcaggcttggtttagaaagaggggaaacagctaaagaagccttagatgtcattgtctccttgttggaagaacatggacaaggtgggaattactttgaagatgcaaactcctgccacagcttccaaagtgcatatctgattgtggatcgtgatgaagcctgggtgctcgagaccatagggaagtactgggctgccgagaaagtcacagagggagtgaggtgcatttgcagtcagctttcgctcaccactaagatggatgcagagcatccggaactcaggagttacgctcagagccaaggttggtggacgggagagggcgagttcaatttttccgaagtcttttctccagttgaggatcatctagactgcggtgctggcaaagacagcttagaaaaacaagaagaaagcatcacagtgcagactatgatgaacaccttacgggacaaagccagcggagtgtgcatagactctgagtttttcctcaccacagccagtggagtgtctgtcctgccgcagaatagaagctctccgtgcattcactacttcactggaacccctgatccttccaggtccatattcaagcctttcatctttgttgatgacgtaaaacttgtccccaaaacacagtctccctgttttggggatgacgaccctgccaaaaaggagcctcggttccaggagaaaccagaccgccggcatgagctgtacaaagcccacgagtgggcacgtgccatcatcgaaagtgaccaggagcaaggtcgcaagctgaggagcaccatgctggagctggagaagcaaggcctggaagccatggaagaaatcctgaccagctccgagccactggaccctgcggaagtgggggaccttttctatgactgtgttgacacggagattaagttctttaagtgaagtaagcgttccctttccccttcttatttaagacttcccaccttactaaattaccagcaaaacaaaccactctcctgtttgagtaaaatgagaaagttaatatgtggcctccttttctgaagccagatcaaactgttaccttgtgttccaccttgaatctcacagcgtccccttctgcaatgtaggtctccttcctgtgcagtgtaacatgtatcccgttgcctgttgttcggttgtgtgactaattgtggattttaagctgctattattgtatttcagtggcaatggacacattagccttttacaagaggactagagttcatcaagccttgaaaggcaggcttcacagtgccgagttggcgggaaaagcaaattcttttgaagtcttagtctttccctcagtagcggtttctttcaggttaacaagaggcatttgtgcacacacacagggctcttgtgtgtgttgtcaaggggaccctccgtggcctcccgtgagtgcatgcctgtagtgcacagtgtctctacaggtgtcttctggggggcagaaccaattggaaggaagaaagggacccctctccagtcctggctccttcctacatcctgggctcctgaagaagctgtcttcccattttccatgcgctgtgcttatgtgtggtggactgcagagctgcttccacttacaggagagctgataatttgttagctggaacctattcacttccgagattcagacatagccatgctggtggccttctgaatcactgcatggatgtcccaggaggcagctctccccacacagcagcacagccatcacaggattccttgtgtagaaatgattcccagtctagttaccaacagctagtctaggagtaattgaatggccctatggcacagttccacccacagagtagtgaatctctcagccaaggagggaaagaaaaggaagaactcttgactatttagattctagttaaatatctggaatcctagcagtcactacattatctcagcagagagactttaattaaactgatttgtttccaatgtcgggttcacttaaaggatttgacttaccaccagagcatagaaaagcatgcaaggaagaccagatgggcttagcattgggaagacagagggcaaggaggtgatagatggatatagaagcatttctctgcaggataccagttcaggccccaccattcctgccaaggccattacatcccacaaacccaaatacaaagcagctgacttccctggatcttccccccactcctcacacctcacatgtcccaggagctgccttcattcaggcgggtagctgcactgggcatggggtggtggtgggagcttaccgccacctattcaagctctcagctactcctgaaacgggcagagatgatgaacagaagtgtatgtaaatacagcagctagtgggagagcaccagttgggcctaatcctgcctcatcattcttggcaggaatctgcaaatggaaacattgtgagtatcagcaatctgggaagtgacagggttaataactccttcccagaagctgtatcatgagattttgaggggaccgagccctgttacatggatgtgaacagtgaggatcagaggttttatcagaacacattctttttttctaccaactctccagagcgtgagtataggagtgccatgagctttttagtcagcagttttgtaaactctgtatataaaatcattaaccacacattgtgggtgatgggaagacgatttcagctgacagagttaatggcaaccaataatggtggcctgtagctgctaagagcttcacgcaggtttggcctgggctttcactgttggtgaatttagagtgtccttttaggtggggcggctattctaaaagtgtctttctatcactgttaagggggggggaaagtgaggttcgaggatgacgtaggtaactctcccctcccaagtccatgttccaagtggctatgtaaagcaagatgatacagaaagctgctctaaaatctcactgagtgatttcaccttcgcctactatgaaatgtctcatcagacctgacatgtctgagataaccaaggtgattcaggatttgatcaaaagaagtctagtaagaattaattacacagaagcctcctttcatttctatgggccaaacaaaggccatggataaccctacccgctttatgtcattacccattgggaaacacaatggctacttctgttagggtacattgaccttggtcaagcatcttaaagaaggcaaccctaattgagagctgtcttggctaatactctgcaccacaattgtgatgtcctagtcctaccactagagggcatggtacagcctggcaaaagttaaaaggggtgtggcagctcccatcaggtctggaggtggtctataagcacagttgacagttgtgcattgggatgggtggagaaagacgacaagagagcagagaatctgctgatgtggctgcgcttacttttagtgactttatgtacttatattaacagctggaaataggttgttgggttttgagcaggctgttatagtgaggaatgttcatttttaaatgttcctaacagattttgcttttgaaaaatgcttgttacatgaataatttgtggaccagggattgcttttctgaaggcagtatagggaacatgaatattcaagatgaaatacaaaaattatgtttaagggtcatagtgtataagtagcttcctaggaaaccctttgtgtatcttttcagactggggtgggggctgagcatgcttgtgcagaaagaagccatagccagaaaggacagaatctctcccccactcccttgccccataaccaaacataagctagctagtcttgtctaatagatgggatttactataggtgaagatagccctcatattcaaggacagaagctctggcaggagtaaattagcaaagcagaaatagtaccctttcattcttggaggtgctttgaaattttaggtagaatataatcgaaattatggaggttccttagtgctcaataatataagacctggtgttattagaacgagtctttcttataaactaacagagcaggtatatgcctgttagaccttagctgtggggttcctttactattgggtgaatcattaggtataaaaaataatcatcaaccaggcaaattactttgcttcctagctgatgtcatcccacattggtacaggtgttattcagtactgggtggttcagcagggaagccgggtgggaccagtgtgtctgtcatgaaaccactaactgcattcctgactgaagagccatctgtcatttattggggaaggtcttcagttgagctctcagccttaggaaggaagcacgtggaggagggacggaggaggttcccttgctgggcatgcttcgtagagggccaggagcagcaggtcatgtgcacatgccgttgcagcacaagcttatgcttcccgtagccgtggcttttcattctgcacagtcccaggtcccagctcccctcttatggtttctgtcataatgtgctttatctgattgactccaaacatcccgaaatgtcacctgcagatttctcgtgggaaccaatatgtacatgtttgcaattatgctgtgagaatttaaatgtgttagatggaaaatgctattggcagggaataataataaaaaaaaaagaaaatcattctgtttcctgcagtgggaactggccatgtagtcttaacagtcttttgtacaaatatctacaaagcagataatatccctatccagtgcttgcccttggaattgtctctaaatgcatcaagcatacaataaaaaaaactgaaattaacatcca

SEQ ID NO: 182094 - DNA, 1245 bp, Artificial Sequence
  derived and/or modified sequence
atggcagccgcacctcctagttactgcttcgtggcgttcccgccacgcgctaaggatggcctggtggtcttcggtaagaactcagcacgtccacgcgacgaagtccaggaagttgtgtatttttccgccgcagatcatgaacccgagtcgaaagttgaatgcacttatattagtattgaccaggtcccaagaacttacgcaataatgatttcacggccagcctggttgtggggggctgaaatgggcgctaatgagcatggcgtctgcatagccaatgaagcgataaacacccgggaacctgcagctgaaatcgaggctttgctgggaatggatctcgtccgcctcggcctggaaaggggagagactgccaaggaagcattggatgttatcgtgtccctcctggaggagcatgggcaggggggtaactattttgaggacgcaaatagctgtcattcttttcagtcagcatatctgattgttgacagggatgaggcctgggtgcttgaaactataggcaaatattgggcagctgagaaggtgacggagggcgtgaggtgtatttgttcccaacttagcctgaccacaaaaatggatgccgagcatcccgagctgcggtcctatgcacagtcacagggttggtggaccggggaaggagagttcaacttttcagaggtgttctccccagttgaggaccacctggattgtggtgctggcaaagactccttggagaagcaggaggaaagcatcacagtccagaccatgatgaatactctccgcgataaggcatccggtgtgtgcattgattcagagttcttccttactactgctagcggcgtgtccgtgttaccccagaatcggtcttcaccttgcatccactactttactggcactccagatccaagccggtctattttcaagccttttattttcgtggatgacgtgaaattggtgccgaaaacgcaatctccctgtttcggagatgatgatccggcaaagaaggaaccacgattccaagaaaagccagacagaaggcacgagctctacaaggcccacgagtgggcccgagccattattgaatctgaccaggaacaaggcaggaaattgagaagcactatgctggagcttgaaaagcaggggctggaggccatggaggagattctgacctcatctgagccactggacccagcggaagtgggggacctgttctatgattgtgtcgatactgaaattaagttctttaaatag

SEQ ID NO: 182095 - DNA, 1245 bp, Artificial Sequence
  derived and/or modified sequence
atggctgccgctcctccctcctattgttttgtcgcctttcctcctagggccaaggatgggctcgtggtcttcgggaaaaattccgccaggcctcgggatgaagtgcaggaggtagtttacttttccgcagcagatcacgaacccgaaagcaaagtggagtgtacatacatatctattgaccaggttcctaggacctatgcaataatgatttctcggccagcatggttatggggcgctgagatgggagccaatgagcatggcgtgtgtatagccaatgaggccataaacactcgagagcctgcggcagagatcgaggccctactgggaatggatttggtccgcctgggcctggaacgtggcgaaacagccaaagaggccttagatgtaattgtgtcactgttggaagagcatggacagggcggaaattatttcgaggatgccaattcctgtcacagctttcaaagtgcatatctaatcgtggatcgcgatgaggcttgggtgcttgagacgataggcaagtattgggcggctgaaaaagtaactgaaggagtgcggtgcatctgttctcaactgtcactaaccactaagatggacgccgagcaccccgagttgcgatcttatgcacaatcccaaggatggtggaccggcgagggcgagttcaacttctccgaggtgttcagccctgtggaggatcacctggattgtggtgctggaaaagactcccttgagaagcaggaagaatcgatcactgttcaaacaatgatgaataccttgcgcgacaaagctagcggggtgtgcatagacagcgaattctttcttactactgcctccggagtgtccgtgctacctcagaaccggtcctccccttgcattcactacttcacagggacacctgatccctccaggagcattttcaaacctttcatctttgtagatgatgttaagttggtgcctaaaactcagagcccgtgttttggtgacgacgatcccgctaaaaaagagcctcggtttcaggagaagcccgaccgcaggcacgaactttacaaagctcacgaatgggccagagccatcattgagagtgatcaagaacaagggcgaaagctgcgatcaaccatgttggagttggagaagcagggcctagaggctatggaggaaattcttactagcagcgaacctcttgatcctgcagaggtcggcgacctgttttatgattgtgtcgatacagaaatcaaattcttcaagtag

SEQ ID NO: 182096 - DNA, 738 bp, Artificial Sequence
  derived and/or modified sequence
atggccgctgcgccaccctcctactgtttcgtggctttccctccacgtgcgaaggatgggcttgtggtctttggtaagaatagtgccagacctagggatgaggtgcaggaagtggtgtacttttcggccgctgatcatgagcctgagtctaaagtcgagtgcacctacattagcattgatcaggtcccacgcacttacgccatcatgattagccggccagcatggctatggggagccgaaatgggtgctaatgaacacggggtgtgtattgccaatgaagcaataaacacccgcgaacccgcagcggagattgaagcgctgctggggatggatttggtgcgcttaggactcgagcggggagagaccgcaaaagaggcccttgacgtgattgtatcactgcttgaggagcatgggcaggggggtaattacttcgaggacgctaattcttgtcacagcttccagtctgcatatctcatcgtagaccgcgatgaagcgtgggtactggagactatcggtaaatactgggcagccgagaaggttacagagggtgtgagatgcatttgttcacaactgtcacttacaaccaagatggatgccgaacacccagaactccgcagctatgcccagtcccaaggctggtggacgggtgagggggaattcaactttagcgaggtattcagtcctgtcgaagaccacctggattgtggcgctggtaaggatagtctggaaaagcagtag

SEQ ID NO: 182097 - DNA, 1552 bp, Artificial Sequence
  derived and/or modified sequence
acccgcaccctcggcggccgcagcctcagcaccgcagagcggagagcggagcccggagcccgccgccccagtgcacttacatttcaatcgaccaagttccaaggacctatgccataatgataagcagacccgcctggctctggggagcagaaatgggagccaatgaacatggagtgtgcatagccaatgaagccatcaacaccagagagccagctgccgagatagaagccttgctggggatggatctggtcaggcttggtttagaaagaggggaaacagctaaagaagccttagatgtcattgtctccttgttggaagaacatggacaaggtgggaattactttgaagatgcaaactcctgccacagcttccaaagtgcatatctgattgtggatcgtgatgaagcctgggtgctcgagaccatagggaagtactgggctgccgagaaagtcacagagggagtgaggtgcatttgcagtcagctttcgctcaccactaagatggatgcagagcatccggaactcaggagttacgctcagagccaaggttggtggacgggagagggcgagttcaatttttccgaagtcttttctccagttgaggatcatctagactgcggtgctggcaaagacagcttagaaaaacaagaagaaagcatcacagtgcagactatgatgaacaccttacgggacaaagccagcggagtgtgcatagactctgagtttttcctcaccacagccagtggagtgtctgtcctgccgcagaatagaagctctccgtgcattcactacttcactggaacccctgatccttccaggtccatattcaagcctttcatctttgttgatgacgtaaaacttgtccccaaaacacagtctccctgttttggggatgacgaccctgccaaaaaggagcctcggttccaggagaaaccagaccgccggcatgagctgtacaaagcccacgagtgggcacgtgccatcatcgaaagtgaccaggagcaaggtcgcaagctgaggagcaccatgctggagctggagaagcaaggcctggaagccatggaagaaatcctgaccagctccgagccactggaccctgcggaagtgggggaccttttctatgactgtgttgacacggagattaagttctttaagtgaagtaagcgttccctttccccttcttatttaagacttcccaccttactaaattaccagcaaaacaaaccactctcctgtttgagtaaaatgagaaagttaatatgtggcctccttttctgaagccagatcaaactgttaccttgtgttccaccttgaatctcacagcgtccccttctgcaatgtaggtctccttcctgtgcagtgtaacatgtatcccgttgcctgttgttcggttgtgtgactaattgtggattttaagctgctattattgtatttcagtggcaatggacacattagccttttacaagaggactagagttcatcaagccttgaaaggcaggcttcacagtgccgagttggcgggaaaagcaaattcttttgaagtcttagtcttt

SEQ ID NO: 182098 - DNA, 1245 bp, Artificial Sequence
  derived and/or modified sequence
atggccgctgccccaccatcttattgctttgtagcatttcccccaagagccaaggacgggctggttgtattcgggaaaaacagtgcacggcctcgggatgaggtacaggaagttgtatacttttctgcggctgaccacgaacctgagagtaaagttgagtgtacttacattagcatagatcaggtgcctaggacttacgccatcatgatatccaggccagcgtggttatggggcgctgagatgggggctaacgaacatggggtttgtattgccaacgaggctattaatacacgggagcccgctgctgaaatcgaggcactacttgggatggaccttgtgcggctgggtctggaaaggggggagaccgctaaggaggctttagatgtcatcgtcagtctgctggaggagcacggtcagggtgggaattactttgaggatgccaatagctgtcactcatttcagtctgcttacctgatcgtcgaccgggatgaagcctgggtcctggagaccattggtaagtactgggctgctgagaaggtaaccgaaggagtccgttgtatctgttctcagctctccttgacaacaaagatggatgctgaacatccagaactcaggtcttatgcgcagtcccaggggtggtggacgggcgagggtgaatttaacttcagcgaagtcttttcccccgttgaggaccacctggattgcggtgcagggaaagacagcttagaaaagcaggaagaatccataactgtgcagacgatgatgaatacccttcgggacaaggccagtggcgtgtgcattgattcagagtttttcctgaccacagcctccggcgttagcgtgctgcctcagaaccgcagctccccatgtatacactacttcacaggcacacccgatccttcccggtcgatattcaaaccttttatattcgtggacgatgtgaaactggttccgaaaactcaatccccctgtttcggtgacgacgatcccgctaaaaaagagcctcgcttccaggagaagcctgatcgcagacatgaactatacaaagcacacgagtgggcaagagcgataatcgagtctgatcaagaacagggcagaaaactccgaagcaccatgctagagttggaaaaacaagggctggaggccatggaggaaattctgacctcctctgagcctttagatcctgccgaggttggggacctgttttacgactgcgtggatacagaaattaaattctttaaatag

SEQ ID NO: 182099 - DNA, 426 bp, Artificial Sequence
  derived and/or modified sequence
atggcagccgcacctccttcatactgcttcgtcgccttccccccacgggctaaagatgggctggtagtgttcggcaagaactctgctagaccaagagatgaggttcaggaggtcgtgtacttctcagccgctgatcacgagcccgagagtaaggtggaatgtacgtatatctccatcgaccaggtccctcggacttacgctatcatgattagccgtccggcttggctgtggggcgcagagatgggggcaaatgagcatggggtctgcattgccaacgaggccatcaacactcgggaacccgctgcagagatagaggccttgctcgggatggatcttgtgagacttggtctcgagcgcggtgaaaccgccaaagaagccctggatgtgatcgtgagcctgttggaagagcacgggcagggcggatag

SEQ ID NO: 182100 - DNA, 1245 bp, Artificial Sequence
  derived and/or modified sequence
atggccgccgccccccccagctactgcttcgtggccttcccccccagagccaaggacggcctggtggtgttcggcaagaacagcgccagacccagagacgaggtgcaggaggtggtgtacttcagcgccgccgaccacgagcccgagagcaaggtggagtgcacctacatcagcatcgaccaggtgcccagaacctacgccatcatgatcagcagacccgcctggctgtggggcgccgagatgggcgccaacgagcacggcgtgtgcatcgccaacgaggccatcaacaccagagagcccgccgccgagatcgaggccctgctgggcatggacctggtgagactgggcctggagagaggcgagaccgccaaggaggccctggacgtgatcgtgagcctgctggaggagcacggccagggcggcaactacttcgaggacgccaacagctgccacagcttccagagcgcctacctgatcgtggacagagacgaggcctgggtgctggagaccatcggcaagtactgggccgccgagaaggtgaccgagggcgtgagatgcatctgcagccagctgagcctgaccaccaagatggacgccgagcaccccgagctgagaagctacgcccagagccagggctggtggaccggcgagggcgagttcaacttcagcgaggtgttcagccccgtggaggaccacctggactgcggcgccggcaaggacagcctggagaagcaggaggagagcatcaccgtgcagaccatgatgaacaccctgagagacaaggccagcggcgtgtgcatcgacagcgagttcttcctgaccaccgccagcggcgtgagcgtgctgccccagaacagaagcagcccctgcatccactacttcaccggcacccccgaccccagcagaagcatcttcaagcccttcatcttcgtggacgacgtgaagctggtgcccaagacccagagcccctgcttcggcgacgacgaccccgccaagaaggagcccagattccaggagaagcccgacagaagacacgagctgtacaaggcccacgagtgggccagagccatcatcgagagcgaccaggagcagggcagaaagctgagaagcaccatgctggagctggagaagcagggcctggaggccatggaggagatcctgaccagcagcgagcccctggaccccgccgaggtgggcgacctgttctacgactgcgtggacaccgagatcaagttcttcaagtag

SEQ ID NO: 182101 - protein, 424 aa, Artificial Sequence
  derived and/or modified sequence
MRAPGCGRLVLPLLLLAAAALAEGDAKGLKEGETPGNFMEDEQWLSSISQYSGKIKHWNRFRDEVEDDYIKSWEDNQQGDEALDTTKDPCQKVKCSRHKVCIAQGYQRAMCISRKKLEHRIKQPTVKLHGNKDSICKPCHMAQLASVCGSDGHTYSSVCKLEQQACLSSKQLAVRCEGPCPCPTEQAATSTADGKPETCTGQDLADLGDRLRDWFQLLHENSKQNGSASSVAGPASGLDKSLGASCKDSIGWMFSKLDTSADLFLDQTELAAINLDKYEVCIRPFFNSCDTYKDGRVSTAEWCFCFWREKPPCLAELERIQIQEAAKKKPGIFIPSCDEDGYYRKMQCDQSSGDCWCVDQLGLELTGTRTHGSPDCDDIVGFSGDFGSGVGWEDEEEKETEEAGEEAEEEEGEAGEADDGGYIW

SEQ ID NO: 182102 - protein, 424 aa, Artificial Sequence
  derived and/or modified sequence
MRAPGCGRLVLPLLLLAAAALAEGDAKGLKEGETPGNFMEDEQWLSSISQYSGKIKHWNRFRDGIEDDYIKSWEDNQQGDEALDTTKDPCQKVKCSRHKVCIAQGYQRAMCISRKKLEHRIKQPTVKLHGNKDSICKPCHMAQLASVCGSDGHTYSSVCKLEQQACLSSKQLAVRCEGPCPCPTEQAATSTADGKPETCTGQDLADLGDRLRDWFQLLHENSKQNGSASSVAGPASGLDKSLGASCKDSIGWMFSKLDTSADLFLDQTELAAINLDKYEVCIRPFFNSCDTYKDGRVSTAEWCFCFWREKPPCLAELERIQIQEAAKKKPGIFIPSCDEDGYYRKMQCDQSSGDCWCVDQLGLELTGTRTHGSPDCDDIVGFSGDFGSGVGWEDEEEKETEEAGEEAEEEEGEAGEADDGGYIW

SEQ ID NO: 182103 - DNA, 1275 bp, Artificial Sequence
  derived and/or modified sequence
atgagagcccccggctgcggcagactggtgctgcccctgctgctgctggccgccgccgccctggccgagggcgacgccaagggcctgaaggagggcgagacccccggcaacttcatggaggacgagcagtggctgagcagcatcagccagtacagcggcaagatcaagcactggaacagattcagagacgaggtggaggacgactacatcaagagctgggaggacaaccagcagggcgacgaggccctggacaccaccaaggacccctgccagaaggtgaagtgcagcagacacaaggtgtgcatcgcccagggctaccagagagccatgtgcatcagcagaaagaagctggagcacagaatcaagcagcccaccgtgaagctgcacggcaacaaggacagcatctgcaagccctgccacatggcccagctggccagcgtgtgcggcagcgacggccacacctacagcagcgtgtgcaagctggagcagcaggcctgcctgagcagcaagcagctggccgtgagatgcgagggcccctgcccctgccccaccgagcaggccgccaccagcaccgccgacggcaagcccgagacctgcaccggccaggacctggccgacctgggcgacagactgagagactggttccagctgctgcacgagaacagcaagcagaacggcagcgccagcagcgtggccggccccgccagcggcctggacaagagcctgggcgccagctgcaaggacagcatcggctggatgttcagcaagctggacaccagcgccgacctgttcctggaccagaccgagctggccgccatcaacctggacaagtacgaggtgtgcatcagacccttcttcaacagctgcgacacctacaaggacggcagagtgagcaccgccgagtggtgcttctgcttctggagagagaagcccccctgcctggccgagctggagagaatccagatccaggaggccgccaagaagaagcccggcatcttcatccccagctgcgacgaggacggctactacagaaagatgcagtgcgaccagagcagcggcgactgctggtgcgtggaccagctgggcctggagctgaccggcaccagaacccacggcagccccgactgcgacgacatcgtgggcttcagcggcgacttcggcagcggcgtgggctgggaggacgaggaggagaaggagaccgaggaggccggcgaggaggccgaggaggaggagggcgaggccggcgaggccgacgacggcggctacatctggtag

SEQ ID NO: 182104 - DNA, 1275 bp, Artificial Sequence
  derived and/or modified sequence
atgagagcccccggctgcggcagactggtgctgcccctgctgctgctggccgccgccgccctggccgagggcgacgccaagggcctgaaggagggcgagacccccggcaacttcatggaggacgagcagtggctgagcagcatcagccagtacagcggcaagatcaagcactggaacagattcagagacggcatcgaggacgactacatcaagagctgggaggacaaccagcagggcgacgaggccctggacaccaccaaggacccctgccagaaggtgaagtgcagcagacacaaggtgtgcatcgcccagggctaccagagagccatgtgcatcagcagaaagaagctggagcacagaatcaagcagcccaccgtgaagctgcacggcaacaaggacagcatctgcaagccctgccacatggcccagctggccagcgtgtgcggcagcgacggccacacctacagcagcgtgtgcaagctggagcagcaggcctgcctgagcagcaagcagctggccgtgagatgcgagggcccctgcccctgccccaccgagcaggccgccaccagcaccgccgacggcaagcccgagacctgcaccggccaggacctggccgacctgggcgacagactgagagactggttccagctgctgcacgagaacagcaagcagaacggcagcgccagcagcgtggccggccccgccagcggcctggacaagagcctgggcgccagctgcaaggacagcatcggctggatgttcagcaagctggacaccagcgccgacctgttcctggaccagaccgagctggccgccatcaacctggacaagtacgaggtgtgcatcagacccttcttcaacagctgcgacacctacaaggacggcagagtgagcaccgccgagtggtgcttctgcttctggagagagaagcccccctgcctggccgagctggagagaatccagatccaggaggccgccaagaagaagcccggcatcttcatccccagctgcgacgaggacggctactacagaaagatgcagtgcgaccagagcagcggcgactgctggtgcgtggaccagctgggcctggagctgaccggcaccagaacccacggcagccccgactgcgacgacatcgtgggcttcagcggcgacttcggcagcggcgtgggctgggaggacgaggaggagaaggagaccgaggaggccggcgaggaggccgaggaggaggagggcgaggccggcgaggccgacgacggcggctacatctggtag

SEQ ID NO: 182105 - DNA, 1275 bp, Artificial Sequence
  derived and/or modified sequence
atgagagcgcctgggtgcgggcggcttgtgttgcccctcctgctgttagcagctgccgcccttgcagaaggcgatgcaaagggactgaaggagggggagacccctgggaattttatggaggatgagcagtggctgagttccatcagtcagtatagtggtaaaataaaacactggaaccggtttagagatgaggtcgaggacgactacattaagtcctgggaggacaatcagcagggagatgaggccctagacacaacaaaagacccgtgccagaaggtgaagtgttccaggcataaagtgtgcatagcacagggataccagagagctatgtgtatctccaggaaaaagctcgaacacagaatcaaacagccaaccgtaaaattgcatgggaacaaagatagcatatgtaagccatgtcacatggctcagctggcaagcgtttgcggatcagacgggcacacttactcatccgtgtgtaagttagagcaacaagcgtgtctctctagtaaacaactcgcggtccgctgcgaaggtccttgtccctgtcctaccgagcaggccgccacatccactgccgacgggaagccagagacgtgcaccggccaggatctcgcagacctcggagacaggttgagggattggtttcagttgttgcatgaaaattcaaagcagaatggttcagcttccagcgttgccggacccgcaagcggcttggacaaatcgctcggggcttcatgcaaagactccatcggttggatgttctctaagctagacacctccgcagatctttttctggatcagaccgaactcgcagccatcaacctggataaatatgaggtttgcattcgcccctttttcaactcttgcgatacctacaaagatgggcgggtcagtaccgctgaatggtgtttctgcttctggcgcgagaagcctccctgtctcgccgagctcgaaaggatccaaattcaggaagcagctaagaagaaacctggcatattcattccatcctgcgatgaagatggatattatagaaaaatgcagtgcgaccagtcttccggtgattgctggtgtgtcgatcagttaggactggaattgacaggaactcgcacgcacggatctcctgattgcgacgacattgtcggctttagcggcgactttggctcgggagttggatgggaagatgaggaagagaaggagactgaagaggcaggagaggaggcagaggaagaggagggtgaagctggggaggccgacgacggtggatacatctggtag

SEQ ID NO: 182106 - DNA, 1275 bp, Artificial Sequence
  derived and/or modified sequence
atgcgggccccggggtgcggcagactggtgttgcctttgttacttcttgccgctgccgcactggcagagggcgacgctaaggggctgaaagagggcgagactccaggaaacttcatggaagatgaacaatggctgtcctcaatcagccagtatagcgggaaaattaaacactggaacaggttcagagacggtatcgaggacgactatatcaaatcatgggaagacaaccagcagggcgatgaggccttggatacaaccaaggacccctgtcagaaggtgaagtgttcacggcacaaggtgtgtatcgcccagggttaccagcgggctatgtgcatttcccggaagaagttagaacaccgtatcaaacaacccaccgttaagcttcacgggaacaaggatagcatctgcaagccctgtcatatggcccaactggcctctgtatgtgggagcgacgggcacacatatagcagtgtttgtaaactggagcagcaggcatgtctgagtagtaagcagctggccgtgagatgtgagggtccatgcccatgccccacggaacaggcggctactagcacagccgacggaaagccggagacctgcacgggccaggatctggctgatctgggcgaccgcctcagggactggttccagcttctgcatgaaaactctaagcagaatggtagtgcaagcagtgtcgcaggccccgccagtggattagacaagagcctcggggcttcttgtaaggactctatcgggtggatgtttagtaagcttgacacttcagccgacctcttcctagaccaaaccgaactcgctgcaataaacctggataaatacgaggtctgcatcaggcccttcttcaacagttgcgacacttacaaggacggcagagtgtctactgccgaatggtgcttctgtttctggcgggagaagcccccctgtctggccgaactcgagagaatccagatccaggaggcggctaagaagaaaccgggtatatttatccctagttgcgatgaggatggatactatagaaagatgcagtgcgaccaaagctcgggcgattgttggtgcgtagatcagctgggtctggagctgaccggaacacggacacatggcagtcccgattgcgacgatatcgtgggattcagcggcgactttggtagcggcgtcgggtgggaggatgaagaagagaaagaaaccgaggaagcaggcgaggaagccgaagaagaagagggcgaggctggggaagccgatgatggaggctatatttggtag

SEQ ID NO: 182107 - DNA, 1275 bp, Artificial Sequence
  derived and/or modified sequence
atgagggcccctggctgcggccgcctggtgctgcccctgctgctgctggccgctgctgccctggccgagggagatgccaagggcctgaaggagggggagaccccaggcaacttcatggaggatgagcagtggctgagcagcatcagccagtacagcggcaagatcaagcactggaaccgcttcagagatgaggtggaggatgactacatcaagtcctgggaggacaaccagcagggagatgaggccctggacaccaccaaggacccctgccagaaggtgaagtgcagccgccacaaggtgtgcatcgcccagggctaccagagggccatgtgcatcagcaggaagaagctggagcaccgcatcaagcagcccaccgtgaagctgcacggcaacaaggacagcatctgcaagccctgccacatggcccagctggcctctgtgtgtggcagtgatggccacacctacagctctgtgtgcaagctggagcagcaggcctgcctgagcagcaagcagctggccgtgcgctgtgagggcccctgcccctgccccacagagcaggccgccaccagcacagcagatggcaagccagagacctgcaccggccaggacctggccgacctgggggaccggctgcgggactggttccagctgctgcacgagaacagcaagcagaatggaagtgccagctctgtggccggccctgccagcggcctggacaagagcctgggcgccagctgcaaggacagcatcggctggatgttcagcaagctggacaccagcgctgacctcttcctggaccagacagagctggccgccatcaacctggacaagtatgaggtgtgcatccggcccttcttcaacagctgtgacacctacaaggatggccgggtgtccacagctgagtggtgcttctgcttctggagggagaagccaccctgcctggccgagctggagcgcatccagatccaggaggccgccaagaagaagccaggcatcttcatccccagctgtgatgaagatggctactacaggaagatgcagtgtgaccagagcagcggggactgctggtgtgtggaccagctgggcctggagctgaccggcaccaggacccacggcagcccagactgtgatgacatcgtgggcttcagcggggactttggcagcggcgtgggctgggaggatgaggaggagaaggagacagaggaggccggggaggaggccgaggaggaggagggggaggccggggaggctgatgatggcggctacatctggtag

SEQ ID NO: 182108 - DNA, 1275 bp, Artificial Sequence
  derived and/or modified sequence
atgagggcccctggctgcggccgcctggtgctgcccctgctgctgctggccgctgctgccctggccgagggagatgccaagggcctgaaggagggggagaccccaggcaacttcatggaggatgagcagtggctgagcagcatcagccagtacagcggcaagatcaagcactggaaccgcttcagagatggcattgaagatgactacatcaagtcctgggaggacaaccagcagggagatgaggccctggacaccaccaaggacccctgccagaaggtgaagtgcagccgccacaaggtgtgcatcgcccagggctaccagagggccatgtgcatcagcaggaagaagctggagcaccgcatcaagcagcccaccgtgaagctgcacggcaacaaggacagcatctgcaagccctgccacatggcccagctggcctctgtgtgtggcagtgatggccacacctacagctctgtgtgcaagctggagcagcaggcctgcctgagcagcaagcagctggccgtgcgctgtgagggcccctgcccctgccccacagagcaggccgccaccagcacagcagatggcaagccagagacctgcaccggccaggacctggccgacctgggggaccggctgcgggactggttccagctgctgcacgagaacagcaagcagaatggaagtgccagctctgtggccggccctgccagcggcctggacaagagcctgggcgccagctgcaaggacagcatcggctggatgttcagcaagctggacaccagcgctgacctcttcctggaccagacagagctggccgccatcaacctggacaagtatgaggtgtgcatccggcccttcttcaacagctgtgacacctacaaggatggccgggtgtccacagctgagtggtgcttctgcttctggagggagaagccaccctgcctggccgagctggagcgcatccagatccaggaggccgccaagaagaagccaggcatcttcatccccagctgtgatgaagatggctactacaggaagatgcagtgtgaccagagcagcggggactgctggtgtgtggaccagctgggcctggagctgaccggcaccaggacccacggcagcccagactgtgatgacatcgtgggcttcagcggggactttggcagcggcgtgggctgggaggatgaggaggagaaggagacagaggaggccggggaggaggccgaggaggaggagggggaggccggggaggctgatgatggcggctacatctggtag

SEQ ID NO: 182109 - DNA, 1275 bp, Artificial Sequence
  derived and/or modified sequence
atgcgggcccccggctgcggccggctggtgctgcccctgctgctgctcgcggctgcagccctggccgagggcgatgccaagggcctgaaagagggtgaaacgcctggcaactttatggaggatgaacagtggctgtctagcataagccaatactctggtaagataaaacactggaatagattccgagatgaggtcgaagatgactatatcaaatcttgggaggacaatcagcagggagatgaggcactcgacacaacaaaagacccctgtcaaaaggtgaaatgctcacgacacaaagtctgtatagcacagggctatcagagggctatgtgcattagccgaaaaaagctggagcaccggattaaacagccaacagtgaagctacatgggaataaggacagcatctgtaagccatgccatatggctcaactcgccagcgtttgtggatctgacggccacacgtattcctccgtctgcaaactggagcagcaggcctgtttgagttccaagcagctggccgtgcgatgtgaaggaccgtgtccatgtcctaccgaacaggccgccacatcaactgctgatggaaagcccgagacttgcaccggacaagacttagcagatctgggggaccgtctacgagattggtttcagttgcttcacgaaaatagcaaacagaatggatcagcctcttccgttgcaggtcctgcttccgggttggataaatccctaggagcgtcatgtaaagacagcatcggctggatgtttagcaaacttgatacgtctgccgacctcttcctggatcagactgagctggcagcaataaaccttgataaatatgaggtatgtataaggccctttttcaatagctgcgacacatataaggatggcagagtgtccaccgctgagtggtgtttctgtttctggagggaaaaacctccctgccttgcagaactggagcgtattcagatccaggaggcggctaaaaaaaagccgggtatattcataccctcctgcgatgaggacggctactatcgtaagatgcagtgtgaccagagctccggggattgctggtgtgtagatcagttgggcctggagttaacaggcactcggacacacggctcccccgactgtgacgacatcgtggggttttccggggactttggtagcggcgtgggttgggaagacgaagaagaaaaagaaactgaagaagcaggggaagaagctgaggaggaagaaggtgaggcaggggaggccgacgacggaggttatatttggtag

SEQ ID NO: 182110 - DNA, 1275 bp, Artificial Sequence
  derived and/or modified sequence
atgcgggcccccggctgcggccggctggtgctgcccctgctgctgcttgccgcagctgccctagccgaaggcgacgctaaaggcctgaaggagggtgagacaccaggaaactttatggaggatgagcagtggctttcatccattagtcagtatagtggcaagatcaagcactggaatcgctttagagatggcatagaagatgactacatcaagagctgggaggataaccaacagggggacgaggcgctcgacacaactaaagacccctgtcagaaagtaaaatgcagccggcataaagtgtgtattgcccagggttatcagagagccatgtgcatcagccgcaaaaagctagagcacaggatcaagcagcccactgtgaaactgcacggcaacaaggactcaatttgtaagccctgtcacatggcccagcttgcatctgtgtgtggctcagacgggcacacctactctagcgtgtgtaaactggagcaacaggcatgtttgagctccaagcaacttgctgtcaggtgcgaaggtccctgtccatgccctacggagcaagcagccacctcaacagccgatggaaaacctgagacctgcacagggcaggatttggccgatcttggtgaccgattgagggattggtttcagttactgcatgaaaactccaagcaaaatggctcagcttcaagcgtggccggccccgccagcggactggataagtcactgggcgcctcctgcaaagattcaattgggtggatgttttccaaactggatacaagcgcggaccttttcctggaccagaccgagcttgccgcaattaacctggataagtatgaggtgtgcatcagacctttctttaattcttgtgatacctacaaggatggtagagtctcaactgctgagtggtgcttctgcttttggagggagaagccaccatgcctggcggagctcgaaaggattcagatccaggaagctgcaaaaaagaagcccgggatttttatcccatcatgcgacgaggacggatattacaggaaaatgcagtgcgaccagtcttcgggggactgctggtgtgtcgaccagctcggtctggagctgactgggacacgtactcacggtagcccagactgcgacgatattgtcgggtttagtggggattttggctctggggtcggatgggaggacgaggaggaaaaggaaacagaagaagccggtgaggaagcggaagaagaagagggtgaagcaggagaagcagacgacggcgggtatatatggtag

SEQ ID NO: 182111 - DNA, 1275 bp, Artificial Sequence
  derived and/or modified sequence
atgcgagctcccggttgtggtcgcctggtgctccctctgctgctccttgccgctgcggctctggctgagggagatgctaaagggcttaaggaaggtgaaactcctggcaattttatggaagacgaacagtggcttagttccattagtcagtacagtggcaaaattaagcactggaatagattcagggatgaagtggaggacgactacattaagtcatgggaagataaccaacagggagacgaagccctggataccacaaaggatccgtgtcagaaagtcaagtgttcgaggcataaggtgtgtatcgcccaggggtaccaacgcgcaatgtgtatcagtcggaaaaagctggagcataggatcaagcagcctaccgtcaagttacatggcaataaagattcaatctgcaaaccatgtcacatggctcaattggcttcggtgtgtgggtccgatgggcacacctatagtagcgtgtgcaaactggagcagcaggcttgcctgtcttccaagcagcttgccgtgagatgtgagggaccttgtccctgtccaacagagcaggccgcaacttccaccgccgatggcaaacctgagacttgtactggacaggatctggcggatttgggggatcgactgagagattggtttcaattactccatgagaacagtaaacagaacggtagtgcatccagcgtagctgggccagcctctgggctcgacaagagtttgggagcgtcgtgtaaagactccattgggtggatgttcagtaaattggacacctcggccgatctcttcctggatcagaccgaacttgccgcaattaacttggataaatacgaagtgtgtattaggcccttttttaatagctgtgacacctacaaagacgggcgagtcagcacagctgaatggtgtttttgcttctggcgcgaaaagcctccctgtctcgccgagctggagcggattcagattcaagaggctgccaaaaaaaagccaggcatcttcattccatcatgcgatgaggacgggtactaccggaaaatgcagtgcgaccagtctagtggcgactgttggtgcgtggatcagttggggctagagctgacggggacaaggacccacggttctcccgactgcgatgatatcgtcggcttttcaggcgacttcgggtctggggtgggctgggaggacgaggaggaaaaagagaccgaagaggcaggtgaagaggccgaggaggaggagggtgaagctggcgaagctgacgatggaggatacatctggtag

SEQ ID NO: 182112 - DNA, 1275 bp, Artificial Sequence
  derived and/or modified sequence
atgcgtgcccctggctgtggcagactcgtgttgccactcttgctattagccgctgccgctttagctgagggcgatgcaaaaggactgaaagagggggaaactcccggaaacttcatggaggacgagcagtggctttcttcaatttcccaatattctggcaaaataaaacattggaaccgattccgggacggcattgaagacgattatattaagagttgggaagacaatcagcagggagatgaagccttggacacaacaaaagatccttgccagaaagtgaagtgcagccgtcacaaggtttgcatcgcacaagggtaccagcgtgctatgtgcatttctagaaagaagcttgagcatcggatcaagcagcccactgtgaagttacacggcaacaaagatagtatttgtaagccatgccatatggcacagctggcatccgtctgcggatccgatggacacacttacagctctgtgtgtaaactggaacagcaagcttgcctgtcatcgaagcagcttgccgtgcgttgtgaggggccatgtccctgtcccacagagcaggctgcaacttccaccgctgatggcaagccagaaacttgtaccggacaggatcttgccgacttgggggacagactgcgcgactggtttcagctgctgcacgaaaattccaaacagaatggctctgcatcctctgtcgctgggccagcctccggtctggacaagtctttaggagcaagttgcaaggatagcataggatggatgttttctaagctcgacacctccgccgatctctttttagatcagactgagctcgcagccatcaacctggacaaatatgaggtgtgtatcagaccattcttcaatagctgtgatacatacaaagacggtcgcgtgtctaccgctgaatggtgcttctgcttttggcgggagaagcctccttgtctggccgaactggaacgaatccagattcaggaggctgcgaagaaaaagcccggaatcttcattccatcttgcgatgaagatgggtattatcgtaagatgcagtgtgaccagagctctggcgactgttggtgcgtagaccagctgggactcgaactgaccggcactcgcacccatgggtccccagattgtgatgacattgtaggtttttccggggattttggtagtggcgtcgggtgggaagacgaggaagaaaaagagacagaagaagccggtgaggaggcagaagaagaggagggcgaggcaggtgaggccgatgatggaggctacatctggtag

SEQ ID NO: 182113 - DNA, 5328 bp, Artificial Sequence
  derived and/or modified sequence
agttgttatacggcttttgtcttaacgaagccacccattacggtatgatgatgtcaaacgtgatgctgatgctacagttacagcccctgctggcgcagcctctctgattctctctccctctccgcgtccagtgctgggctttttcagacaagtgcatctcctaaccaggtcacatttcagccgcgacccactctccgccagtcaccggaggcagaccgcgggaggagagctgaggacagccgcgtgcgcttcgccagcagcggggtgggaggaaggacattaaaatactgcagaagtcaagacccccccaggtcgaacccagaccacgatgcgcgccccgggctgcgggcggctggtgctgccgctgctgctcctggccgcggcagccctggccgaaggcgacgccaaggggctcaaggagggcgagacccccggcaatttcatggaggacgagcaatggctgtcgtccatctcgcagtacagcggcaagatcaagcactggaaccgcttccgagacgaagtggaggatgactatatcaagagctgggaggacaatcagcaaggagatgaagccctggataccaccaaggacccctgccagaaggtgaagtgcagccgccacaaggtgtgcattgcccagggctaccagcgggccatgtgcatcagtcgcaagaagctggagcacaggatcaagcagccgaccgtgaaactccatggaaacaaagactccatctgcaagccctgccacatggcccagcttgcctctgtctgcggctcagatggccacacttacagctctgtgtgtaagctggagcaacaggcgtgcctgagcagcaagcagctggcggtgcgatgcgagggcccctgcccctgccccacggagcaggctgccacctccaccgccgatggcaaaccagagacttgcaccggtcaggacctggctgacctgggagatcggctgcgggactggttccagctccttcatgagaactccaagcagaatggctcagccagcagtgtagccggcccggccagcgggctggacaagagcctgggggccagctgcaaggactccattggctggatgttctccaagctggacaccagtgctgacctcttcctggaccagacggagctggccgccatcaacctggacaagtacgaggtctgcatccgtcccttcttcaactcctgtgacacctacaaggatggccgggtctctactgctgagtggtgcttctgcttctggagggagaagcccccctgcctggcagagctggagcgcatccagatccaggaggccgccaagaagaagccaggcatcttcatcccgagctgcgacgaggatggctactaccggaagatgcagtgtgaccagagcagcggtgactgctggtgtgtggaccagctgggcctggagctgactggcacgcgcacgcatgggagccccgactgcgatgacatcgtgggcttctcgggggactttggaagcggtgtcggctgggaggatgaggaggagaaggagacggaggaagcaggcgaggaggccgaggaggaggagggcgaggcaggcgaggctgacgacgggggctacatctggtagacgccctcaggagccggctgccgggggggactcaacagcagagctctgagcagcagcaggcaacttcgagaacggatccagaaatgcagtcagaaggaccctgctccacctggggggactgggagtgtgagtgtgcatggcatgtgtgtggcacagatggctgggacgggtgacagtgtgagtgcatgtgtgcatgcatgtgtgtatgtgtgtgtgtgtgtggcatgcgctgacaaatgtgtccttgatccacactgctcctggcagagtgagtcacccaaaggccccttcggcctccttgtagctgttttctttccttttgttgttggttttaaaatacattcacacacaaatacaaattgacaggtcaaaatccatgaaatgagatcccccagccgtgtcctccagcccagccctgaccccttggtttctaccctggctccccttggtttctaccctggctcaaccgacccctgtctgcccttctccctcttgcttctgaggtcaagctctggcctgcgagcctgtccccattgcaaaggggagggaggggcagggagctgtctaccagctgaggtcctcccaaaactgggccgatgtggtgtgacatccccaccagcctcagatgagacgggccaggacgcccagccacagcaagccctgtccctttgccggatccccaaacactagagaagctctcctaacccaaggcggagaatgaaggtggtggcggcagaggaggagggcagcagctgagaggccagggacagggtgcctcgccaagctgtctgaggtctgtcccaggtggcccaggtggtgcaggtagaacagggtgaggagagggggtcggctcagcaggaggaggctgtggctgcagagcctgggggagcttttaggtgttgagatggggcagctctgaatcctagaccctggaatagcctgtcccttttctctgggtctcgtggtggagccatgatctgggctgctctcttggggacactgggtggtggttacacagttgacctctgcctggctcccccttggtgcaactcctgcctccatcccccttgctggggtcccctcatccacttgagggcgcctgagggccaggagcagcaggcaaggagcctgggtctaggctaagggggtgtgtgcccacctcctccctgacccttaacactcctgtcctgcccagaccaacagagagagctgtccctgagaccccggagagaagcagctgccgaaagctgcagcctttccgcactctgagaccatgatcttcctcctgccaggggagagccacccacaggccatgtccagccccacttccctcagcccccagggcttccttctggcccctctgaggattccctagggctgccccgcagaggggcttccccaagctctgttttgaagcctgcaatgtggaaaagtgagaagtcagagggaacaggacaggtgcagccgggctctgaggccacacctcacacctcgctgttccccaacatcccctgagcagtgtgagctcatctcaccagatgagaagaggccctgtgcatttcttttgtttgtttgttgctgttttcccccacccatccagttctcctcagcaaagcaaattccttaacacctttggtggagaatttcttacccagacttggggctgtgatgcccttcagtgcgtggtgagtgcagcgtgtgtgcgtgtgcctgtgtgtgaacctgggggccatcctggtggcctgggagcgtgaggagaggccccctgtgtgctgggtgagtggtgggtgtggggtcaatgcagtgaggctctctgggtgaggctcccaacctggcagtccccagcctcccagcatctgtgagcgtctgttggactttacagaagagcctcatcctgtctgcccctcactctgccctggaatcaacatcttccgagtccttcttgggggaaatagcagagccccacttaactccataaactgcttcccattccgcagcccagttctgattgttgaggtgtcgcgtcgttccaggtcccccagtcccctctttctcctgtcctctctctgtccttcacctccccactccagccccggctcagttcagggaaatgctgttccacatcagccctctgctctctgaggcagccgcgcctctgactcggagctacttgaaacttctgctcttgctaggattggagtctacctatctcttccatttgtcccagctggagttctggaactttcctcctcggggtgggggtgggggttgttaaggatgctggggggcctggggaaggaaggagttcagaggaagggtgtcccctgtcctcttgatgtcaccctccgctcctgggacacgtgctctctctgtctctgggtcttctggctgtgcacgtttgtgtgtccttgtaaatatgttttaggaagaaagcaaaagggactgaactagcctctggtaggattgcaggggtccagccttgcctgtttccgaagcccccacactgcctttcgccctactgagactggtcccctcaaaaggtagacaaaacagcagctccctgtggagctgaagggcggcctcaaagtggctttttgttagacaaggttaaggtttcctcatgagcaaggttgcagatcggtccttcctcagctccttgatttgtgaccttgaccaaggggcctgccacccagcccctccagtgccctctcctcgatgcctcgctccttcctgcccccactcccctggcttaggcaggtaggggaattagggccatgctggaagaagcttaaccatgtgttcaaagaacggtttcttgcttgcttggtcctggaactccccttggctgccccaggcctccttggcccatgggtgctgggggaggtggatgtcagatctggtaggttgcagcagagaaaataaatgtgccttgagagaccactcagagagggtccaagggtgatggagaaggaagcatggcctgggagcttggaagggaggggtggtgggtggcggcatcttgactgccccctgttgtcccacacgtggggggtggtcaccccccttcactccagcccgcctgccttcagccttccatgagcttcacctgcttccaacttcactttggagggggtggggtccgttggcatcaacacggggaccctctgcttcaccaaagcccgagccctcagcccctggggagaacaaatggctgagctttgatacctggggtcgtcgagaggctgcgggctggcggcagtcccaggggagagacaccacagaaggagacccagacatcccgaggaagttcccagcagagcaaactgctttccagcctgaagcctgcttaaactgtgtgatgtgcaataactgagcttagagttaggaattgtgttcaagtgcttggatttccgtctgtagatttaactgctgaaattgtatctctcagtaattttagatgtcttttaaaaaattgaaaaacaaagtgttagactgtgtgcgtgtgcgttgatgggcactcaagagtcccgtgagtcatccagccctgcctttcccctgcgcccccatcctctcacgtcccgccccgcctccacttggggaccctgcctcgtgtcgtctttatctgcctattactcagcctaaggaaacaagtacactccacacatgcataaaggaaatcaaatgttatttttaagaaaatggaaaataaaaactttataaacacc

SEQ ID NO: 182114 - DNA, 5000 bp, Artificial Sequence
  derived and/or modified sequence
atgcgcgccccgggctgcgggcggctggtgctgccgctgctgctcctggccgcggcagccctggccgaaggcgacgccaaggggctcaaggagggcgagacccccggcaatttcatggaggacgagcaatggctgtcgtccatctcgcagtacagcggcaagatcaagcactggaaccgcttccgagacgggatagaggatgactatatcaagagctgggaggacaatcagcaaggagatgaagccctggataccaccaaggacccctgccagaaggtgaagtgcagccgccacaaggtgtgcattgcccagggctaccagcgggccatgtgcatcagtcgcaagaagctggagcacaggatcaagcagccgaccgtgaaactccatggaaacaaagactccatctgcaagccctgccacatggcccagcttgcctctgtctgcggctcagatggccacacttacagctctgtgtgtaagctggagcaacaggcgtgcctgagcagcaagcagctggcggtgcgatgcgagggcccctgcccctgccccacggagcaggctgccacctccaccgccgatggcaaaccagagacttgcaccggtcaggacctggctgacctgggagatcggctgcgggactggttccagctccttcatgagaactccaagcagaatggctcagccagcagtgtagccggcccggccagcgggctggacaagagcctgggggccagctgcaaggactccattggctggatgttctccaagctggacaccagtgctgacctcttcctggaccagacggagctggccgccatcaacctggacaagtacgaggtctgcatccgtcccttcttcaactcctgtgacacctacaaggatggccgggtctctactgctgagtggtgcttctgcttctggagggagaagcccccctgcctggcagagctggagcgcatccagatccaggaggccgccaagaagaagccaggcatcttcatcccgagctgcgacgaggatggctactaccggaagatgcagtgtgaccagagcagcggtgactgctggtgtgtggaccagctgggcctggagctgactggcacgcgcacgcatgggagccccgactgcgatgacatcgtgggcttctcgggggactttggaagcggtgtcggctgggaggatgaggaggagaaggagacggaggaagcaggcgaggaggccgaggaggaggagggcgaggcaggcgaggctgacgacgggggctacatctggtagacgccctcaggagccggctgccgggggggactcaacagcagagctctgagcagcagcaggcaacttcgagaacggatccagaaatgcagtcagaaggaccctgctccacctggggggactgggagtgtgagtgtgcatggcatgtgtgtggcacagatggctgggacgggtgacagtgtgagtgcatgtgtgcatgcatgtgtgtatgtgtgtgtgtgtgtggcatgcgctgacaaatgtgtccttgatccacactgctcctggcagagtgagtcacccaaaggccccttcggcctccttgtagctgttttctttccttttgttgttggttttaaaatacattcacacacaaatacaaattgacaggtcaaaatccatgaaatgagatcccccagccgtgtcctccagcccagccctgaccccttggtttctaccctggctccccttggtttctaccctggctcaaccgacccctgtctgcccttctccctcttgcttctgaggtcaagctctggcctgcgagcctgtccccattgcaaaggggagggaggggcagggagctgtctaccagctgaggtcctcccaaaactgggccgatgtggtgtgacatccccaccagcctcagatgagacgggccaggacgcccagccacagcaagccctgtccctttgccggatccccaaacactagagaagctctcctaacccaaggcggagaatgaaggtggtggcggcagaggaggagggcagcagctgagaggccagggacagggtgcctcgccaagctgtctgaggtctgtcccaggtggcccaggtggtgcaggtagaacagggtgaggagagggggtcggctcagcaggaggaggctgtggctgcagagcctgggggagcttttaggtgttgagatggggcagctctgaatcctagaccctggaatagcctgtcccttttctctgggtctcgtggtggagccatgatctgggctgctctcttggggacactgggtggtggttacacagttgacctctgcctggctcccccttggtgcaactcctgcctccatcccccttgctggggtcccctcatccacttgagggcgcctgagggccaggagcagcaggcaaggagcctgggtctaggctaagggggtgtgtgcccacctcctccctgacccttaacactcctgtcctgcccagaccaacagagagagctgtccctgagaccccggagagaagcagctgccgaaagctgcagcctttccgcactctgagaccatgatcttcctcctgccaggggagagccacccacaggccatgtccagccccacttccctcagcccccagggcttccttctggcccctctgaggattccctagggctgccccgcagaggggcttccccaagctctgttttgaagcctgcaatgtggaaaagtgagaagtcagagggaacaggacaggtgcagccgggctctgaggccacacctcacacctcgctgttccccaacatcccctgagcagtgtgagctcatctcaccagatgagaagaggccctgtgcatttcttttgtttgtttgttgctgttttcccccacccatccagttctcctcagcaaagcaaattccttaacacctttggtggagaatttcttacccagacttggggctgtgatgcccttcagtgcgtggtgagtgcagcgtgtgtgcgtgtgcctgtgtgtgaacctgggggccatcctggtggcctgggagcgtgaggagaggccccctgtgtgctgggtgagtggtgggtgtggggtcaatgcagtgaggctctctgggtgaggctcccaacctggcagtccccagcctcccagcatctgtgagcgtctgttggactttacagaagagcctcatcctgtctgcccctcactctgccctggaatcaacatcttccgagtccttcttgggggaaatagcagagccccacttaactccataaactgcttcccattccgcagcccagttctgattgttgaggtgtcgcgtcgttccaggtcccccagtcccctctttctcctgtcctctctctgtccttcacctccccactccagccccggctcagttcagggaaatgctgttccacatcagccctctgctctctgaggcagccgcgcctctgactcggagctacttgaaacttctgctcttgctaggattggagtctacctatctcttccatttgtcccagctggagttctggaactttcctcctcggggtgggggtgggggttgttaaggatgctggggggcctggggaaggaaggagttcagaggaagggtgtcccctgtcctcttgatgtcaccctccgctcctgggacacgtgctctctctgtctctgggtcttctggctgtgcacgtttgtgtgtccttgtaaatatgttttaggaagaaagcaaaagggactgaactagcctctggtaggattgcaggggtccagccttgcctgtttccgaagcccccacactgcctttcgccctactgagactggtcccctcaaaaggtagacaaaacagcagctccctgtggagctgaagggcggcctcaaagtggctttttgttagacaaggttaaggtttcctcatgagcaaggttgcagatcggtccttcctcagctccttgatttgtgaccttgaccaaggggcctgccacccagcccctccagtgccctctcctcgatgcctcgctccttcctgcccccactcccctggcttaggcaggtaggggaattagggccatgctggaagaagcttaaccatgtgttcaaagaacggtttcttgcttgcttggtcctggaactccccttggctgccccaggcctccttggcccatgggtgctgggggaggtggatgtcagatctggtaggttgcagcagagaaaataaatgtgccttgagagaccactcagagagggtccaagggtgatggagaaggaagcatggcctgggagcttggaagggaggggtggtgggtggcggcatcttgactgccccctgttgtcccacacgtggggggtggtcaccccccttcactccagcccgcctgccttcagccttccatgagcttcacctgcttccaacttcactttggagggggtggggtccgttggcatcaacacggggaccctctgcttcaccaaagcccgagccctcagcccctggggagaacaaatggctgagctttgatacctggggtcgtcgagaggctgcgggctggcggcagtcccaggggagagacaccacagaaggagacccagacatcccgaggaagttcccagcagagcaaactgctttccagcctgaagcctgcttaaactgtgtgatgtgcaataactgagcttagagttaggaattgtgttcaagtgcttggatttccgtctgtagatttaactgctgaaattgtatctctcagtaattttagatgtcttttaaaaaattgaaaaacaaagtgttagactgtgtgcgtgtgcgttgatgggcactcaagagtcccgtgagtcatccagccctgcctttcccctgcgcccccatcctctcacgtcccgccccgcctccacttggggaccctgcctcgtgtcgtctttatctgcctattactcagcctaaggaaacaagtacactccacacatgcataaaggaaatcaaatgttatttttaagaaaatggaaaataaaaactttataaacacc

SEQ ID NO: 182115 - protein, 836 aa, Artificial Sequence
  derived and/or modified sequence
MHAQRQFVVAAVRAEVRRHEVAKQALNRLRKLAERVDDPELQDSIQASLDSIREAVINSQEWTLSRSIPELRLGVLGDARSGKSSLIHRFLTGSYQVLEKTESEQYKKEMLVDGQTHLVLIREEAGAPDAKFSGWADAVIFVFSLEDENSFQAVSRLHGQLSSLRGEGRGGLALALVGTQDRISASSPRVVGDARARALCADMKRCSYYETCATYGLNVDRVFQEVAQKVVTLRKQQQLLAACKSLPSSPSHSAASTPVAGQASNGGHTSDYSSSLPSSPNVGHRELRAEAAAVAGLSTPGSLHRAAKRRTSLFANRRGSDSEKRSLDSRGETTGSGRAIPIKQSFLLKRSGNSLNKEWKKKYVTLSSNGFLLYHPSINDYIHSTHGKEMDLLRTTVKVPGKRPPRAISAFGPSASINGLVKDMSTVQMGEGLEATTPMPSPSPSPSSLQPPPDQTSKHLLKPDRNLARALSTDCTPSGDLSPLSREPPPSPMVKKQRRKKLTTPSKTEGSAGQAEEENFEFLIVSSTGQTWHFEAASFEERDAWVQAIESQILASLQCCESSKVKLRTDSQSEAVAIQAIRNAKGNSICVDCGAPNPTWASLNLGALICIECSGIHRNLGTHLSRVRSLDLDDWPRELTLVLTAIGNDTANRVWESDTRGRAKPSRDSSREERESWIRAKYEQLLFLAPLSTSEEPLGRQLWAAVQAQDVATVLLLLAHARHGPLDTSVEDPQLRSPLHLAAELAHVVITQLLLWYGADVAARDAQGRTALFYARQAGSQLCADILLQHGCPGEGGSAATTPSAATTPSITATPSPRRRSSAASVGRADAPVALV

SEQ ID NO: 182116 - DNA, 2511 bp, Artificial Sequence
  derived and/or modified sequence
atgcacgcccagcggcagttcgtggtcgccgccgtgcgcgcagaagtacggagacacgaggtggccaagcaagcacttaaccgtctcagaaaactcgctgagcgcgtagacgacccagaattgcaagacagcatccaagcatcactggattctatacgggaagctgttatcaattctcaggagtggaccctctcccgttccatacctgaactacgcttgggcgtcctgggggacgcgcgcagcggcaagagcagcctcattcacagattcctgaccggatcgtaccaagtactggaaaagaccgagagtgagcagtataagaaggagatgctcgtggacggccagacacacctcgttctgattcgggaggaggccggtgcccccgatgccaagttctctggctgggcagacgctgtcatttttgttttcagtctggaggatgagaactccttccaagccgttagtcgcctgcacgggcagctgtcttctctgagaggcgaaggcagaggtggcttggctctggcactcgtcggcacacaagataggatttccgcttccagtccgcgagtcgtgggcgacgcccgagccagagccttatgcgcagatatgaagagatgttcgtattatgagacctgtgctacatatggtctcaatgtggatagagttttccaggaagtcgcacagaaagtcgtaacattacgcaagcaacagcaattactggccgcctgtaaatctttaccatccagcccctctcactccgccgcatcgactccagtggccggccaggccagcaacgggggtcacactagtgattacagctcaagcctgcctagctcccccaatgtgggccaccgtgaattgcgagcagaggctgccgcagtggcgggcttgtcgacccctgggagcctgcatcgtgccgcaaaacggcggacgtccctcttcgccaacagaagaggctcggactcagagaagagatctctggactctagaggcgagaccacgggttctggcagggcaatcccaatcaagcaaagctttttgcttaaaagaagcggaaatagcctgaataaggaatggaaaaaaaaatacgtgacactgagttcgaacggcttcctgctctaccacccaagcattaacgactacattcattccacacacgggaaggagatggatctgcttcgcaccaccgtgaaagtgcccggaaaaagacctccccgggccattagcgcttttggaccctccgcatctataaacggcttggtcaaagatatgtccaccgtgcagatgggggagggactggaggccaccaccccgatgccatcccccagcccctcaccttcctcactgcagccaccccccgaccagacaagcaagcacttactcaagcccgaccgcaacctcgcccgcgctctttccactgactgcaccccttcaggcgatttgtcacctctaagccgggagccccctccatctcccatggtgaagaagcagcggaggaagaagttaaccactccctccaaaactgagggaagcgcaggtcaggccgaggaggagaatttcgaatttctcatcgtaagtagcacaggccagacttggcatttcgaagccgcatcctttgaggaacgagacgcctgggtccaagcaattgagtcacagattctggcatctctgcagtgctgcgaatcatcaaaagtcaaacttagaaccgactcacagtctgaggccgtggcaatccaggccatccgaaatgctaagggcaacagtatttgcgtggattgtggagcacccaatcccacatgggccagtctgaaccttggagcactgatttgtattgaatgtagcggtattcaccgcaatctcggaacgcacctgtcccgtgtgcgaagcctggacttggacgattggccaagagaattgacactggttctgactgcgatcgggaacgacaccgccaacagggtctgggagtccgatactcgcggacgcgcaaagccttccagagattcgagccgcgaagaaagggagtcttggatccgtgccaagtacgaacagctgttgtttctggccccgctttccaccagcgaagaacccttagggcgccagctttgggctgctgtacaggcacaagacgtggccacggtactcttactactggcccacgcgaggcatggacctttggacacctctgtggaagacccccaactgcgatcgcctctgcatttagcggcggaactagctcacgtggtcattacgcagcttctgctgtggtatggcgccgacgtggcagcaagagatgcccaggggaggaccgcccttttctatgcgcgccaggccgggtcgcagctatgcgcagacattctgctgcaacatggttgtcctggagagggtggtagtgcagcaacaactccatcagcagctacaaccccatccataacagccacaccaagtcccagaaggagaagttccgccgcatcggtcggaagggctgatgcacctgtagcacttgtgtag

SEQ ID NO: 182117 - DNA, 2511 bp, Artificial Sequence
  derived and/or modified sequence
atgcacgcccagaggcagtttgtggtggccgctgtgcgggcagaggtgagaagacatgaggtggccaagcaggccctgaaccggctgaggaagctggccgagcgggtggatgatcctgagctgcaggacagcatccaggccagcctggacagcatccgggaggccgtcatcaacagccaggagtggaccctgagccgcagcatccctgagctgcggctgggcgtgctgggagatgcccggagcggcaagagcagcctcatccaccgcttcctgaccggcagctaccaggtgctggagaagacagaaagtgagcagtacaagaaggagatgctggtggatggccagacccacctggtgctgatccgggaggaggccggggccccagatgccaagttcagcggctgggcagatgctgtgatctttgtgttcagcctggaggatgagaacagcttccaggccgtgtcccggctgcacggccagctgagcagcctgcggggggagggccggggcggcctggccctggccctggtgggcacccaggaccgcatcagcgccagcagcccccgggtggtgggagatgcccgggcccgggccctgtgtgccgacatgaagcgctgcagctactatgagacctgtgccacctacggcctgaatgtggacagagtcttccaggaggtggcccagaaggtggtgaccctgaggaagcagcagcagctgctggccgcctgcaagagcctgcccagcagccccagccacagcgctgccagcacccctgtggccggccaggccagcaatggaggccacaccagtgactacagcagcagcctgcccagcagccccaacgtgggccaccgggagctgcgggcagaggccgctgctgtggccggcctgagcaccccaggcagcctgcaccgggccgccaagaggaggaccagcctgtttgccaacagaagaggaagtgacagcgagaagaggagcctggacagcagaggagagaccaccggcagcggccgggccatccccatcaagcagagcttcctgctgaagaggagcggcaacagcctgaacaaggagtggaagaagaagtatgtgaccctgagcagcaatggcttcctgctgtaccaccccagcatcaatgactacatccacagcacccacggcaaggagatggacctgctgcggaccaccgtgaaggtgcctgggaagaggcctccccgggccatcagcgccttcggccccagcgccagcatcaatggcctggtgaaggacatgagcacagtgcagatgggagagggcctggaggccaccacccccatgcccagccccagccccagccccagcagcctgcagcccccaccagaccagaccagcaagcacctgctgaagccagacaggaacctggcccgggccctgagcacagactgcacccccagcggggacctgagccccctgagccgggagcccccacccagccccatggtgaagaagcagaggaggaagaagctgaccacccccagcaagacagagggcagcgctggccaggccgaggaggagaactttgagttcctgattgtgagcagcacaggccagacctggcactttgaggccgccagctttgaggagagagatgcctgggtgcaggccatcgagagccagatcctggccagcctgcagtgctgtgagagcagcaaggtgaagctgaggacagacagccagagcgaggccgtggccatccaggccatcagaaatgccaagggcaacagcatctgtgtggactgtggggcccccaaccccacctgggccagcctgaacctgggcgccctgatctgcatcgagtgcagcggcatccacaggaacctgggcacccacctgagccgggtgcgcagcctggacctggatgactggccccgggagctgaccctggtgctgacagccatcggaaatgacacagccaacagagtgtgggagagtgacacccggggccgggccaagcccagccgggacagcagccgggaggagcgggagagctggatccgggccaagtatgagcagctgctcttcctggcccccctgagcaccagcgaggagcccctgggccggcagctgtgggccgctgtgcaggcccaggatgtggccaccgtgctgctgctgctggcccacgcccggcacggccccctggacacctctgtggaggacccccagctgcggagccccctgcacctggccgctgagctggcccacgtggtgatcacccagctgctgctgtggtatggagcagatgtggccgccagagatgcccagggccgcacagccctcttctacgcccggcaggccggcagccagctgtgtgccgacatcctgctgcagcacggctgccctggagagggcggcagcgctgccaccacccccagcgctgccaccacccccagcatcacagccacccccagccccaggagaagaagcagcgctgcctctgtgggccgggcagatgcccctgtggccctggtgtag

SEQ ID NO: 182118 - DNA, 2511 bp, Artificial Sequence
  derived and/or modified sequence
atgcacgcccagcggcagttcgtggtggccgccgtgcgggccgaggtgcgtcgccacgaagtggcaaagcaggctcttaaccggttgcggaagctcgcagagcgggtggacgatcccgaactgcaggactcaatacaggctagtttggatagcattagagaagctgtcattaactcacaggaatggactctctccagaagcattcccgagctccgtctgggggtacttggggatgctcgctccgggaagtcctctcttattcacagattcttaaccggtagttatcaagtcctagaaaagacagaatccgaacagtacaagaaagaaatgctggttgatggccagacacatctcgtgctgatcagagaagaagccggagcgcctgacgctaaattttcaggctgggctgacgctgtgattttcgtgttttcgctcgaggatgaaaacagcttccaggccgtgtctcggcttcacggtcaactctcttccttaagaggggaaggccggggagggctggcactggccctggttggaacccaggacaggatcagtgcgtcctcgccaagagtggtgggcgacgcgcgcgctagagccctctgcgccgatatgaaacgctgctcttactacgagacttgtgccacttacggccttaatgtcgacagagtgtttcaggaggtggcacaaaaggttgtaacactccggaagcaacagcaactgctggcggcctgtaaaagtttgccgagcagtccgtcacactctgcggcttcgacgccagtggccgggcaggcaagtaatggcggacacacatctgactattcctcatcacttccctcttccccaaatgtgggtcacagggagctgcgcgcggaagctgcagcagtagcaggcttgtctacccctggttccctacaccgggctgcaaaaagacgcacctcactcttcgccaataggagaggctcagatagtgagaaacgctctctggattcacggggcgagacaacaggctcaggcagggcgatacccattaagcagagctttttactgaagaggagcggcaattccctcaacaaagaatggaaaaagaagtacgtcaccttgtccagtaatggatttttactgtatcacccgtcaatcaacgactatatccacagtactcacgggaaggagatggacctgctgaggaccaccgtaaaagtaccagggaagcgccccccccgggcgatttccgctttcggaccctctgcttcaattaacggccttgtaaaggacatgagcaccgtgcagatgggggaaggcttggaggccactacaccaatgcctagcccttcaccatcaccatccagtttacagcctccaccggatcagacgagtaagcacctcctaaagcctgatagaaatctggctagggctctgtccaccgactgtacaccctctggagacttatcccccctgtctcgggaaccaccccccagtccgatggttaaaaagcagcggcgtaaaaagcttactactcccagtaagaccgaaggcagcgcagggcaggctgaggaagaaaattttgaattccttatagtgagctctaccggccaaacctggcacttcgaggccgcatcgttcgaggaaagggatgcctgggttcaggctattgaatcgcagatactcgcttccctgcagtgttgcgaatcttcaaaagttaagctccggacagactcacagagcgaggccgtcgctatacaggcgatccgcaacgcaaagggcaattccatttgtgtggattgcggcgcccctaaccctacctgggcgtcattaaatctgggcgccctgatttgtatcgagtgttctgggattcacaggaatcttggtacgcatctgtcacgagtgagatcactggacctcgatgattggccccgagaactcacgctggtgttaaccgcgatagggaatgatactgcaaatagagtatgggagtcagacactcggggcagagcgaaaccgagcagggacagctctagggaggaacgcgaatcttggatccgggccaagtatgaacagctgctctttctagctcctctgagtacaagcgaggagcctttaggccgccagctttgggcagctgtacaggcacaggacgttgccacagttctactactcctggcgcacgccagacatggccctctggacacctccgtcgaggaccctcagctgcggtcacccctgcatttagccgctgaattggcccacgtggtgataacgcagctgttactatggtatggcgctgatgtcgccgctcgcgatgcacagggacgtacggccctcttttacgctcggcaggcagggtcacagctttgtgccgatatccttcttcagcacggatgccctggagaagggggatccgctgcaacaacccccagcgctgctacaactccttcaattacagccacaccatcaccccggagaagaagttccgcagcctcagttggaagggccgacgcccccgtagccctggtgtag

SEQ ID NO: 182119 - DNA, 2511 bp, Artificial Sequence
  derived and/or modified sequence
atgcacgcccagcgccagtttgttgtggccgctgtgcgggctgaagtccggcgacatgaggtagccaaacaggcacttaataggctcagaaagttagccgagcgtgtggacgacccggagctgcaggactcaatacaggccagtctagacagtattcgggaggccgtcataaattctcaggaatggaccctcagcagatcaatccccgagctaaggttaggcgtgcttggggacgcacgctcagggaagtcttccctgatacacaggtttctgaccggttcctaccaggtgttggaaaaaacagagtccgagcagtataagaaggaaatgctggttgatggccagacccacctcgtcctgatccgggaggaagcaggtgcccctgatgcaaagttcagcggttgggccgatgctgttatcttcgtcttttctctcgaggatgagaactcctttcaggctgtgtcaagactgcacggtcagctgtccagcctgcgtggggaggggagggggggtttggccctggcactggttggaacacaagaccggatcagcgcttccagtcctcgggtagtgggagatgccagggcaagggccttgtgtgcagacatgaaaaggtgctcctactacgaaacgtgcgccacctatgggctcaatgtagaccgcgtgtttcaggaagtcgcacaaaaagtggtgactcttcggaagcagcagcaactcctggccgcttgtaagtctctaccgagcagtcctagccattcagccgcatccacccctgttgccggacaggcaagtaatgggggacacacctctgattactcctcatctcttcccagtagtcccaatgtggggcaccgagagctccgtgcagaggcggctgccgttgcgggtctaagcactccgggaagcctgcatagggcagccaagagaaggacatcgttgttcgccaacaggcgtggctccgatagcgaaaagcggtctctagattcaaggggtgaaaccacaggcagtggacgggcaattccaattaaacaatcatttcttctgaaaagatccgggaactcactgaacaaggagtggaagaaaaaatacgtcacgctgtcaagtaatggcttcctcctttaccatccaagtattaatgattatatacattcgacccacgggaaagaaatggacctactgcggactacagtgaaagtgccaggcaagcgcccacccagagccattagtgcttttggtccctcagcgagcattaacgggttggtgaaagacatgagcaccgtacagatgggtgaaggcttggaggcaaccacccccatgccctctccatctccatctcctagctcactccagccaccgccagaccagacatcaaagcacctgctcaagccagatcgtaatctcgcacgagctctttctactgattgcacgccttcaggagacctctcccccctgtcacgcgaaccacctcccagccccatggtgaagaaacagcgcaggaaaaagctgacaaccccaagcaaaacagaggggagcgccggacaggccgaggaagaaaattttgagtttctcattgtgagtagtactgggcagacatggcattttgaagccgctagtttcgaagaacgcgatgcttgggtgcaggctattgaaagccagatccttgcctccctgcagtgttgcgaatcatctaaagtgaagcttaggacagattcacagtccgaggccgtggccatacaggccattcggaatgcgaagggtaatagcatttgtgtcgactgtggtgcacctaaccccacctgggctagcctcaacctgggggcactgatctgcatagagtgttctgggatccatagaaatttggggactcatctgtcaagggtgcggtctctggacttggatgattggccacgggaactgactctggtcctcacagctatagggaacgataccgccaaccgtgtctgggaaagcgatacacggggacgggctaaaccatcccgagattcaagcagagaggagagggagtcttggatccgagcgaagtacgaacagctgcttttcctggctccattgtccacctccgaggaaccactgggtaggcagctgtgggccgcagtccaggcacaggacgtggctactgtcctgctgttattggcccacgcaaggcacggaccattagatacgtcagtggaggacccccagttaagaagtcctcttcacctggctgctgaactcgcacatgtggttatcacgcaactgctgctgtggtacggggcagatgtggccgctcgggatgcacaaggaagaacagcgctgttctatgctcgccaggccggatctcagctctgtgcggatatcctccttcagcacgggtgtcccggtgaggggggttccgcagccactaccccctccgccgcaacgaccccatcaattactgcaacaccttcaccccgacgacgttcttccgcggcaagtgtgggtcgcgctgacgcaccagtggccctggtatag

SEQ ID NO: 182120 - DNA, 3938 bp, Artificial Sequence
  derived and/or modified sequence
ggggccttctgaggtttgggggctgtagggccatgggcctcagggccagaggtggttgttagcctggcaagacaggtctgggcaacatgcatgcccagaggcagttcgttgtagctgcagtgagagcagaagtcagacgacatgaggtggccaagcaggctctaaaccgcctcaggaagctggcagagagggtggacgaccccgaactccaggacagcatccaggcctcattggacagcattcgagaggctgtgatcaatagccaggaatggactttgagccgctccattcctgaactgcgcctgggtgtgctgggcgatgccaggagtgggaagtcatcgctcatccaccgattcctgactggctcataccaggtgctggagaagacagagagtgagcagtacaagaaagaaatgttggtggatggacagacacatctggtgctaatccgagaggaagctggggcacctgatgccaagttctcaggctgggcagatgctgtgatcttcgtcttcagcctggaggatgagaacagtttccaggctgtgagccgtctccatgggcagctgagttcccttcgcggggagggacgaggaggcctggccttggcactggtggggacacaagacaggatcagtgcttcctcccctcgggtggtgggagatgctcgtgccagagctctgtgcgcggacatgaaacgctgcagctactatgagacttgtgcaacctatgggctcaatgtggatcgggtcttccaggaggtggcccagaaggtggtgaccttgcgcaagcagcaacagcttctggctgcctgcaagtccctgcccagctccccaagccactcagctgcatccactccggtagctggccaggctagtaacgggggccacactagcgactactcttcttccctcccgtcctcaccgaatgttggtcaccgggagctccgagccgaggcagctgcagtggctggattgagcaccccagggtccctgcaccgggcagccaagcgcaggaccagcctttttgcgaatcgtcggggtagtgactccgagaaacgaagcttggatagtcggggagagacaacagggagtgggcgagccatccccatcaaacagagcttcctactaaaacgaagtggcaattccttgaacaaagaatggaagaagaaatatgtaaccctgtccagtaatggctttctactctaccaccccagtattaacgattacatccacagtacccacggcaaggagatggacttgctgcgaacaacagtcaaagtcccgggcaagcggcccccgagggccatctctgcctttggcccctcagccagcattaacgggctcgtcaaggacatgagcactgtccagatgggtgaaggcctggaagccactactcccatgccaagccctagccccagccccagttccctgcagccaccaccagatcagacatccaaacacctgctgaagccagaccggaatttggcccgagccctcagcacggactgtaccccatctggagacctgagccccctgagtcgggaaccccctccttctcccatggtgaagaagcagaggaggaaaaaattgacaacaccatccaagactgaaggctcggctgggcaggctgaagaggaaaactttgagttcctgatcgtgtccagcacgggtcagacgtggcactttgaggcagccagttttgaggagcgggatgcctgggtccaggccatcgagagtcagatcctagccagtctgcaatgctgtgagagcagcaaggtcaagctgcgcacagacagccaaagcgaggccgtggccatccaggcgatccggaacgccaaggggaattcaatctgcgtggactgcggggcccccaaccccacgtgggccagcttgaacctgggcgccctcatctgcatcgagtgttctggcatccaccgcaacctgggcacacacctgtcccgcgttcgctcgctggacttggacgactggccacgggagctgaccctggtgctgacggctattggcaacgacacggccaaccgcgtgtgggaaagcgacacgcgaggccgtgccaagccctcgcgggactcttcgcgggaggagcgcgagtcgtggattcgcgccaagtacgagcagctactgttcctggcgccgctgagcacctcggaggagccgctgggccgccagctgtgggccgccgtgcaggcccaggacgtggctaccgttctcctgcttttggcccatgcgcgacacgggccgctcgacaccagcgtagaggacccacagctgcgctccccactccacctggcggccgagctcgcccacgtcgtcatcacgcaactgctgctgtggtacggcgcggacgtggcggcccgtgacgcccagggccgcacggcgctgttctacgcccgccaggctggaagccagctgtgcgccgacatccttctccagcacggctgcccgggtgagggcggcagcgcggccaccacgcccagcgcggccaccacgcccagcatcaccgccacgcccagcccccgccgccggagcagcgccgctagcgtgggccgcgccgacgccccggttgcgctggtatagttgcccagcgggagagacacccccatccccacgcgggccgggcacgaccacaccgggcggaccgctggacagacgcacccactcacctctccgatccgcaccccgccccacgggagcacttcctacccccacgagggcacagcccccacgccttccagaagacacaaactcacctccctctccccaacgaggcatggagaccccagctcaacacgccccctctccattgtttccacactcggattgctctgggtctacccgctcggggttcgcggaaggggaggtccccagcggtacgggctcctaggcgcttggacatgcccgcttgtgccccctaggggcggaaagaagacccggtcctgcccgagctcaacaatcccagggcgggagcccatacccaggctggctcctggggcgacgccacgccagagggagggtttagtacatgggagggctagccccgggacttggggccaatacggaaaccctaccccttccatgctcatctcactgcccagtgaagggggcaagggcagcgaggggcaggacccctgctgctcatgggggtgggggttcccaaccctttccgtgaaagggaccgtgagtagtggaaaccaggacgtcccctacacctacccatgggtggaagctaaagagtccggggggaaccaagagcctgggtccctcccactactatcttgggagggagaagggatggagcaggagcgggctaagagggctgcgggggccttgtaatttattgctttgttccccaacatggggatgggggcgggcaggggcgtggggagggcgttttggggtaggggaagcccagggtgggcagggggtgggttggggtgggggtgctctcgggttgtgtctgtgaccgtgactgcgtacctgtgactgtgcagcgcccgtggtgatctggggtagggggcacccctacagtgggacccctcccccattattctttctgtccagcccctccctcccactggagcagctccagagccattcctcacccccgtgacctctcccagccagggctgagaggattcgaggtggctgggagggtttccaggccccctgccccttccccacaaactgggtgatagggcggacttacctggcccagccctgcctccctcagccaacccagcccttgggctgtctgtgtcagtggtttccggtctttttttttttttttttttctggctaaaatagtttgcaaaggaccaggtaattggggaggggagagaggtgggggcaagggggaaatgcccccccatctccttggaggcagtggtgtgaatcttcttcaacagcaattaaagagga

SEQ ID NO: 182121 - DNA, 2511 bp, Artificial Sequence
  derived and/or modified sequence
atgcacgcccagagacagttcgtggtggccgccgtgagagccgaggtgagaagacacgaggtggccaagcaggccctgaacagactgagaaagctggccgagagagtggacgaccccgagctgcaggacagcatccaggccagcctggacagcatcagagaggccgtgatcaacagccaggagtggaccctgagcagaagcatccccgagctgagactgggcgtgctgggcgacgccagaagcggcaagagcagcctgatccacagattcctgaccggcagctaccaggtgctggagaagaccgagagcgagcagtacaagaaggagatgctggtggacggccagacccacctggtgctgatcagagaggaggccggcgcccccgacgccaagttcagcggctgggccgacgccgtgatcttcgtgttcagcctggaggacgagaacagcttccaggccgtgagcagactgcacggccagctgagcagcctgagaggcgagggcagaggcggcctggccctggccctggtgggcacccaggacagaatcagcgccagcagccccagagtggtgggcgacgccagagccagagccctgtgcgccgacatgaagagatgcagctactacgagacctgcgccacctacggcctgaacgtggacagagtgttccaggaggtggcccagaaggtggtgaccctgagaaagcagcagcagctgctggccgcctgcaagagcctgcccagcagccccagccacagcgccgccagcacccccgtggccggccaggccagcaacggcggccacaccagcgactacagcagcagcctgcccagcagccccaacgtgggccacagagagctgagagccgaggccgccgccgtggccggcctgagcacccccggcagcctgcacagagccgccaagagaagaaccagcctgttcgccaacagaagaggcagcgacagcgagaagagaagcctggacagcagaggcgagaccaccggcagcggcagagccatccccatcaagcagagcttcctgctgaagagaagcggcaacagcctgaacaaggagtggaagaagaagtacgtgaccctgagcagcaacggcttcctgctgtaccaccccagcatcaacgactacatccacagcacccacggcaaggagatggacctgctgagaaccaccgtgaaggtgcccggcaagagaccccccagagccatcagcgccttcggccccagcgccagcatcaacggcctggtgaaggacatgagcaccgtgcagatgggcgagggcctggaggccaccacccccatgcccagccccagccccagccccagcagcctgcagcccccccccgaccagaccagcaagcacctgctgaagcccgacagaaacctggccagagccctgagcaccgactgcacccccagcggcgacctgagccccctgagcagagagcccccccccagccccatggtgaagaagcagagaagaaagaagctgaccacccccagcaagaccgagggcagcgccggccaggccgaggaggagaacttcgagttcctgatcgtgagcagcaccggccagacctggcacttcgaggccgccagcttcgaggagagagacgcctgggtgcaggccatcgagagccagatcctggccagcctgcagtgctgcgagagcagcaaggtgaagctgagaaccgacagccagagcgaggccgtggccatccaggccatcagaaacgccaagggcaacagcatctgcgtggactgcggcgcccccaaccccacctgggccagcctgaacctgggcgccctgatctgcatcgagtgcagcggcatccacagaaacctgggcacccacctgagcagagtgagaagcctggacctggacgactggcccagagagctgaccctggtgctgaccgccatcggcaacgacaccgccaacagagtgtgggagagcgacaccagaggcagagccaagcccagcagagacagcagcagagaggagagagagagctggatcagagccaagtacgagcagctgctgttcctggcccccctgagcaccagcgaggagcccctgggcagacagctgtgggccgccgtgcaggcccaggacgtggccaccgtgctgctgctgctggcccacgccagacacggccccctggacaccagcgtggaggacccccagctgagaagccccctgcacctggccgccgagctggcccacgtggtgatcacccagctgctgctgtggtacggcgccgacgtggccgccagagacgcccagggcagaaccgccctgttctacgccagacaggccggcagccagctgtgcgccgacatcctgctgcagcacggctgccccggcgagggcggcagcgccgccaccacccccagcgccgccaccacccccagcatcaccgccacccccagccccagaagaagaagcagcgccgccagcgtgggcagagccgacgcccccgtggccctggtgtag

SEQ ID NO: 182122 - protein, 1001 aa, Artificial Sequence
  derived and/or modified sequence
MSGPGNKRAAGDGGSGPPEKKLSREEKTTTTLIEPIRLGGISSTEEMDLKVLQFKNKKLAERLEQRQACEDELRERIEKLEKRQATDDATLLIVNRYWAQLDETVEALLRCHESQGELSSAPEAPGTQEGPTCDGTPLPEPGTSELRDPLLMQLRPPLSEPALAFVVALGASSSEEVELELQGRMEFSKAAVSRVVEASDRLQRRVEELCQRVYSRGDSEPLSEAAQAHTRELGRENRRLQDLATQLQEKHHRISLEYSELQDKVTSAETKVLEMETTVEDLQWDIEKLRKREQKLNKHLAEALEQLNSGYYVSGSSSGFQGGQITLSMQKFEMLNAELEENQELANSRMAELEKLQAELQGAVRTNERLKVALRSLPEEVVRETGEYRMLQAQFSLLYNESLQVKTQLDEARGLLLATKNSHLRHIEHMESDELGLQKKLRTEVIQLEDTLAQVRKEYEMLRIEFEQNLAANEQAGPINREMRHLISSLQNHNHQLKGDAQRYKRKLREVQAEIGKLRAQASGSAHSTPNLGHPEDSGVSAPAPGKEEGGPGPVSTPDNRKEMAPVPGTTTTTTSVKKEELVPSEEDFQGITPGAQGPSSRGREPEARPKRELQEREGPSLGPPPVASALSRADREKAKVEETKRKESELLKGLRAELKKAQESQKEMKLLLDMYKSAPKEQRDKVQLMAAERKAKAEVDELRSRIRELEERDRRESKKIADEDALRRIRQAEEQIEHLQRKLGATKQEEEALLSEMDVTGQAFEDMQEQNGRLLQQLREKDDANFKLMSERIKANQIHKLLREEKDELGEQVLGLKSQVDAQLLTVQKLEEKERALQGSLGGVEKELTLRSQALELNKRKAVEAAQLAEDLKVQLEHVQTRLREIQPCLAESRAAREKESFNLKRAQEDISRLRRKLEKQRKVEVYADADEILQEEIKEYKARLTCPCCNTRKKDAVLTKCFHVFCFECVRGRYEARQRKCPKCNAAFGAHDFHRIYIS

SEQ ID NO: 182123 - protein, 693 aa, Artificial Sequence
  derived and/or modified sequence
MSGPGNKRAAGDGGSGPPEKKLSREEKTTTTLIEPIRLGGISSTEEMDLKVLQFKNKKLAERLEQRQACEDELRERIEKLEKRQAQFSLLYNESLQVKTQLDEARGLLLATKNSHLRHIEHMESDELGLQKKLRTEVIQLEDTLAQVRKEYEMLRIEFEQNLAANEQAGPINREMRHLISSLQNHNHQLKGDAQRYKRKLREVQAEIGKLRAQASGSAHSTPNLGHPEDSGVSAPAPGKEEGGPGPVSTPDNRKEMAPVPGTTTTTTSVKKEELVPSEEDFQGITPGAQGPSSRGREPEARPKRELQEREGPSLGPPPVASALSRADREKAKVEETKRKESELLKGLRAELKKAQESQKEMKLLLDMYKSAPKEQRDKVQLMAAERKAKAEVDELRSRIRELEERDRRESKKIADEDALRRIRQAEEQIEHLQRKLGATKQEEEALLSEMDVTGQAFEDMQEQNGRLLQQLREKDDANFKLMSERIKANQIHKLLREEKDELGEQVLGLKSQVDAQLLTVQKLEEKERALQGSLGGVEKELTLRSQALELNKRKAVEAAQLAEDLKVQLEHVQTRLREIQPCLAESRAAREKESFNLKRAQEDISRLRRKLEKQRKVEVYADADEILQEEIKEYKARLTCPCCNTRKKDAVLTKCFHVFCFECVRGRYEARQRKCPKCNAAFGAHDFHRIYIS

SEQ ID NO: 182124 - protein, 230 aa, Artificial Sequence
  derived and/or modified sequence
MQLRPPLSEPALAFVVALGASSSEEVELELQGRMEFSKAAVSRVVEASDRLQRRVEELCQRVYSRGDSEPLSEAAQAHTRELGRENRRLQDLATQLQEKHHRISLEYSELQDKVTSAETKVLEMETTVEDLQWDIEKLRKREQKLNKHLAEALEQLNSGYYVSGSSSGFQGGQITLSMQKFEMLNAELEENQELANSRMAELEKLQAELQGAVRTNFQSFQLEELPPDTL

SEQ ID NO: 182125 - DNA, 3006 bp, Artificial Sequence
  derived and/or modified sequence
atgagcggccccggcaacaagagagccgccggcgacggcggcagcggcccccccgagaagaagctgagcagagaggagaagaccaccaccaccctgatcgagcccatcagactgggcggcatcagcagcaccgaggagatggacctgaaggtgctgcagttcaagaacaagaagctggccgagagactggagcagagacaggcctgcgaggacgagctgagagagagaatcgagaagctggagaagagacaggccaccgacgacgccaccctgctgatcgtgaacagatactgggcccagctggacgagaccgtggaggccctgctgagatgccacgagagccagggcgagctgagcagcgcccccgaggcccccggcacccaggagggccccacctgcgacggcacccccctgcccgagcccggcaccagcgagctgagagaccccctgctgatgcagctgagaccccccctgagcgagcccgccctggccttcgtggtggccctgggcgccagcagcagcgaggaggtggagctggagctgcagggcagaatggagttcagcaaggccgccgtgagcagagtggtggaggccagcgacagactgcagagaagagtggaggagctgtgccagagagtgtacagcagaggcgacagcgagcccctgagcgaggccgcccaggcccacaccagagagctgggcagagagaacagaagactgcaggacctggccacccagctgcaggagaagcaccacagaatcagcctggagtacagcgagctgcaggacaaggtgaccagcgccgagaccaaggtgctggagatggagaccaccgtggaggacctgcagtgggacatcgagaagctgagaaagagagagcagaagctgaacaagcacctggccgaggccctggagcagctgaacagcggctactacgtgagcggcagcagcagcggcttccagggcggccagatcaccctgagcatgcagaagttcgagatgctgaacgccgagctggaggagaaccaggagctggccaacagcagaatggccgagctggagaagctgcaggccgagctgcagggcgccgtgagaaccaacgagagactgaaggtggccctgagaagcctgcccgaggaggtggtgagagagaccggcgagtacagaatgctgcaggcccagttcagcctgctgtacaacgagagcctgcaggtgaagacccagctggacgaggccagaggcctgctgctggccaccaagaacagccacctgagacacatcgagcacatggagagcgacgagctgggcctgcagaagaagctgagaaccgaggtgatccagctggaggacaccctggcccaggtgagaaaggagtacgagatgctgagaatcgagttcgagcagaacctggccgccaacgagcaggccggccccatcaacagagagatgagacacctgatcagcagcctgcagaaccacaaccaccagctgaagggcgacgcccagagatacaagagaaagctgagagaggtgcaggccgagatcggcaagctgagagcccaggccagcggcagcgcccacagcacccccaacctgggccaccccgaggacagcggcgtgagcgcccccgcccccggcaaggaggagggcggccccggccccgtgagcacccccgacaacagaaaggagatggcccccgtgcccggcaccaccaccaccaccaccagcgtgaagaaggaggagctggtgcccagcgaggaggacttccagggcatcacccccggcgcccagggccccagcagcagaggcagagagcccgaggccagacccaagagagagctgcaggagagagagggccccagcctgggccccccccccgtggccagcgccctgagcagagccgacagagagaaggccaaggtggaggagaccaagagaaaggagagcgagctgctgaagggcctgagagccgagctgaagaaggcccaggagagccagaaggagatgaagctgctgctggacatgtacaagagcgcccccaaggagcagagagacaaggtgcagctgatggccgccgagagaaaggccaaggccgaggtggacgagctgagaagcagaatcagagagctggaggagagagacagaagagagagcaagaagatcgccgacgaggacgccctgagaagaatcagacaggccgaggagcagatcgagcacctgcagagaaagctgggcgccaccaagcaggaggaggaggccctgctgagcgagatggacgtgaccggccaggccttcgaggacatgcaggagcagaacggcagactgctgcagcagctgagagagaaggacgacgccaacttcaagctgatgagcgagagaatcaaggccaaccagatccacaagctgctgagagaggagaaggacgagctgggcgagcaggtgctgggcctgaagagccaggtggacgcccagctgctgaccgtgcagaagctggaggagaaggagagagccctgcagggcagcctgggcggcgtggagaaggagctgaccctgagaagccaggccctggagctgaacaagagaaaggccgtggaggccgcccagctggccgaggacctgaaggtgcagctggagcacgtgcagaccagactgagagagatccagccctgcctggccgagagcagagccgccagagagaaggagagcttcaacctgaagagagcccaggaggacatcagcagactgagaagaaagctggagaagcagagaaaggtggaggtgtacgccgacgccgacgagatcctgcaggaggagatcaaggagtacaaggccagactgacctgcccctgctgcaacaccagaaagaaggacgccgtgctgaccaagtgcttccacgtgttctgcttcgagtgcgtgagaggcagatacgaggccagacagagaaagtgccccaagtgcaacgccgccttcggcgcccacgacttccacagaatctacatcagctag

SEQ ID NO: 182126 - DNA, 2082 bp, Artificial Sequence
  derived and/or modified sequence
atgagcggccccggcaacaagagagccgccggcgacggcggcagcggcccccccgagaagaagctgagcagagaggagaagaccaccaccaccctgatcgagcccatcagactgggcggcatcagcagcaccgaggagatggacctgaaggtgctgcagttcaagaacaagaagctggccgagagactggagcagagacaggcctgcgaggacgagctgagagagagaatcgagaagctggagaagagacaggcccagttcagcctgctgtacaacgagagcctgcaggtgaagacccagctggacgaggccagaggcctgctgctggccaccaagaacagccacctgagacacatcgagcacatggagagcgacgagctgggcctgcagaagaagctgagaaccgaggtgatccagctggaggacaccctggcccaggtgagaaaggagtacgagatgctgagaatcgagttcgagcagaacctggccgccaacgagcaggccggccccatcaacagagagatgagacacctgatcagcagcctgcagaaccacaaccaccagctgaagggcgacgcccagagatacaagagaaagctgagagaggtgcaggccgagatcggcaagctgagagcccaggccagcggcagcgcccacagcacccccaacctgggccaccccgaggacagcggcgtgagcgcccccgcccccggcaaggaggagggcggccccggccccgtgagcacccccgacaacagaaaggagatggcccccgtgcccggcaccaccaccaccaccaccagcgtgaagaaggaggagctggtgcccagcgaggaggacttccagggcatcacccccggcgcccagggccccagcagcagaggcagagagcccgaggccagacccaagagagagctgcaggagagagagggccccagcctgggccccccccccgtggccagcgccctgagcagagccgacagagagaaggccaaggtggaggagaccaagagaaaggagagcgagctgctgaagggcctgagagccgagctgaagaaggcccaggagagccagaaggagatgaagctgctgctggacatgtacaagagcgcccccaaggagcagagagacaaggtgcagctgatggccgccgagagaaaggccaaggccgaggtggacgagctgagaagcagaatcagagagctggaggagagagacagaagagagagcaagaagatcgccgacgaggacgccctgagaagaatcagacaggccgaggagcagatcgagcacctgcagagaaagctgggcgccaccaagcaggaggaggaggccctgctgagcgagatggacgtgaccggccaggccttcgaggacatgcaggagcagaacggcagactgctgcagcagctgagagagaaggacgacgccaacttcaagctgatgagcgagagaatcaaggccaaccagatccacaagctgctgagagaggagaaggacgagctgggcgagcaggtgctgggcctgaagagccaggtggacgcccagctgctgaccgtgcagaagctggaggagaaggagagagccctgcagggcagcctgggcggcgtggagaaggagctgaccctgagaagccaggccctggagctgaacaagagaaaggccgtggaggccgcccagctggccgaggacctgaaggtgcagctggagcacgtgcagaccagactgagagagatccagccctgcctggccgagagcagagccgccagagagaaggagagcttcaacctgaagagagcccaggaggacatcagcagactgagaagaaagctggagaagcagagaaaggtggaggtgtacgccgacgccgacgagatcctgcaggaggagatcaaggagtacaaggccagactgacctgcccctgctgcaacaccagaaagaaggacgccgtgctgaccaagtgcttccacgtgttctgcttcgagtgcgtgagaggcagatacgaggccagacagagaaagtgccccaagtgcaacgccgccttcggcgcccacgacttccacagaatctacatcagctag

SEQ ID NO: 182127 - DNA, 3006 bp, Artificial Sequence
  derived and/or modified sequence
atgagcggtccgggcaacaagagagccgccggtgacggggggtccgggcccccagaaaagaagctttcccgagaggaaaagacaaccaccactttgatcgagcccataagactgggcgggatttcttcaaccgaagagatggatctcaaagttctgcagtttaagaataaaaagttagccgaaaggctcgagcaaaggcaggcgtgcgaagatgagcttcgggaacgcatcgagaaactggagaagcggcaggccactgatgacgccaccctgcttatagtgaaccgttactgggcccagcttgacgaaacagttgaggccttgctcagatgtcatgaatcccagggtgagctcagtagcgctcctgaagcacccggcacgcaggaggggccaacttgtgacggtacccctctcccagagcccggcacttccgaactgcgcgacccattgctcatgcaactccggcctcctctcagcgagccagcactggctttcgtggttgcccttggcgcctccagtagcgaggaggtcgaattggagttgcagggacgcatggaatttagcaaggccgctgtaagtcgcgttgtggaggcttctgacaggttgcagcgaagagttgaggaattgtgtcagagggtctactcacgtggggactccgagcctttgtccgaggccgctcaggctcacacccgcgagttgggccgcgaaaaccgaagactgcaggacctggctacccagctgcaggagaagcaccacaggatctctctggagtatagcgagctccaagacaaggtgacatcagctgagacaaaagtgttggagatggagaccaccgtggaagatctgcagtgggatattgagaagctgcggaagagggaacagaagttaaataaacatcttgctgaagcactggagcagctcaatagcggatattatgttagcgggagttcttctggcttccaggggggccagatcaccctttctatgcaaaagtttgaaatgctgaacgccgagctggaggaaaaccaggagctcgcaaattcgcgaatggcagagctcgagaagctgcaggcagagttgcagggggccgttcgcactaatgaaagactgaaagtagctctcagatcactgccagaggaggtggtgcgagagaccggcgaatataggatgctgcaagcacagttttccttactctataacgaatctctgcaggtaaaaacccaactggacgaggcccgcggcctattactcgcgacaaaaaactcgcaccttcggcacatcgaacacatggagtccgacgagctgggcctccagaagaagctccggaccgaagtcatccagctcgaagatacactagcccaggtgagaaaagagtatgagatgctgcgcatcgagtttgagcagaacctggccgccaatgaacaggcagggccaataaatagggaaatgcgtcacttgatctcctccttgcagaatcacaaccatcagttgaaaggagacgcccaaaggtataaaaggaaactccgggaggtgcaggccgaaattggcaaactcagggcacaggcctccggctcagctcattctacccccaacctcgggcaccccgaagatagcggagtatcagccccagccccaggcaaggaagaaggggggcctggtcccgtgtccactcctgataaccgcaaggagatggccccagtgccaggcactaccaccactaccacctccgttaaaaaagaggaactcgtcccttctgaggaggacttccaggggattacaccgggcgcccaaggtcccagtagtcggggccgcgaaccagaggcccggcctaagcgtgagctgcaggagcgtgaaggaccctctctgggcccaccccccgtggcctcagccctgagtagagcagatcgtgagaaagcgaaggtagaagaaactaaacggaaggagagtgagctcctcaaaggactgcgcgccgaattaaaaaaggcccaggagtctcaaaaagaaatgaaacttctcctcgacatgtacaaatctgcaccaaaagaacagagggacaaggttcaactgatggctgccgagcgcaaagcgaaggcagaagtcgatgaactgcgttccaggatcagagaactcgaggaaagggatcggcgcgagtcgaagaaaatcgcagacgaggatgctctcagacggattcggcaggccgaagaacaaatcgaacatctgcagaggaagctcggagcaacaaagcaggaagaggaggccttgctcagtgagatggacgtgaccggccaggcttttgaggatatgcaggaacaaaacggcagactgctgcaacaattgagggagaaagatgatgccaattttaagctcatgtcggaaaggatcaaggccaatcagattcacaaactgctgcgcgaagagaaagacgaactgggggagcaagtgttggggttgaaaagccaggtcgacgctcagctgctgacagtgcagaagctcgaggagaaagagagagcactgcagggttctctcggtggggtagaaaaagagctgactttgcgatctcaggcccttgaactcaacaaacgaaaagcggtggaggcggcccagcttgccgaggatctgaaggtccagctggaacacgtgcaaacccgacttcgcgaaattcagccttgcctcgccgaaagtcgagctgcgcgagagaaggagtctttcaacttaaaaagggcacaggaagacatatcgcggctgcgacgcaagctggaaaagcaaaggaaggtggaggtctacgcagacgctgatgaaatcctgcaggaagagattaaggaatacaaagcacggttgacatgtccatgttgcaatacccgaaagaaggacgctgtattgactaagtgttttcatgtgttttgcttcgagtgtgtgcgaggccgctacgaggcacgccaacgtaagtgcccaaaatgtaacgccgctttcggcgcacacgatttccaccgtatctacatatcatag

SEQ ID NO: 182128 - DNA, 2082 bp, Artificial Sequence
  derived and/or modified sequence
atgtcaggccctggaaacaagagagctgcaggtgacgggggttccggtccaccagaaaagaaactaagccgcgaggagaaaacaacaactaccttaatagagcctatcagattgggaggcatttccagtaccgaggagatggacctgaaagtgctacagttcaagaacaagaaactggcggagcgcttggagcaacgccaggcttgtgaggatgaactacgggagagaattgagaagctggaaaaaagacaggcccagttttcgctcctatacaatgagtctttgcaggtgaaaacgcaattagacgaggctcgaggtctgttactggccactaagaatagtcatttacgccatattgagcacatggaaagtgatgagctggggctgcagaagaaactccgcaccgaagttatccagcttgaagacacccttgctcaggtgagaaaggagtacgagatgcttaggattgaatttgaacagaacctggccgctaacgaacaggcaggccctattaatcgagaaatgcgtcacctgatctcctcccttcagaaccacaatcaccaattgaagggagatgcccagcggtacaagcgtaagctcagggaggttcaagctgaaattggcaaactaagagcacaggcctcaggatctgctcattccaccccaaacctcggtcaccccgaagatagcggcgtgtccgcccctgctcccgggaaggaagagggtgggcctggtccagttagcacccccgacaatcggaaggagatggcccctgttcctggcactaccacaactacaacctccgtaaaaaaggaagaactggtgccaagtgaggaagactttcagggcattacacccggcgcccaaggtccatcgtcaagaggccgagaaccggaggccagaccaaaacgggagttgcaagaaagagagggcccatcactgggcccacccccagtcgctagcgcattgtctcgagctgatagagagaaagccaaagtggaagagacgaaaaggaaagaaagcgagttgcttaagggccttcgggccgaattgaagaaggcgcaggagtctcagaaggagatgaaactcttgctggacatgtataaatccgcccctaaggagcagcgggataaggttcagctgatggccgctgaaaggaaggccaaagcagaagtggatgaactgaggagcaggattcgcgaactcgaggaacgcgaccggagagagagtaagaaaatcgctgatgaagacgctctacgccgcatccgacaagcagaggaacaaatcgagcatctgcagcgtaagctgggtgccaccaaacaggaggaagaggctctgctgtctgaaatggacgttactggccaggcttttgaagatatgcaagagcagaatggtcgccttctccaacagctgcgtgagaaggatgacgccaactttaaactgatgtctgaacgcatcaaagcgaaccaaatccataagctcctccgggaagagaaggatgaattgggcgagcaggtgctgggtctaaagagtcaagtggatgcgcaactacttaccgtacaaaagttagaggagaaggaacgtgctttgcagggttccctagggggagtcgagaaggagctgacactgcgctcccaggcacttgaactgaacaagcggaaggccgtggaagctgcacagctggccgaagacctcaaggttcagctggaacatgtgcagacgaggttgagggagatacagccatgcctcgctgagagtcgcgcagcgcgggaaaaggagagctttaacctgaagagggctcaagaggatatatcacggctgcggcggaagctagaaaagcagagaaaggtcgaagtgtatgcggacgccgatgaaattctgcaggaggagattaaagagtacaaagctagactgacctgcccctgctgtaatactcgaaaaaaggacgctgtactcactaagtgcttccacgtgttctgcttcgaatgcgttcgcgggaggtacgaggcccgacagcggaaatgcccgaaatgcaacgccgcgttcggggcccacgattttcacagaatttatattagttag

SEQ ID NO: 182129 - DNA, 3006 bp, Artificial Sequence
  derived and/or modified sequence
atgagcggccctggcaacaagagagctgctggagatggcggcagcggccccccagagaagaagctgagccgggaggagaagaccaccaccaccctgattgagcccatccggctgggcggcatcagcagcacagaggagatggacctgaaggtgctgcagttcaagaacaagaagctggccgagcggctggagcagaggcaggcctgtgaagatgagctgcgggagagaattgagaagctggagaagaggcaggccacagatgatgccaccctgctgattgtgaaccgctactgggcccagctggatgagaccgtggaggccctgctgcgctgccacgagagccagggcgagctgagcagcgcccctgaggcccctggcacccaggagggccccacctgtgatggcacccccctgcctgagcccggcaccagcgagctgcgggaccccctgctgatgcagctgcggccccccctgtctgagcccgccctggcctttgtggtggccctgggcgccagcagcagcgaggaggtggagctggagctgcagggccgcatggagttcagcaaggctgctgtgtcccgggtggtggaggccagtgaccggctgcagaggagagtggaggagctgtgccagagggtgtacagcagaggagacagcgagcccctgtctgaggccgcccaggcccacacccgggagctgggccgggagaacagaaggctgcaggacctggccacccagctgcaggagaagcaccaccgcatcagcctggagtacagcgagctgcaggacaaggtgaccagcgctgagaccaaggtgctggagatggagaccaccgtggaggacctgcagtgggacatcgagaagctgaggaagcgggagcagaagctgaacaagcacctggccgaggccctggagcagctgaacagcggctactacgtgtctggcagcagcagcggcttccagggcggccagatcaccctgtccatgcagaagtttgagatgctgaatgctgagctggaggagaaccaggagctggccaacagcaggatggccgagctggagaagctgcaggccgagctgcagggcgctgtgaggaccaatgaaaggctgaaggtggccctgcggagcctgcctgaggaggtggtgcgggagactggagagtacaggatgctgcaggcccagttcagcctgctgtacaatgaaagcctgcaggtgaagacccagctggatgaggcccggggcctgctgctggccaccaagaacagccacctgcggcacatcgagcacatggagagtgatgagctgggcctgcagaagaagctgaggacagaggtgatccagctggaggacaccctggcccaggtgaggaaggagtatgagatgctgcgcatcgagtttgagcagaacctggccgccaatgagcaggccggccccatcaaccgggagatgaggcacctgatcagcagcctgcagaaccacaaccaccagctgaagggagatgcccagcgctacaagaggaagctgcgggaggtgcaggccgagatcggcaagctgcgggcccaggccagcggcagcgcccacagcacccccaacctgggccaccctgaggacagcggcgtgtctgccccagcccctgggaaggaggagggcggccctggccctgtgtccaccccagacaacaggaaggagatggcccctgtgcccggcaccaccaccaccaccacctctgtgaagaaggaggagctggtgcccagcgaggaggacttccagggcatcacccctggggcccagggccccagcagccggggccgggagcctgaggcccggcccaagcgggagctgcaggagcgggagggccccagcctgggccccccacctgtggccagcgccctgagcagagctgaccgggagaaggccaaggtggaggagaccaagaggaaggagagcgagctgctgaagggcctgcgggcagagctgaagaaggcccaggagagccagaaggagatgaagctgctgctggacatgtacaagagcgcccccaaggagcagagggacaaggtgcagctgatggctgctgagaggaaggccaaggccgaggtggatgagctgcggagccgcatccgggagctggaggagcgggacagaagagagagcaagaagattgctgatgaagatgccctgcggcgcatccggcaggccgaggagcagatcgagcacctgcagaggaagctgggcgccaccaagcaggaggaggaggccctgctgtctgagatggatgtgacaggccaggcctttgaggacatgcaggagcagaatggccgcctgctgcagcagctgcgggagaaggatgatgccaacttcaagctgatgtctgagcgcatcaaggccaaccagatccacaagctgctgcgggaggagaaggatgagctgggggagcaggtgctgggcctgaagagccaggtggatgcccagctgctgactgtgcagaagctggaggagaaggagcgggccctgcagggcagcctgggcggcgtggagaaggagctgaccctgcggagccaggccctggagctgaacaagaggaaggctgtggaggccgcccagctggccgaggacctgaaggtgcagctggagcacgtgcagacccggctgcgggagatccagccctgcctggccgagagccgggccgcccgggagaaggagagcttcaacctgaagagggcccaggaggacatcagccggctgcggaggaagctggagaagcagaggaaggtggaggtgtatgcagatgctgatgagatcctgcaggaggagatcaaggagtacaaggcccggctgacctgcccctgctgcaacaccaggaagaaggatgctgtgctgaccaagtgcttccacgtgttctgctttgaatgtgtgcggggccgctatgaggcccggcagaggaagtgccccaagtgcaatgctgccttcggggcccatgacttccaccgcatctacatctcctag

SEQ ID NO: 182130 - DNA, 2082 bp, Artificial Sequence
  derived and/or modified sequence
atgagcggccctggcaacaagagagctgctggagatggcggcagcggccccccagagaagaagctgagccgggaggagaagaccaccaccaccctgattgagcccatccggctgggcggcatcagcagcacagaggagatggacctgaaggtgctgcagttcaagaacaagaagctggccgagcggctggagcagaggcaggcctgtgaagatgagctgcgggagagaattgagaagctggagaagaggcaggcccagttcagcctgctgtacaatgaaagcctgcaggtgaagacccagctggatgaggcccggggcctgctgctggccaccaagaacagccacctgcggcacatcgagcacatggagagtgatgagctgggcctgcagaagaagctgaggacagaggtgatccagctggaggacaccctggcccaggtgaggaaggagtatgagatgctgcgcatcgagtttgagcagaacctggccgccaatgagcaggccggccccatcaaccgggagatgaggcacctgatcagcagcctgcagaaccacaaccaccagctgaagggagatgcccagcgctacaagaggaagctgcgggaggtgcaggccgagatcggcaagctgcgggcccaggccagcggcagcgcccacagcacccccaacctgggccaccctgaggacagcggcgtgtctgccccagcccctgggaaggaggagggcggccctggccctgtgtccaccccagacaacaggaaggagatggcccctgtgcccggcaccaccaccaccaccacctctgtgaagaaggaggagctggtgcccagcgaggaggacttccagggcatcacccctggggcccagggccccagcagccggggccgggagcctgaggcccggcccaagcgggagctgcaggagcgggagggccccagcctgggccccccacctgtggccagcgccctgagcagagctgaccgggagaaggccaaggtggaggagaccaagaggaaggagagcgagctgctgaagggcctgcgggcagagctgaagaaggcccaggagagccagaaggagatgaagctgctgctggacatgtacaagagcgcccccaaggagcagagggacaaggtgcagctgatggctgctgagaggaaggccaaggccgaggtggatgagctgcggagccgcatccgggagctggaggagcgggacagaagagagagcaagaagattgctgatgaagatgccctgcggcgcatccggcaggccgaggagcagatcgagcacctgcagaggaagctgggcgccaccaagcaggaggaggaggccctgctgtctgagatggatgtgacaggccaggcctttgaggacatgcaggagcagaatggccgcctgctgcagcagctgcgggagaaggatgatgccaacttcaagctgatgtctgagcgcatcaaggccaaccagatccacaagctgctgcgggaggagaaggatgagctgggggagcaggtgctgggcctgaagagccaggtggatgcccagctgctgactgtgcagaagctggaggagaaggagcgggccctgcagggcagcctgggcggcgtggagaaggagctgaccctgcggagccaggccctggagctgaacaagaggaaggctgtggaggccgcccagctggccgaggacctgaaggtgcagctggagcacgtgcagacccggctgcgggagatccagccctgcctggccgagagccgggccgcccgggagaaggagagcttcaacctgaagagggcccaggaggacatcagccggctgcggaggaagctggagaagcagaggaaggtggaggtgtatgcagatgctgatgagatcctgcaggaggagatcaaggagtacaaggcccggctgacctgcccctgctgcaacaccaggaagaaggatgctgtgctgaccaagtgcttccacgtgttctgctttgaatgtgtgcggggccgctatgaggcccggcagaggaagtgccccaagtgcaatgctgccttcggggcccatgacttccaccgcatctacatctcctag

SEQ ID NO: 182131 - DNA, 3006 bp, Artificial Sequence
  derived and/or modified sequence
atgagcggccccggcaacaagcgggccgccggcgacggcggcagcggaccacctgaaaagaagctcagcagagaggagaaaactactacaactttgattgaacctattaggcttggaggtatttcttccaccgaggagatggatttaaaagtccttcagttcaagaataaaaaattggccgagaggctcgaacaacggcaagcttgtgaggacgaattgagagagcgcattgagaaactggaaaagcggcaggcgaccgatgatgccacattgctgatcgtcaaccgatattgggcccaacttgacgaaaccgtggaagccctgctgagatgccatgagtctcagggcgaactgtcttctgccccagaggcacctggtactcaagaaggccctacctgcgacggaacccctcttcctgaacctggcacctccgagctgagagacccattactcatgcaattacggccccccttgtcggaaccagcgcttgcctttgtagtggcactgggcgccagctctagtgaggaagtggagttggagcttcaaggcagaatggaattcagcaaggccgctgtgtcaagggtggtagaggcctccgacaggctgcagagacgagtagaagagctatgccagagggtgtactcacgtggcgactccgagccactctccgaagcagcccaggcacacacccgggaactgggtagagagaataggcgtctacaggacctcgccacccagcttcaggagaagcatcacaggatctcactggaatatagcgagctccaagataaggtgactagtgccgagacaaaggtgctcgagatggaaacaacagtcgaagatctccaatgggacatcgagaaactacgcaagcgcgagcagaagctaaataaacatttagcagaggcacttgagcagctgaatagcggctactatgtttccggctctagcagtggattccaaggaggacagataacactaagtatgcaaaaattcgaaatgcttaatgctgagctggaggagaaccaggagttagctaattcaaggatggctgaactcgagaagctccaggccgaactgcagggggcggtgagaacaaatgagaggttgaaggtggctttaagatcgctgcctgaggaggtcgttcgcgaaacaggggagtatagaatgctccaggctcaatttagtttgctatacaatgaaagtctccaggttaaaacccagctagacgaagctagggggttgctgctggcaacgaagaatagtcacctgcgacatatcgaacacatggaatctgacgagcttggactgcagaaaaagctccggaccgaggtgattcagttggaggacaccctcgcccaggttaggaaggagtatgagatgctcaggattgagtttgaacaaaatcttgcagccaatgagcaggccgggccaatcaaccgtgagatgagacaccttattagtagcctgcaaaatcataaccatcagctgaagggagacgcccaaagatataagcggaagctccgcgaggtgcaagcagaaatagggaaactgagggcacaggctagtgggtcggcccactctacacccaaccttggacacccagaagactctggtgtctccgcacctgctccaggaaaagaggagggcggacctgggcccgtgagtactcccgataatcggaaggagatggcccccgtaccggggacaacaaccacaaccacaagcgtcaagaaagaagaactcgtgccctccgaagaggactttcagggcattacacctggcgctcaaggaccgtcatcacgtggtcgtgagcccgaagcccgtcctaaaagggagctgcaagagcgcgagggcccatccttgggcccacccccggtcgccagcgccctctctcgggcagatagggagaaggccaaagtggaggaaacaaaacgaaaagagagcgagttactgaagggcctgcgagctgaactgaagaaagcccaggaatcccagaaggaaatgaagctcctcttggacatgtataagagtgctcccaaggagcaaagggataaggtgcaactaatggcagccgagcgcaaggcgaaggcggaagtggatgagttgagatcgcggatacgggagttggaggaaagggacagacgcgagtcaaagaaaatcgctgacgaggacgcgctacgtcgcattaggcaggccgaggagcagattgagcatctgcaacggaaacttggagccacaaaacaggaagaagaggctttgttatctgaaatggatgtaactggtcaggcctttgaagacatgcaggagcagaacggtcgcctgctccagcagttgcgggaaaaagacgatgccaacttcaagttgatgtccgagcggatcaaagcgaaccagattcacaaactactcagggaggaaaaagacgagttgggcgaacaagtccttggactgaagagtcaggtggacgcccagctgttgaccgtacagaaattggaggaaaaggagcgggcactccagggctctctaggtggagtcgagaaggagctgaccctcaggtcccaggctttggaactgaataagcgtaaagccgtggaagccgctcagctcgccgaagacctaaaggttcagttagagcacgttcaaactcggctgcgggaaatccagccctgcctggccgagagccgggcggcccgggagaaggagagctttaatctgaaaagagctcaggaggacattagtagactgcgaagaaaattagaaaagcagaggaaggttgaggtatacgcggacgctgatgaaattctgcaggaggaaatcaaagagtataaggcccgactgacatgtccttgttgcaatacccggaagaaagatgccgtcctgaccaagtgtttccacgtgttctgcttcgaatgcgtgcgcggcagatatgaagctcgacaaagaaagtgtcctaagtgtaacgctgcatttggcgcccacgacttccacagaatctatatatcttag

SEQ ID NO: 182132 - DNA, 2082 bp, Artificial Sequence
  derived and/or modified sequence
atgagcggccccggcaacaagcgggccgccggcgacggcggcagcggtccccctgagaagaagttgtcccgggaagaaaaaaccacaaccacactgatcgagccaatccggctcggggggatatcgagtaccgaggaaatggatctcaaggtcctgcagttcaagaacaagaaactagccgagagactcgaacagagacaagcctgcgaagatgaactgcgggagcggattgagaagctggaaaagcggcaagcacagttcagcctcctgtataacgaaagcttacaggtgaaaacccaactggatgaagcccgaggccttctccttgccacgaagaacagtcacctacggcacatcgaacacatggagagcgacgaactcgggctccaaaagaagctccgcacggaggtcattcaattggaagacactctggcccaggtaaggaaagaatatgagatgctcagaattgaattcgaacaaaacctcgctgctaacgagcaagcaggacccatcaatcgcgagatgcgacatctgattagcagtctgcagaaccataatcatcagctgaaaggggatgctcagcgctacaagagaaaactccgggaagtgcaggcagagatcggcaaactaagggcacaagcgtcagggtcagctcattccacacctaacctcggtcaccccgaagatagtggcgtctcagctcctgcacctgggaaggaagaaggcggccccgggcctgtatcaacccccgataacagaaaagaaatggcccctgtacccggcacaaccaccacgaccaccagcgtgaagaaagaagagctggttccgtctgaagaggactttcagggtattacgccgggggcacagggcccatcatcgagaggtcgtgagccggaggccagacctaagagggagctccaagaaagggaggggccctccctgggcccaccacccgtggcttccgccctgagcagggccgatagagaaaaggcgaaggtggaagagactaaaaggaaagagtcagaattgctcaagggactgcgagcagagcttaagaaggcgcaggaatcccagaaggagatgaagttgttattggatatgtataagagtgcacccaaggaacagcgggacaaggtgcagttgatggctgccgagagaaaggctaaagccgaggtggatgagctgagatctagaatcagggagctagaagaaagagaccgccgagagtccaaaaagatcgccgacgaggatgctctcaggagaatccggcaggccgaggaacagattgaacatctgcagcgcaaactaggagcaaccaaacaggaagaagaagctttactatccgaaatggacgtgactggtcaggcattcgaggatatgcaggagcagaatggtagactgctgcagcaactccgcgagaaagacgacgctaattttaagcttatgagcgagcggatcaaagctaatcagatccataaactgttacgtgaggagaaggacgaactcggtgaacaggtcctgggcctgaaatcccaggtagacgcacagttgctgactgtccaaaaactagaggagaaggagagagcactccaggggagcctggggggggtagaaaaagaactaactttgagaagccaggctctcgagctcaacaaacggaaagcagtagaggcagcccagttggccgaagatctcaaagtgcagctggagcacgtgcagaccagattaagggagattcagccatgtcttgctgagtctagagccgcacgcgagaaagagagcttcaaccttaaacgagcccaggaggatatttctagactacgcagaaagcttgagaaacagaggaaagtagaggtatatgctgacgcggacgaaatcttgcaagaggaaatcaaagaatataaggcacgtctcacatgcccatgctgcaacacccggaagaaggatgccgtactgactaagtgttttcacgtgttttgttttgagtgtgttcgtggacgctatgaggccaggcagagaaaatgccccaagtgtaatgctgctttcggcgcccacgattttcatcggatctacatcagctag

SEQ ID NO: 182133 - DNA, 3006 bp, Artificial Sequence
  derived and/or modified sequence
atgtctggaccagggaacaaacgcgcagctggagacggtggttccggtccacccgagaaaaagttatctagagaagagaagacaacaacgactctcatcgagcccattcgtctcggaggcatctcctcaaccgaggaaatggatctgaaggtgctccagttcaagaacaaaaaattggccgagagactggagcagcgccaggcatgtgaagatgaactgcgggagaggattgagaaattggaaaagagacaggccaccgacgacgcaaccttactgattgttaaccggtactgggcccagctggacgagacggtggaagccctgctgcgttgccatgaatcccaaggagagctgtccagtgcacctgaggcacccggtacccaggaagggccaacctgtgacggtaccccgctccctgagccagggacctctgaactgagagaccctctgctcatgcagctaaggcctcctctttctgagcctgccctggccttcgtagtggccttaggtgcaagctcgagtgaggaagtggagttggaactgcagggcaggatggaattcagcaaggcagccgtaagccgcgtcgttgaggcatcagatcggctgcagcgcagggtagaagaactgtgccagcgggtgtacagcagaggcgattcagagccactcagcgaggcagcccaggcgcatactagggagctgggacgcgaaaataggaggctgcaggatctggccacacagctgcaagaaaagcaccaccggatctccttggaatactcagagctgcaagacaaagtaacatccgcagaaacaaaggtgttggagatggagaccactgttgaagatctccagtgggacatagaaaaattgagaaaaagagaacagaagctcaataagcacctggccgaggctctggagcaattgaactcaggctattacgtctccggatcctctagcggttttcagggtggtcagattactctctctatgcaaaaattcgagatgctcaacgccgaactcgaagaaaatcaagagcttgccaactcacggatggcagaactggagaagctccaagctgaattacaaggtgctgtaaggactaacgagaggctaaaggtggcccttcgctctctgccagaggaagtcgtacgggagactggagagtacaggatgctgcaggcacaattctccctcctctataacgagtccctgcaagtgaaaacacagttagatgaggcaagagggctgctactggccactaagaactcccatttgcgccatatcgaacacatggagtccgacgaactcggtctccagaagaagctccgaacagaggtgattcagctggaagacacactggcacaggtgcggaaggagtatgagatgttacggatagaattcgaacagaatctggcagctaatgaacaggcaggccctataaatagagagatgagacatctcatctcatcattgcagaatcacaaccaccagctgaagggcgacgcgcagcgctataagcgaaagctcagggaggtgcaggctgaaattgggaagctgcgcgctcaggcgtctggttctgcccacagtacaccaaacctgggccaccccgaagactctggggtgtccgctcctgcccctgggaaagaggagggcggtccaggtcccgtatctacacccgataacaggaaggaaatggccccagtacctggtaccacaacaacaacaacaagcgtcaagaaggaggagctggtgcccagcgaagaggatttccaggggatcaccccaggtgcacagggacctagctctcgcggtagggaacctgaggccagacccaaacgagaactacaggagcgagaaggcccttctctgggtccacctcccgtggccagtgccttgtccagagcagatcgggagaaagcaaaggttgaagagaccaaacggaaggaaagtgagcttctcaaaggattacgggcagaactgaaaaaagcccaagagtctcaaaaggaaatgaaactgcttctggacatgtacaagtctgctcctaaggaacaaagggacaaggtccagctaatggccgctgaaaggaaagctaaggcagaggtggacgaacttcggtcccgcatacgagaactggaagagagggatcgtagggaaagtaagaagattgccgatgaagacgcactcagacgcattcgccaagccgaagaacagatagaacacctgcagcgcaaactgggagctactaagcaggaagaagaagcactcctctcagagatggatgtgacaggacaggccttcgaagacatgcaggagcaaaacgggagacttctccagcagctgagggagaaggacgacgctaatttcaaactaatgtccgaaagaatcaaggccaaccaaattcataaactcttacgcgaggagaaagatgagctgggggaacaagtacttgggctcaagtcccaggtggacgcccagttgctgactgtgcagaagcttgaagaaaaggagcgggctctgcaaggcagtttaggaggcgtcgagaaagagctgacgctccgcagccaggcgttagagttgaacaagcgaaaggccgtcgaggccgctcagttggcagaggacttaaaagttcaactggagcacgttcaaactcggctacgggagattcagccgtgtttagcagagagccgagccgctagggagaaagaatctttcaatctaaaaagagcacaggaggacatctcacgtcttagacggaagttagagaaacaacgcaaggttgaggtgtatgcagacgcggatgagatcctgcaggaagagattaaggagtacaaagcaagattgacctgtccttgctgtaacacacgtaaaaaagacgcagtgttgactaagtgcttccacgttttttgtttcgaatgcgtccgcggaaggtatgaagccaggcagcggaagtgcccaaaatgtaatgccgcattcggcgcacatgacttccatcggatctacatctcttag

SEQ ID NO: 182134 - DNA, 2082 bp, Artificial Sequence
  derived and/or modified sequence
atgagtggcccaggcaacaaaagggcggcaggggacggaggtagcgggcctcctgagaagaagctatcccgggaagaaaagactacaaccacgctcattgaacctataagattgggaggcataagctctacggaggagatggatctcaaggtgcttcagtttaagaataagaaactcgccgaacgacttgaacagcggcaagcctgcgaggacgagctgcgggaaaggatcgagaagttggaaaagaggcaggcccagttctccctcctatataatgaatctcttcaggtcaagacgcagttggatgaggccagggggttgctactcgcaacaaaaaactctcacctgagacacatcgagcatatggaatccgacgagttgggcctgcagaagaagctccgtaccgaggtgatccagctggaggatacactggcgcaggtcaggaaagaatacgagatgctgagaatcgagtttgagcagaacttggccgcaaatgaacaggctggtccaataaacagagagatgcggcatctcatcagcagtctccagaaccataaccatcagctgaagggagatgcgcagcgatacaagagaaaactgcgggaggtccaggctgaaatcggcaaactccgggctcaggccagcggtagcgcccacagcacgcctaacttaggtcaccccgaggactccggggtgtcagcacccgctccaggtaaggaggagggcggtcccggtcctgtctccacccctgataatcgtaaggaaatggccccagtccctggtacaactaccacgaccacctctgttaagaaggaggaactggtccccagtgaagaggacttccaggggatcacccccggagcccagggacctagctccagaggtcgggagcccgaagcacggccaaaacgtgaactgcaggagcgagagggaccctcactcgggccaccccctgtcgcttccgccctgtcccgcgctgatcgtgaaaaggcgaaagtagaggagaccaagagaaaggagtccgagcttctaaaaggactaagagcagagctgaagaaggcccaggagagtcagaaggagatgaaattgctgctcgatatgtacaagtccgctccgaaggaacagcgggataaagtccagctgatggcagcagagagaaaagctaaagccgaagtcgacgagctcaggagccgcatccgcgaactcgaagaacgggatcgcagggagtctaagaaaatcgctgatgaggacgcccttcggagaatccggcaggcagaagagcaaatagagcatctgcagcgcaaactgggggcaaccaagcaagaggaggaggctctgctcagcgagatggatgtgacaggacaggcgttcgaggatatgcaggaacaaaatggcagactactgcagcaactgcgggagaaggacgacgcaaacttcaagctcatgagtgagcggataaaggccaaccagattcacaagctactaagggaggaaaaggacgagttgggtgaacaggtgctcggtctcaaaagccaggtcgacgcgcaactgctgaccgtccagaaacttgaggagaaagaaagggcgttacaggggtctctgggcggtgtggaaaaggagcttacactgaggtcccaggcattagagctgaataaacgaaaagccgtcgaagctgctcagcttgcagaagatctgaaagtgcaacttgagcacgtgcagactcggctgcgagaaatccagccttgtctggcggaaagcagagcagctagggagaaggaaagcttcaatctgaagcgagcgcaagaagatatctccagattgcggagaaaattggaaaaacagcggaaggtggaggtatatgccgatgcagacgaaatcctccaggaggagatcaaagaatataaagcaagactgacatgtccgtgctgcaatacaaggaagaaagatgctgttctgacaaagtgctttcacgtattttgctttgaatgtgtccgaggacgatacgaggcacggcaacgcaagtgtcccaaatgtaacgccgcatttggggctcacgacttccatcgtatctatatcagctag

SEQ ID NO: 182135 - DNA, 5353 bp, Artificial Sequence
  derived and/or modified sequence
ggggggggggcagtggcgtccagtgacgcccagtgacgtccggtgaaatccaagatggcggcgctaggctgaccctcctgctggtgacggaagtaccgcctcctcccgtttgacgcccctcaggggaccctgcatcgctccagccgccgcggccatgtctgggccaggcaacaaacgcgccgccggcgacgggggctcagggcccccggaaaagaagctgagtcgtgaggagaagaccaccacgactcttatcgagcccattcgtcttggaggcatctcttccacggaggagatggacctgaaggtactacagttcaagaacaagaaactggcagagcggctggaacaacggcaggcttgtgaagatgaactccgagaacgaattgagaagttggagaagcggcaggccacagatgatgccacactcctcatcgtcaatcgctactgggcccagctggatgaaactgtggaagcccttctccgatgccatgagagccagggggagctgtcttcagcgcctgaggcacctgggacccaggaggggccaacatgtgatgggactcctctcccagagccggggacatcagagctgagagaccccttgctgatgcagctgcggccccctctcagtgagccggccttggcttttgtggtggcactgggtgccagcagcagtgaggaggtggagctggagctgcaaggccgaatggagttctccaaggcagctgtgtctcgtgtggtagaggcctcagaccgcctacagcgccgggtggaggaactctgtcagcgagtgtacagccgaggggacagtgagcccctcagtgaggcggctcaggcacacacccgagagctgggccgtgagaaccggcgactgcaggacttggccactcagctgcaggagaaacaccaccgcatctcattggagtactccgagctccaggataaagtgacatcggcagagaccaaggtgctggagatggagacaacagtggaggacttgcagtgggacatcgagaagctgcggaagcgagagcaaaagctcaataagcacctggcagaggccttagagcagcttaactctggctactatgtatctgggagctcctcaggcttccaggggggccagatcacactcagcatgcagaagtttgagatgctgaatgcagagttagaggaaaaccaggaactggccaacagccgtatggcagagctggagaaactgcaggccgaacttcagggggctgtgcggaccaatgagcgcctcaaggtggccctgcggagccttcctgaggaggtagtgcgggagacgggggagtaccgcatgctgcaggcccaattctcactgctctacaacgagtctctgcaagtgaagacccagctagacgaggctcggggcctgctgctggccacaaagaactcccacctgcgacacatcgagcacatggagagcgacgagctggggctgcagaagaagctacgcacagaggtcattcagctggaggacacgctggcccaggtacgcaaggagtatgagatgctgcgcatcgagtttgagcagaatctggcggccaacgagcaggcggggcccatcaaccgtgagatgcgccacctgattagtagtcttcaaaaccacaaccaccagctaaaaggggacgcccagcgatacaagcggaagcttcgagaagtacaagctgagattggcaagctccgggcccaggccagtggctctgcccactccacccccaacctgggccacccagaggattctggcgtcagtgccccagccccagggaaagaggagggtgggccaggccctgtcagtacccccgacaacagaaaggagatggctccagtgcctggcaccaccactactaccacttcagtgaagaaggaggagctggtcccctctgaagaggacttccagggtataacccctggggcccagggcccttcctcccggggccgagaacctgaggccaggcccaagcgggagcttcaggaacgggaaggtcccagcctaggacctccacctgtagcctccgctctctcaagggctgatcgggagaaggccaaggtggaagaaaccaagcggaaggaatcagaactcctcaagggtctccgagcagagctcaagaaggcccaggagagccagaaggagatgaaactgctgctggatatgtacaagtcagcgcccaaggagcagcgggataaggtgcagctcatggcagcggaacgcaaggctaaggccgaggttgatgagctgcggagccgcatccgggaattggaggagagggatcgaagggagagcaagaagatcgcggatgaggatgccctgcggcgcattcggcaggcagaggagcagatagaacacctgcagcgcaagctgggtgccaccaagcaggaggaggaggctctgctctcagagatggatgtgacaggtcaggcttttgaggacatgcaggaacagaacgggcggctgctacagcagttgcgggaaaaggatgatgccaactttaagctaatgtcagagcggatcaaggccaaccagattcacaagctgctgcgggaggagaaggatgagttgggcgagcaggtccttggcctcaagtcccaggtggatgcccagctgctgactgtgcagaagctagaggagaaggagcgagccttgcagggcagcctcgggggtgtggagaaggagctgacgctgcgcagccaagccctggagctcaacaagcggaaggctgtagaagccgcccagctggccgaggacctgaaggtgcagctggagcacgtgcagactcggctgcgggagatccagccctgcctggcagagagccgggctgctcgtgagaaagagagcttcaacctcaagagggctcaggaggacatctcacggctgcggcgcaagctggaaaagcagaggaaggtggaggtctacgcagatgccgacgaaatcctccaggaggagatcaaggagtacaaggcgcggttgacctgcccctgctgtaacacccgcaagaaggatgcagtccttaccaagtgcttccacgttttctgcttcgagtgcgtgcggggccgctatgaggcccgccagaggaagtgccccaagtgcaacgcggcctttggtgcccacgacttccatcgtatctacatcagctgaacctgaaactcaggggactctggaacaccatggaccctgggggctgtgcccccatctcctccccaccccaggtctagtggccccaccctccattccggaccccatgggcccagcccctgcccatctagttggtttggggaccctggtgcatgctagtgggcatgggatcagccaagcttcgttccatcttttcctaaaggtcagagctgcagcctagggggcactgccctacagaaaaggtctgcctgagaggcctgaggagcccagagcacttgactgagcttcccggaaactggccctaacctgtctgtctccgtggatgcatcctaaccctaaggaaaattccccaggctgtgatctaccctagagaaggctcgctccctgcctactggctcacaaatgaggaccagtgagccatgtccttgttccttgtttgagactgggctgcaggccccaggaagactttccttcacccaccatccccctaacctcggcagggcttctgtcctgtggagttccctggacaccttggtctggctcttgtgccaagggctgaaggaggtaccctcttggcagatgggggcatcacttgcttcctttgggaagctctaaggttgctgcagtcaccttcctcatcttgcaggtgctgaaccaacatcatcagtttctattctaatcaggccccttcccaatctccatttctctgccaagcccatttacccccacctcatgcatcccaaggctctactgggtccctggacctaaccctgctttcatcctggtggccttaactacagtggaggtggaacttcccaggaggggaagggacagaccagccccagccgctgggccaacttccaatcattccagctagaagagcttccccctgacaccctgtgactgagcctgtgtcctgtctgcctgcccagccatgctccatcggctgtgagggcagtgcccggagaggccagagggttggagctgcagggacccgtttggacccacagcctctgttctagagatgcttgtataggctgttaattgtgatgaataaacgttcaaccctcggcctgcagccagagtagccaggccgcgcaccccaaatgtagtcccccgattttagctgcagcagctgagcagcactttgctggcttggtgtgagcctgggagggctcagacttaacggccggcagggatcccggactgggcctgaaggggagagcgtggtggtcgtcgcggagccgcctgtcctgctcccaccgaccccggtctgaccacgtccttggctgtcatggccgggggatgccgggactcctcgggctgcatcctgggaagtgtagttcctggtccgcacatggttaggaggttctcggagagagagctagtttcccggttgcgctggccaaaggccggcctgaactggatcctgcggaccgcttctcagcggcttcacccccacaccactcgaatgcacagatcgggacacctcagctgggtgacttccctcgttgcaatcggcctcgggagcggtgcggcgtgtaccgagcggcgcccctgggctcagcgcgctgcaggcgccccgggcggatccttcaccgaggcaggactggggctggcgccagagccggtgcggagcggtgttggttcaggcgctggcgacagtgctatggccacggcaggggccgcgtgcgtctcagcggtggcgccttcggaccctattggcgcccgggacttaagcggggccgccgctgctggaccaggacgaactggagaaggagacgcgggccgccacggtgacctcgggcgtagggccggcggcggcgggcacgctggtggaagcgcgggccgcggcaggggaggacatcgggccgcagagaaagtgccgatggcctggggcagcggtgcgagggtgggaaaaacgcaggatattgcatcatagagacgcggccaccttcgcccctggagagcgccagtctcaggagcgccgcaccggtcacgggtggaggtcagccaggcctccgtaagcgcggtccccttccaggagtagccttcgcctgggctcttgagtagatgccaagtaattccgcatcgtctctctagatatctgcgctaaaggccacccggtctccttatcagaggggcaaaactctcctcgtgggtcttcatacctaataaaagtcggcatcaaaccac

SEQ ID NO: 182136 - DNA, 2634 bp, Artificial Sequence
  derived and/or modified sequence
gtgaaatccaagatggcggcgctaggctgaccctcctgctggtgagggctctggcgccgggggggacgggatccagcaggtgacggaagtaccgcctcctcccgtttgacgcccctcaggggaccctgcatcgctccagccgccgcggccatgtctgggccaggcaacaaacgcgccgccggcgacgggggctcagggcccccggaaaagaagctgagtcgtgaggagaagaccaccacgactcttatcgagcccattcgtcttggaggcatctcttccacggaggagatggacctgaaggtactacagttcaagaacaagaaactggcagagcggctggaacaacggcaggcttgtgaagatgaactccgagaacgaattgagaagttggagaagcggcaggcccaattctcactgctctacaacgagtctctgcaagtgaagacccagctagacgaggctcggggcctgctgctggccacaaagaactcccacctgcgacacatcgagcacatggagagcgacgagctggggctgcagaagaagctacgcacagaggtcattcagctggaggacacgctggcccaggtacgcaaggagtatgagatgctgcgcatcgagtttgagcagaatctggcggccaacgagcaggcggggcccatcaaccgtgagatgcgccacctgattagtagtcttcaaaaccacaaccaccagctaaaaggggacgcccagcgatacaagcggaagcttcgagaagtacaagctgagattggcaagctccgggcccaggccagtggctctgcccactccacccccaacctgggccacccagaggattctggcgtcagtgccccagccccagggaaagaggagggtgggccaggccctgtcagtacccccgacaacagaaaggagatggctccagtgcctggcaccaccactactaccacttcagtgaagaaggaggagctggtcccctctgaagaggacttccagggtataacccctggggcccagggcccttcctcccggggccgagaacctgaggccaggcccaagcgggagcttcaggaacgggaaggtcccagcctaggacctccacctgtagcctccgctctctcaagggctgatcgggagaaggccaaggtggaagaaaccaagcggaaggaatcagaactcctcaagggtctccgagcagagctcaagaaggcccaggagagccagaaggagatgaaactgctgctggatatgtacaagtcagcgcccaaggagcagcgggataaggtgcagctcatggcagcggaacgcaaggctaaggccgaggttgatgagctgcggagccgcatccgggaattggaggagagggatcgaagggagagcaagaagatcgcggatgaggatgccctgcggcgcattcggcaggcagaggagcagatagaacacctgcagcgcaagctgggtgccaccaagcaggaggaggaggctctgctctcagagatggatgtgacaggtcaggcttttgaggacatgcaggaacagaacgggcggctgctacagcagttgcgggaaaaggatgatgccaactttaagctaatgtcagagcggatcaaggccaaccagattcacaagctgctgcgggaggagaaggatgagttgggcgagcaggtccttggcctcaagtcccaggtggatgcccagctgctgactgtgcagaagctagaggagaaggagcgagccttgcagggcagcctcgggggtgtggagaaggagctgacgctgcgcagccaagccctggagctcaacaagcggaaggctgtagaagccgcccagctggccgaggacctgaaggtgcagctggagcacgtgcagactcggctgcgggagatccagccctgcctggcagagagccgggctgctcgtgagaaagagagcttcaacctcaagagggctcaggaggacatctcacggctgcggcgcaagctggaaaagcagaggaaggtggaggtctacgcagatgccgacgaaatcctccaggaggagatcaaggagtacaaggcgcggttgacctgcccctgctgtaacacccgcaagaaggatgcagtccttaccaagtgcttccacgttttctgcttcgagtgcgtgcggggccgctatgaggcccgccagaggaagtgccccaagtgcaacgcggcctttggtgcccacgacttccatcgtatctacatcagctgaacctgaaactcaggggactctggaacaccatggaccctgggggctgtgcccccatctcctccccaccccaggtctagtggccccaccctccattccggaccccatgggcccagcccctgcccatctagttggtttggggaccctggtgcatgctagtgggcatgggatcagccaagcttcgttccatcttttcctaaaggtcagagctgcagcctagggggcactgccctacagaaaaggtctgcctgagaggcctgaggagcccagagcacttgactgagcttcccggaaactggccctaacctgtctgtctccgtggatgcatcctaaccctaaggaaaattccccaggctgtgatctaccctagagaaggctcgctccctgcctactggctcacaaatg

SEQ ID NO: 182137 - protein, 598 aa, Artificial Sequence
  derived and/or modified sequence
MENSSAASASSEAGSSRSQEIEELERFIDSYVLEYQVQGLLADKTEGDGESERTQSHISQWTADCSEPLDSSCSFSRGRAPPQQNGSKDNSLDMLGTDIWAANTFDSFSGATWDLQPEKLDFTQFHRKVRHTPKQPLPHIDREGCGKGKLEDGDGINLNDIEKVLPAWQGYHPMPHEVEIAHTKKLFRRRRNDRRRQQRPPGGNKPQQHGDHQPGSAKHNRDHQKSYQGGSAPHPSGRPTHHGYSQNRRWHHGNMKHPPGDKGEAGAHRNAKETMTIENPKLEDTAGDTGHSSLEAPRSPDTLAPVASERLPPQQSGGPEVETKRKDSILPERIGERPKITLLQSSKDRLRRRLKEKDEVAVETTTPQQNKMDKLIEILNSMRNNSSDVDTKLTTFMEEAQNSTNSEEMLGEIVRTIYQKAVSDRSFAFTAAKLCDKMALFMVEGTKFRSLLLNMLQKDFTVREELQQQDVERWLGFITFLCEVFGTMRSSTGEPFRVLVCPIYTCLRELLQSQDVKEDAVLCCSMELQSTGRLLEEQLPEMMTELLASARDKMLCPSESMLTRSLLLEVIELHANSWNPLTPPITQYYNRTIQKLTA

SEQ ID NO: 182138 - protein, 648 aa, Artificial Sequence
  derived and/or modified sequence
MGRLPCGPLPGQWTADCSEPLDSSCSFSRGRAPPQQNGSKDNSLDMLGTDIWAANTFDSFSGATWDLQPEKLDFTQFHRKVRHTPKQPLPHIDREGCGKGKLEDGDGINLNDIEKVLPAWQGYHPMPHEVEIAHTKKLFRRRRNDRRRQQRPPGGNKPQQHGDHQPGSAKHNRDHQKSYQGGSAPHPSGRPTHHGYSQNRRWHHGNMKHPPGDKGEAGAHRNAKETMTIENPKLEDTAGDTGHSSLEAPRSPDTLAPVASERLPPQQSGGPEVETKRKDSILPERIGERPKITLLQSSKDRLRRRLKEKDEVAVETTTPQQNKMDKLIEILNSMRNNSSDVDTKLTTFMEEAQNSTNSEEMLGEIVRTIYQKAVSDRSFAFTAAKLCDKMALFMVEGTKFRSLLLNMLQKDFTVREELQQQDVERWLGFITFLCEVFGTMRSSTGEPFRVLVCPIYTCLRELLQSQDVKEDAVLCCSMELQSTGRLLEEQLPEMMTELLASARDKMLCPSESMLTRSLLLEVIELHANSWNQGAWQAAHGQLGPWCTGPDGQAGGQGWPWREKEMGRRAGRVGGQSGARACKLTPIREACFFFLVALALPFLTPASPLPIRPIPHGALCEGSHRCDSSETLAASHAGAPLGSERTSEG

SEQ ID NO: 182139 - DNA, 1797 bp, Artificial Sequence
  derived and/or modified sequence
atggaaaattcgagtgctgcttctgcctctagcgaggcgggctcatccaggtctcaggaaatcgaagaactggagagatttatcgacagttatgtgctcgagtaccaggttcaagggctgcttgcggacaaaactgaaggggatggcgaatccgagaggactcagtctcacatctctcaatggactgctgactgcagtgagcccctcgactcctcttgcagctttagccgtggccgtgcacctccgcaacagaatggcagtaaagacaattcccttgatatgcttggaaccgacatctgggctgctaatactttcgatagtttctctggagcaacctgggatcttcagcctgagaaactggacttcacacaattccacaggaaagtgcggcatactcccaagcaaccattgccccacatcgatagggaggggtgcgggaagggcaagctggaggatggcgatggaataaacctgaatgatatcgaaaaagtcctccccgcatggcaggggtaccaccctatgccccatgaggttgagatcgcgcacaccaaaaaactttttcggcgccggaggaacgatagacggagacagcagagaccaccgggtggcaataaaccccagcagcacggcgaccaccaacctgggtctgccaagcacaaccgcgatcaccagaagagttatcaaggaggttcagcgccacatccgtccggtcggcccacacatcacggatactctcaaaaccggagatggcatcatggaaatatgaagcatcctcccggcgataaaggggaggccggcgctcatcggaacgccaaagagaccatgacaattgagaatcccaaactcgaggacactgccggcgacacaggccattcctctctcgaggccccgcggagtcccgacactctggcaccagtggcctctgagcgattgccgccccagcaaagcggcggacccgaagtcgagacgaaaaggaaagatagcatcttacccgagagaataggcgagcgtccaaagatcactctcctgcagtcttctaaggaccgcttaagaagaaggctgaaggaaaaggatgaagtagccgtcgaaacgacaacgccacagcagaacaagatggataaactgatcgagatactcaatagcatgaggaacaatagctctgatgtggataccaaactgacgacattcatggaagaagcccagaacagtaccaactcagaggagatgcttggcgagatcgtaaggaccatttaccaaaaggccgtatcagataggagctttgctttcaccgcggccaaactctgtgacaagatggctctgtttatggttgaggggactaagtttcggtcactgctgctgaatatgttgcaaaaggatttcacagtgcgggaagagctacagcagcaggacgtggagcggtggctgggcttcattacttttctatgcgaagtgttcgggaccatgagatcttccactggagagccattccgcgttttggtgtgtccaatatatacatgtctccgggaacttttgcagagtcaagatgtcaaagaagatgcagttctgtgctgctcaatggaactccaatcgacagggcgattacttgaagaacaattgcctgagatgatgactgaactgcttgcgagtgccagggataagatgctatgtccctcggaatccatgctgacacgtagcttgttactcgaggtgattgagctgcatgcgaactcgtggaatcccctaaccccacccatcacgcagtactacaacaggaccatccagaaattgactgcatag

SEQ ID NO: 182140 - DNA, 1797 bp, Artificial Sequence
  derived and/or modified sequence
atggagaacagcagcgctgccagcgccagcagcgaggccggcagcagccgcagccaggagattgaggagctggagcgcttcatcgacagctatgtgctggagtaccaggtgcagggcctgctggccgacaagacagaaggagatggagagagcgagaggacccagagccacatcagccagtggacagctgactgcagcgagcccctggacagcagctgcagcttcagccggggccgggccccaccccagcagaatggcagcaaggacaacagcctggacatgctgggcacagacatctgggccgccaacacctttgacagcttcagcggggccacctgggacctgcagcctgagaagctggacttcacccagttccacaggaaggtgcgccacacccccaagcagcccctgccccacatcgaccgggagggctgtgggaagggcaagctggaggatggagatggcatcaacctgaatgacatcgagaaggtgctgcctgcctggcagggctaccaccccatgcctcatgaggtggagatcgcccacaccaagaagctgttcagaagaagaagaaatgacagaagacggcagcagaggcctcctgggggcaacaagccccagcagcacggggaccaccagcccggcagcgccaagcacaacagagaccaccagaagagctaccagggcggcagcgccccccaccccagcggccggcccacccaccacggctacagccagaacagacgctggcaccacggcaacatgaagcaccccccaggggacaagggggaggccggggcccacagaaatgccaaggagaccatgaccatcgagaaccccaagctggaggacacagctggggacaccggccacagcagcctggaggcccccaggagcccagacaccctggcccctgtggccagcgagcggctgcccccccagcagagcggcggccctgaggtggagaccaagaggaaggacagcatcctgcctgagcgcatcggggagcggcccaagatcaccctgctgcagagcagcaaggaccggctgcggcggcggctgaaggagaaggatgaggtggccgtggagaccaccaccccccagcagaacaagatggacaagctgattgagatcctgaacagcatgaggaacaacagcagtgatgtggacaccaagctgaccaccttcatggaggaggcccagaacagcaccaacagcgaggagatgctgggggagatcgtgaggaccatctaccagaaggctgtgtctgacaggagctttgccttcaccgctgccaagctgtgtgacaagatggccctcttcatggtggagggcaccaagttccgcagcctgctgctgaacatgctgcagaaggacttcaccgtgcgggaggagctgcagcagcaggatgtggagcgctggctgggcttcatcaccttcctgtgtgaggtgtttggcaccatgaggagcagcactggagagcccttccgggtgctggtgtgccccatctacacctgcctgcgggagctgctgcagagccaggatgtgaaggaggatgctgtgctgtgctgcagcatggagctgcagagcacaggccgcctgctggaggagcagctgcctgagatgatgacagagctgctggccagcgcccgggacaagatgctgtgccccagcgagagcatgctgaccaggagcctgctgctggaggtgattgagctgcacgccaacagctggaaccccctgaccccacccatcacccagtactacaacagaaccatccagaagctgacagcctag

SEQ ID NO: 182141 - DNA, 1797 bp, Artificial Sequence
  derived and/or modified sequence
atggagaacagcagcgccgccagcgccagcagcgaggccggcagctctcgatctcaggagattgaagagctggagagattcatagactcttatgttctggagtaccaggtacagggcctcctcgcagacaaaaccgagggggatggagagagtgaaagaacccagtcacatatttcacagtggaccgccgattgttcagagccactggatagtagttgctcatttagccgcgggcgggccccacctcagcagaatggcagcaaggacaatagtctcgatatgcttgggacagatatctgggcagccaacacattcgactcattcagtggggccacgtgggacctgcagcccgaaaagcttgattttacgcaatttcatcgaaaggtccggcacaccccgaagcaaccattacctcacatagaccgagagggatgtgggaagggcaaactggaggacggcgatgggatcaatctcaatgatatcgaaaaggtccttccagcctggcaggggtatcaccccatgccacatgaagtggagattgcccacactaaaaagttattccggagacgtcgcaatgacagacggcggcagcagcgacctccgggcggaaataagccccaacaacacggtgatcaccaaccagggtctgctaaacataatcgagaccaccaaaaatcataccaaggtgggtcagcccctcacccctcaggcagaccgactcaccacggatattcccagaatcgaaggtggcaccacggtaacatgaagcacccccctggtgacaagggcgaagccggtgcccaccggaacgccaaagagaccatgaccattgagaacccaaagcttgaagacacggctggagataccggccactcttccctcgaggctcctaggtcccccgatacgctggctccagtagcttccgaacggctgccaccacagcaatcgggtggccccgaggttgaaactaaaaggaaagattctattctccctgagcggattggggagcgccccaaaatcacattactgcagtcatctaaggataggcttcgccgacgcctcaaagaaaaggatgaagtggccgtggagactactactccccagcagaacaagatggataagcttattgagatattaaactctatgaggaataactcatctgacgtggatacgaagctgactacgttcatggaagaggcacagaattccaccaacagtgaggaaatgctgggcgagattgtgcgcacaatttaccagaaagccgtcagtgaccggtccttcgcctttacagccgccaaactgtgcgacaagatggctctgttcatggtagagggaaccaagtttcggtccttattactcaatatgttgcaaaaagactttaccgttagagaggagctgcaacagcaggacgtagagagatggctgggattcatcacttttctgtgcgaggtcttcggcaccatgcgttcttcgaccggagagccgttccgcgtgttggtttgccccatctatacttgtttgagggaactgctacagtctcaagatgtgaaagaagatgcagtgctatgctgctccatggagcttcagtctaccgggcggctgcttgaagagcagctgccggaaatgatgaccgaactgctggcctccgctagagacaaaatgttgtgcccctcggaaagcatgttgaccagatccctgctattagaagtgatagaactgcacgccaattcatggaacccacttacccctcccatcactcagtactataacagaaccattcagaagttaactgcctag

SEQ ID NO: 182142 - DNA, 1797 bp, Artificial Sequence
  derived and/or modified sequence
atggagaatagttctgcagccagcgcttcctctgaagcagggtcctcacggtctcaggagatcgaggagctagagagattcatagacagctacgtgctcgaataccaggttcaaggtttattggcggacaagactgaaggagatggcgaatcggagcggacccagagccacattagccagtggactgcagactgcagcgaacctctggattcatcctgcagcttctcacgcggtcgtgcccctccccaacagaacggatccaaagacaactccctggatatgctgggaaccgatatctgggccgcaaataccttcgactcatttagcggggctacatgggacctccagcctgagaaactggacttcacacaattccaccggaaggtgcgacacacccccaaacagcctctaccccatattgaccgcgagggatgtggcaaaggcaagttggaggacggagacggaataaacctgaatgacatagagaaggttctgcctgcttggcagggctatcatccaatgccccatgaggttgagatagcacataccaagaaattattccgaaggcggcgaaacgaccgtcgccgacagcagcgacccccagggggaaataagccacagcaacacggagatcaccagcctggctctgccaagcataacagagatcaccagaaatcttaccagggaggttcggcccctcatccctctgggagacctacgcaccatggctatagccagaataggcggtggcaccacgggaatatgaagcatcctccaggagataagggcgaggccggtgcacacagaaacgccaaggagactatgacaatcgagaatccaaagctggaggacaccgcaggagataccgggcacagttcactggaggctcctaggagccccgacaccttggccccagtcgcgtcagagcggctcccacctcaacagtcaggagggccagaggtggagacaaagcgcaaggattcaatactgcctgaaagaattggcgaacggcctaaaatcaccctgctccagtcttctaaagaccggctccgcagaaggctcaaagagaaggacgaagtcgccgtcgagacaactaccccccaacagaacaagatggacaaactcatcgaaatcctcaacagcatgcgcaataatagttctgacgtggatactaagctcaccacttttatggaagaagcgcaaaattcaacgaactccgaggaaatgttgggagaaatcgttcgtacaatttatcagaaggcggtaagcgatcggtcttttgctttcacagccgcaaagctgtgtgacaaaatggctctgttcatggtggaaggcactaaatttcgcagcctcctgctgaatatgctgcaaaaggacttcacagtgagggaggagctgcagcagcaagatgttgagcgttggcttgggttcatcacctttctgtgtgaagtattcggaacaatgagaagtagtaccggcgagccatttagggtactggtttgtccaatttatacatgtctgcgcgagttattacagtctcaggatgtgaaggaggacgctgtcctgtgctgttctatggaacttcagagtaccggaaggctgcttgaggaacagctcccagaaatgatgaccgaactattggcgagtgcaagagataaaatgctttgtcctagcgaatccatgcttactcgctccctgctgcttgaagtaattgagctccacgctaattcttggaaccctctcactccccctatcacccagtattacaatagaaccatccagaaactaacagcctag

SEQ ID NO: 182143 - DNA, 5750 bp, Artificial Sequence
  derived and/or modified sequence
ctttccctgtgtcagatcagggatcattttttttccttcctctactccctcccccctacccgcccctccctccctgtttcccttccctccctccctcccctctctgctgggtctgtgcgctggggcgcccgatcccctccgcagctgggacgctccgaactcgaggcaggagtcggctctccggagcctcgtccctcccttccccttccctgcccccttcccccacccccgactcgggcttggcgcggcggccagaggaaccccgagtcccggcccaggcccctgagctggagggatggaaaactcctctgcagcatcagcctcctcggaggcagggagcagccgctcccaggagatcgaggagctggagcgcttcatcgacagctacgtgctggagtaccaggtgcaggggctgctggctgacaagacggagggtgatggcgagagcgagaggacccagtcccacatctcccagtggacagcggactgcagcgaaccgctggacagcagctgttccttctcccgagggcgagcccccccacagcagaatggcagcaaagacaactctctggacatgctgggcacggacatctgggcggccaacaccttcgattccttcagtggtgccacctgggacctgcagccggaaaagctggacttcacccagttccaccgcaaagtccgacacacgcccaagcagcccctgccacacatcgaccgcgaagggtgtggcaaagggaagctggaagatggggatggcatcaacctgaatgacatcgagaaggtccttccagcctggcagggctaccacccgatgccccatgaagtggagatcgcacacaccaagaagctgttccgcaggaggagaaatgatcgaaggcggcagcagagacctccggggggcaacaagccccaacagcatggtgaccaccagccaggcagtgccaaacacaacagggaccaccagaaatcctaccaggggggctcagcaccccacccctcagggaggcccactcaccatggctacagccagaaccggcgctggcaccatggcaacatgaagcacccaccaggcgacaagggggaggcaggcgcacaccgcaatgccaaagagaccatgaccatcgagaacccaaaactggaggacactgcaggggacaccgggcacagcagccttgaggccccccgcagccctgacaccctggccccggtggcttctgagcggctgcccccacagcagtcaggggggccagaggttgagacaaaacgtaaagacagtattcttcccgagcgcatcggggagcggcccaaaattaccctgctccagtcttccaaagacagactgcggcgaaggctaaaggaaaaggatgaagtggccgtggagacgaccactccccagcagaacaagatggacaagctgatcgagatcctgaacagcatgcggaacaacagcagcgacgtggacaccaagctcaccaccttcatggaggaggcccagaactccaccaactccgaggagatgctgggcgagatcgtgcgcacaatctaccagaaggctgtgtccgaccgcagcttcgccttcaccgctgccaagctctgcgacaagatggcgctctttatggtggaggggaccaagttccggagcctgctcctcaacatgctgcagaaggacttcacggtgcgcgaggagctgcagcagcaggacgtggagcgctggctgggcttcatcaccttcctgtgcgaggtcttcggcaccatgcgcagcagcacaggcgagcccttccgtgtgctcgtgtgccccatctacacctgcctcagggagctcttgcaatctcaggatgtgaaggaagatgctgtcctttgctgctctatggagctgcagagtacaggccggctgctggaggaacagctgcctgagatgatgacagagctcctggccagcgcacgggacaagatgctgtgcccctcggagtccatgctgacccggtcgctgctcctagaggtcatcgagctccacgctaacagctggaaccctctgacgccccccatcacgcagtactacaacagaaccatccagaaactgacagcctgacagccagggggcctggcaggcggcccacgggcagctggggccctggtgcacagggccagatggacaggcgggaggacaggggtggccctggcgggagaaagaaatggggaggagggcaggcagagtcggtggccagtctggagccagacggggaagggagcaaatccctgagaggagtgcccccgcacaagccccccagcccgagcatgcaagctcacaccaataagggaagcatgtttctttttcctggtggccctggccctccccttcctcactcccgcctctcccctccccatcagacccatcccccacggagctttgtgtgagggatctcatcgctgtgactcctcggagaccttggcagcctcgcacgccggggcaccgcttgggtcagaaaggacctcggaaggctgaaaaagtgggtcggagacgggctcgcattgttcccgcatgctgtcagccgcagtcgccaactggcagcaggcgacgtgtagcagatgtccgggaggacaaaggcaggcacggtccccaccagccgcccgtaattgacggcctttgtcagccatggcagagctgacgctccacctcccacctccaagtcctcctcactgcagcccccacagcctcaggcctagggggtcaggcgcagcgggggagatggagtttgcagttccacttgcactcttttgtttattgtgttttatttttcaaaagtcggttgctttgaagtctctttggccaatgaaaatgcccgtgatgtgatcacacagtcagcactgttgaggacccccggattagtgggagatcaaacccagctcccctctagaagaaggattcgagccacagacagcttgccagtagccaattagggtaattggaaacttctgccccggcggggggtccccgctggaatcctgtgttcctcgccactggcttccagcgcctctgttttctcaaagggctgatactgtcaccactgggaccaagttaaacctggtcctggccccaggggccttgtggcaaacagggcacagaacgagactggcaaattaaaaccaaaattctagatggtgtcttgcgctccacacgcaggtcttactggggaaaaggatgggagtgggggctccccaggactcgattttagctaatgcgctgtgtcactgccccagctcggacgtagaagcccagccctccgtgagctcttgggaaaggggtgaattcactgggtcatggaagggacagtcaggtgaccagcggggtcgccagatgaagcttcccagccgggaaacaagacggggtttcttggcaggccctggtcctggggagcaggccctgttgttggctggagaggaaggtgtggggtggaacaggtgtccacatagctccatctctgggggctggagcacacactttgatgagcccccccggaaatgatgtcagagcctagccgcttccttatttgctcttttattgaggccgggcaggccctgggtcactttggaggcccctcttggtccacactggactggccgggaggtgatgggcggggaaggttctcgtgattgattgattctgagtctgagagtggcgagtggggagaggcttccccagttctctccagctttccctgcagctgcaacctgccctctggtcccaggtgtggagcctttgcctgtctctaaaaagagcctgttggcgacaaggtgtagggggcacaagtttacctgaaacaggtcagtggtctctcccaagaagcgcacgccacctctggtccctggccctgaaccctgccttcttcctccctccacggtttcttcccagactttctcaagctcctcctcactgcccttcctccccagcccagcctgggaacacagatgccccgcgggtaggaggcctcgagggaggagccgggctgatgcggggctgctcagggcaggccccagggcgagcttgccatcgtggccaggcagcctccacctgtgcttcagtggcccctgcccccctgaagcatgtggggtttgtccgctaggaggaggcaaggcccccgaagagaggagagacctgggagtgggagctcaggtcagggaggaggcaggggagtggggtctcccagacccaacggtgagctcagagcaagcttcacgcaggacgctccgaaacactgtgtggagggggctgtgttgtgggcaccttggggcctgattctccttcctccgaacgggctccttgatggcctggccacaggggcagctccccattggctgttaggaccagagtgtgaagaagaagtgaaatataaatatgtatacatatataaatatatttttaattacatgtcgtgtcacggtggctccagacatactgtttgcctagtttattccactgcttgaaagcgcttcctagccaatctgaacaacaacactttaagctgtttttctaaatgcaggttgctgctcctttttcagatatggaaggaaaacgttaagactattttttttttaaagaaacaacagtcaagcctaaaatttgagaccccgaggcagcttcccgagggagactgctcagacaggaactgcaggacagaagtggatgccccacagaccctggccccctccccaagtccatcccctctctgtggcatgaggaaggccgcgtccgagttgacctctgaatgtatgtgatgagaggcagagctggatattgcatttctaaggcttgcattgctttcccctcgcccgcggttcttggcgcatggaagaggcggtccagccatctgatgttgatcctgtctcagtctccccactgcctgtcaggatgagttagtcattgtttttctccgaggcggcctgcttgccacagccctgctccccaaggcctggtggctttgccgaagctctgggaccgcagccccagcgaggcccccaacctcacccagacgaggccaggagccccgccaccctccacgggatgtgcaccctcagaccccattctctctgttcgtccttccttgaccagtctgtaaaccttcactgtttggggatcgtcctgtccatccatgtaaatgtaaatgttggccgagtcggtatttattctgattgatttttattttattctattattttctccgagggatgagggtggggggtgtgggaagggtaccacagatcaggccggggcagctgtaggggcgggggcccagacagccaggccgccaccagagcagccccatggggtgccccagacgcgggcctccaagaagccaagtcccagtctgttttctggcatcagacaccggcccgtgttccttgtcagacagacagactctcaggcctgcctggggagtcgtgtccctcagctgcagggcactgtgttgggaaaccattggctgggcctttgaggacacagatcagaagaaagaaagacaactttcctctgcgcggaacactcacacggaagggctggccgcctccctgagccggctgggagtggacgacaggacctacctccccagagcaagggcctggggcttcccgccaaagctgccgcggaaccccgctagtgcgaccaccctccctccgtcggtatgtcctgctttccagctgaacccaaactacaagtgggtttaaaaaaataaacaccaccaccaaaaacaaaa

SEQ ID NO: 182144 - DNA, 1797 bp, Artificial Sequence
  derived and/or modified sequence
atggagaacagcagcgccgccagcgccagcagcgaggccggcagcagcagaagccaggagatcgaggagctggagagattcatcgacagctacgtgctggagtaccaggtgcagggcctgctggccgacaagaccgagggcgacggcgagagcgagagaacccagagccacatcagccagtggaccgccgactgcagcgagcccctggacagcagctgcagcttcagcagaggcagagcccccccccagcagaacggcagcaaggacaacagcctggacatgctgggcaccgacatctgggccgccaacaccttcgacagcttcagcggcgccacctgggacctgcagcccgagaagctggacttcacccagttccacagaaaggtgagacacacccccaagcagcccctgccccacatcgacagagagggctgcggcaagggcaagctggaggacggcgacggcatcaacctgaacgacatcgagaaggtgctgcccgcctggcagggctaccaccccatgccccacgaggtggagatcgcccacaccaagaagctgttcagaagaagaagaaacgacagaagaagacagcagagaccccccggcggcaacaagccccagcagcacggcgaccaccagcccggcagcgccaagcacaacagagaccaccagaagagctaccagggcggcagcgccccccaccccagcggcagacccacccaccacggctacagccagaacagaagatggcaccacggcaacatgaagcacccccccggcgacaagggcgaggccggcgcccacagaaacgccaaggagaccatgaccatcgagaaccccaagctggaggacaccgccggcgacaccggccacagcagcctggaggcccccagaagccccgacaccctggcccccgtggccagcgagagactgcccccccagcagagcggcggccccgaggtggagaccaagagaaaggacagcatcctgcccgagagaatcggcgagagacccaagatcaccctgctgcagagcagcaaggacagactgagaagaagactgaaggagaaggacgaggtggccgtggagaccaccaccccccagcagaacaagatggacaagctgatcgagatcctgaacagcatgagaaacaacagcagcgacgtggacaccaagctgaccaccttcatggaggaggcccagaacagcaccaacagcgaggagatgctgggcgagatcgtgagaaccatctaccagaaggccgtgagcgacagaagcttcgccttcaccgccgccaagctgtgcgacaagatggccctgttcatggtggagggcaccaagttcagaagcctgctgctgaacatgctgcagaaggacttcaccgtgagagaggagctgcagcagcaggacgtggagagatggctgggcttcatcaccttcctgtgcgaggtgttcggcaccatgagaagcagcaccggcgagcccttcagagtgctggtgtgccccatctacacctgcctgagagagctgctgcagagccaggacgtgaaggaggacgccgtgctgtgctgcagcatggagctgcagagcaccggcagactgctggaggagcagctgcccgagatgatgaccgagctgctggccagcgccagagacaagatgctgtgccccagcgagagcatgctgaccagaagcctgctgctggaggtgatcgagctgcacgccaacagctggaaccccctgaccccccccatcacccagtactacaacagaaccatccagaagctgaccgcctag

SEQ ID NO: 182145 - protein, 1211 aa, Artificial Sequence
  derived and/or modified sequence
MKNLLTEKCISSHNFHQKVIKQRMEKKVDSRYFKDGAVKKPYSAKTLSNKKSSASFGIRRELPSTSHLVQYRGTHTCTRQGRLRELRIRCVARKFLYLWIRMTFGRVFPSKARFYYEQRLLRKVFEEWKEEWWVFQHEWKLCVRADCHYRYYLYNLMFQTWKTYVRQQQEMRNKYIRAEVHDAKQKMRQAWKSWLIYVVVRRTKLQMQTTALEFRQRIILRVWWSTWRQRLGQVRVSRALHASALKHRALSLQVQAWSQWREQLLYVQKEKQKVVSAVKHHQHWQKRRFLKAWLEYLQVRRVKRQQNEMAERFHHVTVLQIYFCDWQQAWERRESLYAHHAQVEKLARKMALRRAFTHWKHYMLLCAEEAAQFEMAEEHHRHSQLLLHRFWNLWRSQIEQKKERELLPLLHAAWDHYRIALLCKCIELWLQYTQKRRYKQLLQARADGHFQQRALPAAFHTWNRLWRWRHQENVLSARATRFHRETLEKQVFSLWRQKMFQHRENRLAERMAILHAERQLLYRSWFMWHQQAAARHQEQEWQTVACAHHRHGRLKKAFCLWRESAQGLRTERTGRVRAAEFHMAQLLRWAWSQWRECLALRGAERQKLMRADLHHQHSVLHRALQAWVTYQGRVRSILREVAARESQHNRQLLRGALRRWKENTMARVDEAKKTFQASTHYRRTICSKVLVQWREAVSVQMYYRQQEDCAIWEAQKVLDRGCLRTWFQRWWDCSRRSAQQRLQLERAVQHHHRQLLLEGLARWKTHHLQCVRKRLLHRQSTQLLAQRLSRTCFRQWRQQLAARRQEQRATVRALWFWAFSLQAKVWATWLAFVLERRRKKARLQWALQAYQGQLLQEGATRLLRFAASMKASRQQLQAQQQVQAAHSLHRAVRRCATLWKQKVLGRGGKPQPLAAIAPSRKVTFEGPLLNRIAAGAGDGTLETKRPQASRPLGALGRLAAEEPHALELNTAHSARKQPRRPHFLLEPAQSQRPQKPQEHGLGMAQPAAPSLTRPFLAEAPTALVPHSPLPGALSSAPGPKQPPTASTGPELLLLPLSSFMPCGAAAPARVSAQRATPRDKPPVPSSLASVPDPHLLLPGDFSATRAGPGLSTAGSLDLEAELEEIQQQLLHYQTTKQNLWSCRRQASSLRRWLELNREEPGPEDQEVEQQVQKELEQVEMQIQLLAEELQAQRQPIGACVARIQALRQALC

SEQ ID NO: 182146 - DNA, 3636 bp, Artificial Sequence
  derived and/or modified sequence
atgaagaatctcctgaccgagaaatgtataagttcacataatttccatcagaaagtgattaagcaaagaatggaaaaaaaggtagattctagatactttaaagatggagccgtcaagaagccctactcggccaagactctaagcaacaagaagtcatctgcctccttcggcatacgaagggaactcccctccacttctcatcttgttcagtacagaggtacccacacttgtacacggcaaggtcggctgcgcgagctgaggatccgctgcgttgctcgcaagttcctctacttgtggatccggatgacgttcggcagggtctttccctcaaaggcaaggttctactatgagcagaggctcctgcgcaaggtattcgaggagtggaaggaagagtggtgggtattccagcacgaatggaaactgtgtgtgcgagcagactgccactatagatactacttatacaacctgatgttccaaacttggaaaacctatgtcaggcagcaacaggagatgcgcaataaatacattagggccgaagtgcacgacgcaaaacagaagatgcgacaggcttggaaatcctggctgatatacgtggtggtgaggagaacgaagctacagatgcagactacggcgctagagttccggcagcggattattcttagggtgtggtggagcacttggcggcagaggctgggacaggtgagggtgtccagggcgctgcacgctagcgcactgaagcatcgcgctctgtccttacaggtgcaagcgtggtcacagtggcgtgagcagctgctgtatgtgcaaaaggaaaaacagaaagttgtttccgccgtcaaacaccaccagcattggcaaaaacggaggtttctcaaagcatggctggaatatcttcaggtgcgacgtgtgaagagacagcaaaatgagatggccgagagatttcaccacgtcaccgttctgcaaatttacttttgcgactggcagcaggcttgggaaagacgggagtccctctatgcacaccacgcacaggtggaaaagctggcccgcaaaatggccctaaggagggcctttacccactggaaacactatatgttgctgtgcgccgaggaagccgcccagtttgaaatggctgaagagcaccacaggcactcccagttgctgcttcacagattctggaacctgtggaggagccagatagaacagaagaaagagagagagctcttaccactgctgcacgcggcttgggatcactacaggatcgcgctgctgtgcaaatgtatagagttgtggctccagtatactcagaaaagacgctataaacagctccttcaagccagggccgatgggcatttccagcaacgcgcccttcccgctgccttccacacctggaatcgcctctggcgctggcgtcaccaagaaaatgtgctctctgcgagggcgaccagatttcacagagagacccttgagaagcaggtgtttagcctgtggcgtcagaagatgtttcagcatcgtgagaaccgcctggccgaacggatggccatcttgcacgcagaacgccagctgctgtatcgcagctggttcatgtggcatcaacaagcggctgctcgccaccaggagcaggagtggcagactgttgcctgtgctcaccaccgccatgggcgattaaagaaggcattttgcttgtggcgagagtccgcacagggactcagaacggagcgaacagggcgggtccgtgctgcagagttccatatggcccagttgctcagatgggcctggtcacagtggagagagtgtcttgctctcagaggggcagaacgccagaaactgatgagggctgaccttcatcaccagcatagtgtattgcacagagcccttcaagcttgggtgacctaccaggggcgggttaggagtatcctgcgcgaggtagccgcacgtgaaagtcagcacaacaggcaactcttacgcggcgccttgcggcgttggaaagagaacactatggccagagtagacgaggcgaagaagacattccaagcctccacccattaccgtaggacaatttgctctaaggtcctcgtgcaatggcgcgaagccgtgagtgtgcagatgtactatcgccagcaggaggactgcgccatatgggaggcccaaaaagtcctggatcgggggtgtctgcgcacttggtttcaacgatggtgggactgtagcaggcggagcgcacagcagaggttgcaactggagcgggccgtccagcatcaccaccgccaattgttattagaagggctggcaagatggaagacacatcacctccaatgcgtgaggaaaaggttgcttcataggcagtccacccagctcctcgcccagcgcttgtcacgaacatgctttcgacaatggcgccagcagctggcagccagaaggcaggaacagagggcaaccgttcgagccttatggttctgggcattttccctacaggccaaagtgtgggcgacttggctagcattcgtgttggaaaggcgacgcaagaaggctcgtctacaatgggcacttcaggcttatcaggggcaactcctgcaggaaggagcaacgcgcctgttacgattcgctgcttccatgaaggcttcacggcagcagctccaggcccagcagcaagttcaagccgcgcactcccttcaccgagctgtcaggcggtgcgctacactgtggaagcagaaggttctggggcggggcggtaagccccagcccctggccgcaatagccccatctcggaaagtaacatttgaaggccccctcttgaatagaatcgccgccggagccggcgacgggactctcgaaaccaaacgccctcaggcatcgcggccccttggcgctctgggacgtctggcagcagaggaacctcacgcactggaattgaacaccgcccactccgccagaaaacagccaaggaggcctcactttctccttgagcccgcgcagtctcagagaccacagaaaccccaggaacacgggctaggaatggcccaaccggctgcccctagtttaacaagacctttcctcgccgaggctcccaccgccctggtgcctcatagcccactccccggggctctgagcagtgccccaggacccaagcagcccccaactgcctccactggccccgagttgctcttattgcctctgtcatccttcatgccttgtggtgcggcagccccagctcgcgtgtccgcccagcgggctacccccagagacaagcccccagtccccagctcacttgcaagcgttccagaccctcatttactgctccccggagacttttccgcaacaagggctggccccgggctgagtacggctgggagcctggacctcgaggctgaactggaggagatccaacagcaactgctccattaccaaaccactaagcagaacctttggagttgccgccgtcaggcatcttcattgcgccgttggttggaactgaacagggaggagccaggcccggaggaccaggaggttgagcaacaagtccagaaagagttggagcaagtcgaaatgcaaattcagttattagctgaggaactgcaggcacagcgccagccaattggggcatgcgtggcgaggatccaagcgctccggcaggcactttgctag

SEQ ID NO: 182147 - DNA, 3636 bp, Artificial Sequence
  derived and/or modified sequence
atgaagaacctgctgacagagaagtgcatcagcagccacaacttccaccagaaggtgatcaagcagaggatggagaagaaggtggacagccgctacttcaaggatggagctgtgaagaagccctacagcgccaagaccctgagcaacaagaagagcagcgccagctttggcatcagaagagagctgcccagcaccagccacctggtgcagtaccggggcacccacacctgcacccggcagggccgcctgcgggagctgcgcatccgctgtgtggccaggaagttcctgtacctgtggatccgcatgaccttcggccgggtcttccccagcaaggcccgcttctactatgagcagaggctgctgaggaaggtgtttgaggagtggaaggaggagtggtgggtgttccagcacgagtggaagctgtgtgtgcgggctgactgccactaccgctactacctgtacaacctgatgttccagacctggaagacctacgtgcggcagcagcaggagatgaggaacaagtacatccgggcagaggtgcatgatgccaagcagaagatgaggcaggcctggaagtcctggctgatctacgtggtggtgcggaggaccaagctgcagatgcagaccacagccctggagttccggcagaggatcatcctgcgggtgtggtggagcacctggaggcagaggctgggccaggtgcgggtgtcccgggccctgcacgccagcgccctgaagcaccgggccctgagcctgcaggtgcaggcctggagccagtggagggagcagctgctgtatgtgcagaaggagaagcagaaggtggtgtctgctgtgaagcaccaccagcactggcagaagaggcgcttcctgaaggcctggctggagtacctgcaggtgcggcgggtgaagaggcagcagaatgagatggccgagcgcttccaccacgtgacagtgctgcagatctacttctgtgactggcagcaggcctgggagcggcgggagagcctgtatgcccaccacgcccaggtggagaagctggccaggaagatggccctgcggcgggccttcacccactggaagcactacatgctgctgtgtgccgaggaggccgcccagtttgagatggccgaggagcaccaccgccacagccagctgctgctgcaccgcttctggaacctgtggaggagccagatcgagcagaagaaggagcgggagctgctgcccctgctgcacgccgcctgggaccactacagaattgccctgctgtgcaagtgcatcgagctgtggctgcagtacacccagaagaggcgctacaagcagctgctgcaggcccgggcagatggccacttccagcagagggccctgcctgctgccttccacacctggaaccggctgtggcgctggaggcaccaggagaatgtgctgagcgcccgggccacccgcttccaccgggagaccctggagaagcaggtgttcagcctgtggaggcagaagatgttccagcaccgggagaaccggctggccgagaggatggccatcctgcacgccgagcggcagctgctgtaccgctcctggttcatgtggcaccagcaggccgccgcccggcaccaggagcaggagtggcagacagtggcctgtgcccaccacagacatggccgcctgaagaaggccttctgcctgtggagggagagcgcccagggcctgaggacagagaggacaggccgggtgcgggctgctgagttccacatggcccagctgctgcgctgggcctggagccagtggagggagtgcctggccctgcggggagctgagcggcagaagctgatgagagctgacctgcaccaccagcacagcgtgctgcaccgggccctgcaggcctgggtgacctaccagggccgggtgcgcagcatcctgcgggaggtggccgcccgggagagccagcacaaccggcagctgctgcggggggccctgcggcgctggaaggagaacaccatggcccgggtggatgaggccaagaagaccttccaggccagcacccactacagaaggaccatctgcagcaaggtgctggtgcagtggagggaggccgtgtctgtgcagatgtactaccggcagcaggaggactgtgccatctgggaggcccagaaggtgctggaccggggctgcctgcggacctggttccagcgctggtgggactgcagcagaagaagtgcccagcagaggctgcagctggagagagctgtgcagcaccaccaccggcagctgctgctggagggcctggcccgctggaagacccaccacctgcagtgtgtgaggaagaggctgctgcaccggcagagcacccagctgctggcccagaggctgagcaggacctgcttccggcagtggaggcagcagctggccgcccggcggcaggagcagagggccaccgtgcgggccctgtggttctgggccttcagcctgcaggccaaggtgtgggccacctggctggcctttgtgctggagaggaggaggaagaaggcccggctgcagtgggccctgcaggcctaccagggccagctgctgcaggagggcgccacccggctgctgcgctttgctgcctccatgaaggccagccggcagcagctgcaggcccagcagcaggtgcaggccgcccacagcctgcacagagctgtgagaagatgtgccaccctgtggaagcagaaggtgctgggccggggcggcaagccccagcccctggccgccatcgcccccagcaggaaggtgacctttgagggccccctgctgaacagaattgctgctggagctggagatggcaccctggagaccaagaggccccaggccagccggcccctgggcgccctgggccgcctggccgctgaggagccccacgccctggagctgaacacagcccacagcgccaggaagcagccccggcggccccacttcctgctggagcccgcccagagccagaggccccagaagccccaggagcacggcctgggcatggcccagcctgctgcccccagcctgacccggcccttcctggccgaggcccccacagccctggtgccccacagccccctgcccggggccctgagcagcgcccctggccccaagcagcccccaacagccagcactggacctgagctgctgctgctgcccctgagcagcttcatgccctgtggggctgctgccccagcccgggtgtctgcccagagggccaccccccgggacaagccccctgtgcccagcagcctggcctctgtgcctgacccccacctgctgctgcccggggacttcagcgccacccgggccggccctggcctgagcacagctggcagcctggacctggaggccgagctggaggagatccagcagcagctgctgcactaccagaccaccaagcagaacctgtggagctgccggcggcaggccagcagcctgcggcgctggctggagctgaaccgggaggagcccggccctgaggaccaggaggtggagcagcaggtgcagaaggagctggagcaggtggagatgcagatccagctgctggccgaggagctgcaggcccagaggcagcccatcggggcctgtgtggcccgcatccaggccctgcggcaggccctgtgctag

SEQ ID NO: 182148 - DNA, 3636 bp, Artificial Sequence
  derived and/or modified sequence
atgaagaacctgctgaccgagaagtgcatcagcagccacaacttccaccaaaaggtgatcaagcagaggatggagaagaaagtagatagtaggtacttcaaagatggggccgtaaaaaaaccttactccgccaagaccctgagtaacaagaaatcatctgccagttttgggattagacgtgagctgccctctacttcccacctagtgcagtaccggggcactcacacatgtacacgacagggccgcctgagagaactccgcataaggtgtgtggctcgtaaatttctgtacctgtggattcgcatgacctttggcagggtgttcccctccaaagcccgtttttattacgaacagcggcttttgcggaaggtgtttgaagagtggaaggaagagtggtgggtgtttcagcatgaatggaaattgtgcgtcagagctgattgccactataggtactatctatacaatctgatgttccaaacttggaaaacctacgtaagacagcagcaagaaatgagaaacaagtatatccgcgcagaggtgcatgatgctaaacagaaaatgaggcaggcttggaaatcgtggttgatttatgtggtggtccgaaggaccaagctgcagatgcagactaccgccctggaatttaggcagaggattatcctacgcgtctggtggtctacctggcgacagcgactcggtcaagtgagggtgtctcgcgctctacatgcttctgccctaaagcaccgggcactgtctttacaggtccaggcctggtctcaatggagagagcagctgctgtacgtgcaaaaagagaagcagaaagttgttagcgccgtgaaacaccaccagcactggcagaaaagacgatttctgaaagcttggctggagtaccttcaggtgcgccgggtaaagaggcaacagaacgagatggccgagcgtttccaccacgttacagtgctgcagatttacttttgcgattggcaacaggcatgggagcggagggagtccttgtatgcccaccacgcccaggttgagaaattagcccgcaaaatggcccttcgcagggctttcactcactggaagcactacatgctgctgtgtgccgaggaagctgctcagtttgagatggcagaggagcatcatcgtcattcacaactacttctgcacagattctggaacctctggaggtcacagatcgagcagaagaaagagagggagttgctgcccctccttcatgcagcctgggaccactaccgaatcgcccttctgtgtaaatgtatcgaactgtggctgcagtacacgcaaaaacgccgatataaacagctgctgcaggctcgcgcggatggccacttccagcagcgagcattgcccgcagcattccacacgtggaatcgactttggcggtggagacaccaggagaatgtgctatccgcacgcgccacgaggttccacagggaaactctggaaaagcaggtcttctccctgtggagacagaaaatgttccagcacagagaaaaccggctcgcagagcgcatggcaatcctgcatgcagagcgccagttgctgtaccggagctggtttatgtggcaccagcaggcagccgccaggcatcaagagcaggagtggcaaaccgtggcctgtgctcaccaccgccatggtaggttgaagaaggcgttttgcctgtggcgcgaaagcgcccagggcctccgtaccgagagaaccggcagagtccgagctgcggaattccacatggctcagcttttgcgatgggcttggtcgcagtggcgtgaatgtttggcccttaggggagccgagcggcagaaactgatgagggccgacctgcatcaccaacacagcgtccttcacagggctttgcaagcgtgggtgacctaccaaggaagggtgagatctatccttcgcgaagtggccgcccgcgagtcacagcacaatagacaactactgaggggcgccctccggaggtggaaggagaatacgatggccagagtcgatgaggctaaaaaaactttccaagcctctacgcattacagacgcacaatctgcagtaaggtccttgtccagtggcgcgaggccgtttctgtccagatgtattataggcagcaggaggactgcgcaatctgggaagcccagaaggtgttagacaggggctgtctgagaacgtggttccagcggtggtgggattgttcaagaagaagtgctcagcagcgcctccaattggagcgagcagtgcagcaccaccacagacaactgctcttagaaggccttgcaaggtggaagacccaccatctgcaatgcgtgcggaaaagactgctgcacaggcagtccacccagctgttagcccagaggctaagccgaacatgttttcgccaatggagacagcaactggcggcgagaagacaggaacagcgtgccacagtgagggcgctgtggttctgggccttctctttgcaggccaaggtgtgggccacctggcttgcttttgtcttagagagaaggaggaagaaggctcggctgcaatgggccctgcaggcatatcagggacagctcctgcaagaaggagccacccgactcctgagatttgccgcttctatgaaggcctcacgacaacagctacaagctcaacagcaggtgcaggcagctcacagcctgcacagagcagtgcggaggtgcgccacgctttggaagcaaaaagtgctcggtcgtggcggcaaaccccagcccctggccgccattgctccctcaaggaaggtaaccttcgaaggaccccttcttaataggatagcagctggtgctggcgacggcaccttggagaccaaaaggccccaggcatcaagaccgctcggcgctctgggccggctggccgcagaagagcctcacgctctggaacttaacacagctcacagtgcccgtaagcaacctaggcgaccccactttctgctagagcctgcccaaagccagagaccccaaaagccccaagagcatggccttgggatggcccagcccgctgcccccagcttgacccgaccattccttgccgaggctcctacggccctagtaccacactcgcccctgcccggggctttatcaagcgctcctggacctaagcagcctccaacagctagtaccggcccagaactgcttctgttgcctctatcgagtttcatgccctgcggcgctgcagcccccgctagagttagtgctcaacgcgctacgcctagagacaagcccccggtgcctagtagcctggcttcagttccggaccctcacctgctgcttcctggagatttcagtgccactcgcgcgggcccaggcctgtcaactgcagggtcactggacttagaagccgaactggaggaaatccaacagcaactgttgcactaccagactaccaaacagaacctctggagctgtcgacgccaggctagtagtctgcgacgctggttagagctcaacagagaggagcccgggccagaggatcaggaggtcgagcagcaggtgcagaaggaattagagcaggtggaaatgcagattcagcttttggctgaggagttacaggctcagcggcagccaattggcgcctgcgttgcacgaatccaggctttgaggcaggccctgtgctag

SEQ ID NO: 182149 - DNA, 3636 bp, Artificial Sequence
  derived and/or modified sequence
atgaagaatttgctgactgaaaaatgcatcagttcccataattttcaccagaaggtcatcaagcagagaatggaaaaaaaggtcgatagccgatacttcaaagatggtgccgtcaaaaagccatattcagctaagaccttgtccaataagaaaagttctgccagcttcggaatccggagagagttgcctagcacgtcccatctcgtgcagtatagaggcactcacacttgcacgaggcagggtcgactccgagagctgaggattcgctgcgtagcccgaaaattcctctatttatggatccggatgacctttggacgagtatttccgtcaaaggcacggttctattatgaacagcgcctacttagaaaggtcttcgaggagtggaaggaagaatggtgggtttttcagcatgaatggaagctttgcgttagagccgattgccactaccgctactacctctataatttgatgttccagacctggaaaacctacgtgagacagcagcaggagatgaggaacaagtatatacgggctgaagttcatgatgcaaagcagaaaatgaggcaagcctggaagagttggcttatctacgtggtggtcagaaggacaaagctacagatgcagacaacagctctggaattccgacaacgtatcattctcagggtttggtggtctacgtggcgtcagcgcctgggtcaggtacgagtgtcaagggcgctgcacgctagcgctcttaaacacagagctctctctctccaggtccaggcatggtcccagtggcgagagcaactcttgtatgtacaaaaggaaaagcagaaagtagtgtccgccgttaagcaccaccagcattggcaaaaaaggcgcttcctgaaagcctggttagaatacctccaggtgcgccgtgtgaaacgtcagcagaacgaaatggctgaacggtttcatcacgtaaccgttctacagatctatttctgcgattggcagcaggcctgggaaagacgcgaatccctgtacgcccaccatgcccaggtagaaaagttggcccgtaagatggccttgcggcgagcgttcacacattggaaacactacatgctgctgtgcgccgaggaagccgctcagtttgagatggccgaagaacaccatagacattcccagcttcttctccacaggttctggaacctttggaggtcccaaatagaacaaaagaaagagcgggaactgctccctttactgcacgcagcgtgggatcactatcgaatcgcactattgtgtaagtgtatagagctctggctgcagtacactcagaaaaggcgctacaagcagttactgcaggctcgggcagacggccattttcaacagcgtgccttgccagctgctttccacacatggaacaggctgtggcgatggcgccatcaagagaacgtgttatctgcgcgtgctactagatttcatcgggagacgctcgagaagcaggtattctccctgtggcggcagaagatgttccaacaccgggaaaatcgcctcgccgagcggatggccattcttcatgccgaaaggcagctgctgtatcggtcatggtttatgtggcaccaacaggctgcagcacggcatcaggagcaggagtggcagaccgtcgcttgcgcacaccaccgacatggccgactgaaaaaggccttctgcttgtggagagaatctgcccaaggcttaaggaccgaaagaacgggcagagtgcgggcagcagagttccacatggcccagttactcaggtgggcttggtcccagtggcgcgagtgtttggctctaagaggcgctgaaaggcagaagctcatgagggccgatctgcatcatcagcacagcgtgctacatcgggctcttcaggcctgggtgacctaccagggaagggttagatctattctccgggaagtcgctgcccgtgagtcccaacataacagacaactcctccgcggagcactccgaagatggaaggaaaacacaatggccagagttgatgaggctaagaaaaccttccaggcctctacccactaccggcgaactatctgctcaaaggttctggtgcagtggcgtgaggccgtctctgtccagatgtattacagacaacaggaagattgcgcaatctgggaggcgcagaaggtgctcgacaggggatgtttgagaacatggtttcaacggtggtgggactgtagcagacggtccgcacagcagcgactgcagttagagagagctgtgcagcaccaccacagacaacttctcctggagggccttgccagatggaagacacaccacctgcagtgcgtccggaagagactgctgcacagacagtctacgcagctgctcgcgcaacggctgagtcgaacatgtttcagacagtggagacagcagctggccgcaagacgacaggagcaacgggcaaccgtgcgtgccctttggttttgggctttctctctgcaggctaaagtatgggccacatggctcgcctttgtactggagcggaggcgcaagaaagccaggcttcaatgggctctccaggcctatcaaggacagctgctgcaggagggggctacaagactcctgcgattcgcagccagcatgaaagcctccagacagcagctgcaggcccagcagcaggtccaggccgctcatagcctgcatagggccgtgcgcagatgcgccaccctgtggaagcagaaggtcttgggccgtggtggcaagccgcagcccttggcagctattgcaccttctaggaaagtgacttttgaaggccctctcttaaatcgcattgccgctggggctggcgatggcactctcgaaactaagagaccgcaagcaagccggccacttggggctttaggcaggttagctgcagaggagccacacgcacttgagcttaataccgcacattctgccaggaagcagccacgcaggccccatttcctgctggaaccagcacagtcccagcggccacagaaaccccaggaacacggtttgggcatggcccaacccgcagcaccaagcctgactcgcccttttctcgccgaagcccctactgcacttgtgccccactctcccctccccggagctttgtcaagtgcaccaggccctaagcaaccaccaaccgcctcaactggccctgagctgctgctgctgccgctatcctccttcatgccttgtggggctgcagctccagccagagtgtctgcccaacgtgccactccaagggataagcctcctgtgcccagtagcctggcctccgtgcctgatccacacctactgctcccaggagatttctctgctaccagagccggtcccggactatcgacagctgggagcctggacctggaggctgagctcgaggaaatccagcagcagcttttgcactaccagacgactaaacagaacctgtggtcctgccgccgtcaagcgtcctctctgcgcagatggctggagctgaatcgcgaggagcctggacctgaagatcaggaggtagagcagcaggtgcagaaggaactggagcaggttgaaatgcagattcagctgctagcagaagagctgcaagctcagaggcagcctattggtgcgtgcgtcgcaaggatccaagctttgagacaagccctgtgctag

SEQ ID NO: 182150 - DNA, 4162 bp, Artificial Sequence
  derived and/or modified sequence
agcaagctgagctcagagcgaagctggcgagccaaggagataaagaaccctcggtggggatgcccagagggtgcatgctccacgcccctcgaaaccgattctcattgctgctgctgcaaagcaacccgaagtgcgccacctacccgactgaggctgcgcaagccccggggtctgggcggggtggtcctcgtgcgcgccgcgtcgccgtggagacgagggcgggcccgcgcgagactggcgtctagaggcgcgcgaagcgctgaggcgggcgtggaccgcgcgggagttaagaagcaggtcccggatcgccgtataccgccgggttttctcccaacgtcaggcccgatggctcggcttccccagttagaaggggaagataaaagactttgattcatgaagaatctgctcactgagaagtgtatatcaagccacaatttccatcaaaaagtgattaagcagagaatggagaagaaggttgattccaggtattttaaggatggtgcagttaagaaaccttattctgcaaagacactgtccaacaagaagtcttctgcatcctttgggatccggagggagttacctagtaccagtcatctagtgcagtatcgtggcacacatacttgtacccgacagggccggttaagagaactgcgcatcagatgcgtggccagaaagttcttatatttatggattcgaatgacttttggaagagtatttccctctaaagccagattttactatgagcagcgattactacggaaggtcttcgaagaatggaaagaggagtggtgggttttccagcacgagtggaaactctgtgttcgagctgactgtcactacaggtattacctgtacaacctgatgttccagacgtggaagacctatgtgcgtcagcagcaggagatgaggaacaagtacattagagccgaggttcatgatgcaaagcaaaagatgcgacaggcctggaagtcctggttgatctacgtggttgttcgtaggaccaaacttcagatgcagactacagctctggagtttaggcaacggattatcttacgggtgtggtggagcacgtggaggcagcgactaggacaggtccgtgtgagccgtgccctccatgcctctgctttgaagcacagggccctgagcctccaggtgcaggcttggtcacagtggcgggaacagctcctgtatgtccagaaggagaaacaaaaggttgtctctgcagtgaaacatcatcagcactggcaaaaacggagatttctaaaggcctggcttgaatacctgcaagtccgcagagtgaagagacagcagaatgagatggctgagcgattccatcatgtcactgtgctccagatatacttctgtgactggcagcaggcctgggagcggagggagagcttgtacgctcaccatgcccaggtggagaaactggccaggaagatggccctgcggcgcgcctttactcactggaaacactacatgctgctgtgtgcagaagaagctgcccagtttgagatggcagaagagcaccacaggcacagccagctgctgctgcacaggttctggaacctctggcggtctcagattgagcagaaaaaggaaagagagctgctccccttactgcatgctgcctgggaccactacagaatagcactgctgtgcaaatgtatcgaattgtggctacagtatactcagaagaggcggtacaagcagctgctacaggccagagcggatggtcatttccagcagagagccctgcctgctgccttccacacatggaacagactctggcgatggcgccaccaggaaaatgtcctcagtgcaagagcaacacgtttccacagggagacattagagaagcaagtattttctctctggaggcagaagatgtttcagcatcgagaaaaccgcctggcagagagaatggccatccttcacgcagagcgacagcttctgtataggtcttggttcatgtggcaccagcaggcagcagcacgtcaccaggagcaggagtggcaaacagtggcctgtgcccaccaccgccacgggcggctcaagaaagctttctgcctctggagggaaagtgcccaagggctcagaacagagaggacgggcagggtgcgggcagcagaattccacatggcccagctcctgcgttgggcctggagccagtggagggagtgcctggccctgcggggagcggagcggcagaagctgatgcgagcagacctgcaccaccagcacagcgtgctgcacagggcgctgcaggcatgggtgacttaccagggcagggtgcgaagcatcctccgggaggtggcagccagggagagccagcacaacaggcagctgctgcgcggggcattacgtcgctggaaagagaacaccatggcccgagtggatgaagccaaaaaaacctttcaagcaagtactcattacagaaggaccatatgttccaaggtcctggtccagtggcgggaagctgtgtcagtgcagatgtattaccgacagcaggaggactgtgccatctgggaggcccagaaggtgctggacaggggctgtctgcggacctggtttcagcgctggtgggactgcagccggaggtcagcccagcagagactgcagctggagagggcagtgcaacaccaccaccggcagctgctgctggaggggctggcccggtggaagacgcaccatctgcagtgtgtcaggaagaggctcctgcacaggcagagcacccaactgctggcacagagactcagccggacctgcttccgccagtggagacaacagctggcagccaggaggcaggagcagcgggcgacagtgcgggccctgtggttctgggccttctcgctgcaggcaaaggtgtgggccacgtggctggcctttgtactggaaaggaggagaaagaaggcgcggctgcagtgggcgctccaggcctaccaggggcagctcctccaggagggtgccacgcggctcctgcgctttgcagccagcatgaaggcctcccggcagcagctgcaggcccagcagcaggtccaggcggctcacagtctccatcgtgccgtccgccgctgtgccacgctctggaaacagaaagtgctgggccggggcgggaagcctcagcccctggcagccatcgcacccagcaggaaagtgacgtttgagggtccccttctcaaccgcattgctgctggggctggggatggcacccttgagaccaagaggccacaggcttctcggcctctgggagctctgggccgcctggctgctgaggagccccacgccctggagctcaacactgcccactcagcgaggaagcagccgcgacgcccacacttcctgttggagcctgcgcagagccagaggcctcagaagccacaggaacatggcctaggcatggctcagccagcagccccctccctgacgcggcccttcctggcagaggccccgacagcactggtcccacacagccccctgcctggggccctgtcaagcgcccctggcccgaagcagcccccgacggcaagcacaggcccggagctgctgctgctgcctctttcctccttcatgccctgcggggcggctgcaccagccagggtgtcagcacagcgggctactcctagggataagcccccggtcccctcatccctggccagtgtccctgacccccatctactccttcctggggacttctcagccaccagggctgggcctggactttcaactgcaggcagcctggaccttgaggctgaacttgaggagatccagcagcaactactgcactaccagaccaccaagcagaacctctggtcctgtcggcggcaagcgagcagcctgcgcaggtggctggagctgaacagagaggagccggggcctgaggaccaggaagtagagcagcaggtgcagaaagagctggaacaggtggaaatgcagatccagctgctggcagaggagctccaggctcagcgccagcccattggcgcctgcgttgcccgcatccaggccctgcggcaggccctgtgctagcgtgttcgcaccaggaacgcaggtgctgggctgtcggggaggcctcaggccacctccaggaacagaacacagttttaagtttgattttttttatttcaaaatgctttgcaattaaatgaattactgttcagaa

SEQ ID NO: 182151 - DNA, 3636 bp, Artificial Sequence
  derived and/or modified sequence
atgaagaacctgctgaccgagaagtgcatcagcagccacaacttccaccagaaggtgatcaagcagagaatggagaagaaggtggacagcagatacttcaaggacggcgccgtgaagaagccctacagcgccaagaccctgagcaacaagaagagcagcgccagcttcggcatcagaagagagctgcccagcaccagccacctggtgcagtacagaggcacccacacctgcaccagacagggcagactgagagagctgagaatcagatgcgtggccagaaagttcctgtacctgtggatcagaatgaccttcggcagagtgttccccagcaaggccagattctactacgagcagagactgctgagaaaggtgttcgaggagtggaaggaggagtggtgggtgttccagcacgagtggaagctgtgcgtgagagccgactgccactacagatactacctgtacaacctgatgttccagacctggaagacctacgtgagacagcagcaggagatgagaaacaagtacatcagagccgaggtgcacgacgccaagcagaagatgagacaggcctggaagagctggctgatctacgtggtggtgagaagaaccaagctgcagatgcagaccaccgccctggagttcagacagagaatcatcctgagagtgtggtggagcacctggagacagagactgggccaggtgagagtgagcagagccctgcacgccagcgccctgaagcacagagccctgagcctgcaggtgcaggcctggagccagtggagagagcagctgctgtacgtgcagaaggagaagcagaaggtggtgagcgccgtgaagcaccaccagcactggcagaagagaagattcctgaaggcctggctggagtacctgcaggtgagaagagtgaagagacagcagaacgagatggccgagagattccaccacgtgaccgtgctgcagatctacttctgcgactggcagcaggcctgggagagaagagagagcctgtacgcccaccacgcccaggtggagaagctggccagaaagatggccctgagaagagccttcacccactggaagcactacatgctgctgtgcgccgaggaggccgcccagttcgagatggccgaggagcaccacagacacagccagctgctgctgcacagattctggaacctgtggagaagccagatcgagcagaagaaggagagagagctgctgcccctgctgcacgccgcctgggaccactacagaatcgccctgctgtgcaagtgcatcgagctgtggctgcagtacacccagaagagaagatacaagcagctgctgcaggccagagccgacggccacttccagcagagagccctgcccgccgccttccacacctggaacagactgtggagatggagacaccaggagaacgtgctgagcgccagagccaccagattccacagagagaccctggagaagcaggtgttcagcctgtggagacagaagatgttccagcacagagagaacagactggccgagagaatggccatcctgcacgccgagagacagctgctgtacagaagctggttcatgtggcaccagcaggccgccgccagacaccaggagcaggagtggcagaccgtggcctgcgcccaccacagacacggcagactgaagaaggccttctgcctgtggagagagagcgcccagggcctgagaaccgagagaaccggcagagtgagagccgccgagttccacatggcccagctgctgagatgggcctggagccagtggagagagtgcctggccctgagaggcgccgagagacagaagctgatgagagccgacctgcaccaccagcacagcgtgctgcacagagccctgcaggcctgggtgacctaccagggcagagtgagaagcatcctgagagaggtggccgccagagagagccagcacaacagacagctgctgagaggcgccctgagaagatggaaggagaacaccatggccagagtggacgaggccaagaagaccttccaggccagcacccactacagaagaaccatctgcagcaaggtgctggtgcagtggagagaggccgtgagcgtgcagatgtactacagacagcaggaggactgcgccatctgggaggcccagaaggtgctggacagaggctgcctgagaacctggttccagagatggtgggactgcagcagaagaagcgcccagcagagactgcagctggagagagccgtgcagcaccaccacagacagctgctgctggagggcctggccagatggaagacccaccacctgcagtgcgtgagaaagagactgctgcacagacagagcacccagctgctggcccagagactgagcagaacctgcttcagacagtggagacagcagctggccgccagaagacaggagcagagagccaccgtgagagccctgtggttctgggccttcagcctgcaggccaaggtgtgggccacctggctggccttcgtgctggagagaagaagaaagaaggccagactgcagtgggccctgcaggcctaccagggccagctgctgcaggagggcgccaccagactgctgagattcgccgccagcatgaaggccagcagacagcagctgcaggcccagcagcaggtgcaggccgcccacagcctgcacagagccgtgagaagatgcgccaccctgtggaagcagaaggtgctgggcagaggcggcaagccccagcccctggccgccatcgcccccagcagaaaggtgaccttcgagggccccctgctgaacagaatcgccgccggcgccggcgacggcaccctggagaccaagagaccccaggccagcagacccctgggcgccctgggcagactggccgccgaggagccccacgccctggagctgaacaccgcccacagcgccagaaagcagcccagaagaccccacttcctgctggagcccgcccagagccagagaccccagaagccccaggagcacggcctgggcatggcccagcccgccgcccccagcctgaccagacccttcctggccgaggcccccaccgccctggtgccccacagccccctgcccggcgccctgagcagcgcccccggccccaagcagccccccaccgccagcaccggccccgagctgctgctgctgcccctgagcagcttcatgccctgcggcgccgccgcccccgccagagtgagcgcccagagagccacccccagagacaagccccccgtgcccagcagcctggccagcgtgcccgacccccacctgctgctgcccggcgacttcagcgccaccagagccggccccggcctgagcaccgccggcagcctggacctggaggccgagctggaggagatccagcagcagctgctgcactaccagaccaccaagcagaacctgtggagctgcagaagacaggccagcagcctgagaagatggctggagctgaacagagaggagcccggccccgaggaccaggaggtggagcagcaggtgcagaaggagctggagcaggtggagatgcagatccagctgctggccgaggagctgcaggcccagagacagcccatcggcgcctgcgtggccagaatccaggccctgagacaggccctgtgctag

SEQ ID NO: 182152 - protein, 649 aa, Artificial Sequence
  derived and/or modified sequence
MSKRLRSSEVCADCSGPDPSWASVNRGTFLCDECCSVHRSLGRHISQVRHLKHTPWPPTLLQMVETLYNNGANSIWEHSLLDPASIMSGRRKANPQDKVHPNKAEFIRAKYQMLAFVHRLPCRDDDSVTAKDLSKQLHSSVRTGNLETCLRLLSLGAQANFFHPEKGNTPLHVASKAGQILQAELLAVYGADPGTQDSSGKTPVDYARQGGHHELAERLVEIQYELTDRLAFYLCGRKPDHKNGQHFIIPQMADSSLDLSELAKAAKKKLQSLSNHLFEELAMDVYDEVDRRETDAVWLATQNHSALVTETTVVPFLPVNPEYSSTRNQGQPKKSLDSDLSDGPVTVQEFMEVKNALVASEAKIQQLMKVNNNLSDELRIMQKKLQTLQSENSNLRKQATTNVYQVQTGSEYTDTSNHSSLKRRPSARGSRPMSMYETGSGQKPYLPMGEASRPEESRMRLQPFPAHASRLEKQNSTPESDYDNTPNDMEPDGMGSSRKGRQRSMVWPGDGLVPDTAEPHVAPSPTLPSTEDVIRKTEQITKNIQELLRAAQENKHDSYIPCSERIHVAVTEMAALFPKKPKSDMVRTSLRLLTSSAYRLQSECKKTLPGDPGSPTDVQLVTQQVIQCAYDIAKAAKQLVTITTKENNN

SEQ ID NO: 182153 - DNA, 1950 bp, Artificial Sequence
  derived and/or modified sequence
atgtctaagcgactgcgtagctccgaggtgtgcgcagattgttcgggcccagatccttcttgggccagtgtcaatagagggaccttcctatgtgacgaatgttgttccgtgcaccggtcattgggacgccatattagtcaagtgaggcacctaaaacacacaccctggccccccacactgttgcaaatggtcgagaccttgtataataacggagctaacagtatctgggagcattctcttttagacccagcttccatcatgtccggacgtagaaaggccaaccctcaagataaagttcatccaaacaaggctgaattcatacgcgcgaaataccagatgctagcctttgttcatcgcctcccttgtcgtgacgatgacagcgttaccgccaaagacttgtccaagcagctccactccagcgttaggaccgggaacctcgaaacatgcctgcgacttctgtctctcggtgcccaggcaaatttttttcatccagagaaaggaaacacccctctccatgtagccagtaaagccggacagatcctgcaagccgagctgttggctgtgtatggcgcagacccgggcacccaggattcctcagggaagacccccgtcgactacgcacgtcagggaggacaccacgaactggcggaaagattggttgaaattcagtatgaactgacggataggttggccttttacttgtgtggaaggaaaccagaccataagaatggacagcactttatcatccctcagatggccgactcctcgctggacctgtccgaattagccaaagctgctaagaagaagcttcaatctctttctaatcacctgttcgaagagttagccatggatgtgtacgatgaagtggacaggcgcgagaccgatgctgtttggttagccactcagaaccacagcgccttggtgactgaaacaacagtggtcccatttctaccagtaaacccggaatattcgtccactcgaaaccaggggcagcctaagaagtcacttgatagtgacctgtccgacggaccagtgacagtgcaagagtttatggaagtgaaaaatgccctagtggcgtctgaagctaagatacagcagctgatgaaagtcaacaacaacctttccgacgaacttaggattatgcagaagaaactgcaaacactccagtctgaaaattccaacctgcggaagcaggccacgactaatgtttaccaggtccagacagggagcgagtatacagatacatctaaccacagtagcttgaagagaagacctagtgcccgcggatcgaggcccatgtctatgtatgagaccggcagcggccaaaaaccgtatctcccaatgggagaggcctcccgccctgaggaatctcgaatgagattgcagcctttccccgctcatgcatctagattagagaaacaaaacagcacccctgaatctgactacgataacactccaaacgatatggagcccgacggcatggggagttctaggaagggccggcagaggagtatggtatggccaggtgacggactggtgcctgacaccgcagaaccacacgtcgcacctagcccgacactgccaagcactgaagacgtgattagaaaaacagaacaaattacaaagaatattcaagaactgctgcgcgccgcacaggaaaataagcacgactcttacatcccttgcagtgaacgcattcacgtggctgtcacagagatggctgccctgttccccaaaaagcccaagtctgacatggtgcgcacgagcctaagactgttaacctcctctgcgtatcgactccaaagcgaatgtaagaagaccctcccaggcgacccgggaagccctacagacgttcaactagtcacacagcaagtgatccagtgcgcatatgacatagcaaaagccgcgaagcagctggtgaccatcactacgaaagaaaataacaattag

SEQ ID NO: 182154 - DNA, 1950 bp, Artificial Sequence
  derived and/or modified sequence
atgagcaagaggctgcggagcagcgaggtgtgtgccgactgcagcggccctgaccccagctgggcctctgtgaacagaggcaccttcctgtgtgatgagtgctgcagcgtgcacaggagcctgggccgccacatcagccaggtgcgccacctgaagcacaccccctggccacccaccctgctgcagatggtggagaccctgtacaacaacggggccaacagcatctgggagcacagcctgctggaccctgccagcatcatgagcggccgcaggaaggccaacccccaggacaaggtgcaccccaacaaggccgagttcatccgggccaagtaccagatgctggcctttgtgcaccggctgccctgcagagatgatgattctgtgacagccaaggacctgagcaagcagctgcacagctctgtgaggactggaaacctggagacctgcctgcggctgctgagcctgggcgcccaggccaacttcttccaccctgagaagggcaacacccccctgcacgtggccagcaaggccggccagatcctgcaggccgagctgctggccgtgtatggagctgaccccggcacccaggacagcagcggcaagacccctgtggactatgcccggcagggcggccaccacgagctggccgagcggctggtggagatccagtatgagctgacagaccggctggccttctacctgtgtggcaggaagccagaccacaagaatggccagcacttcatcatcccccagatggctgacagcagcctggacctgtctgagctggccaaggccgccaagaagaagctgcagagcctgagcaaccacctgtttgaggagctggccatggatgtgtatgatgaggtggacagaagagaaacagatgctgtgtggctggccacccagaaccacagcgccctggtgacagagaccaccgtggtgcccttcctgcctgtgaaccctgagtacagcagcaccaggaaccagggccagcccaagaagagcctggacagcgacctgagtgatggccctgtgacagtgcaggagttcatggaggtgaagaatgccctggtggccagcgaggccaagatccagcagctgatgaaggtgaacaacaacctgagtgatgagctgcgcatcatgcagaagaagctgcagaccctgcagagcgagaacagcaacctgaggaagcaggccaccaccaacgtgtaccaggtgcagacaggcagcgagtacacagacaccagcaaccacagcagcctgaagagaagacccagcgcccggggcagccggcccatgtccatgtatgagaccggcagcggccagaagccctacctgcccatgggagaggccagcaggcctgaggagagcaggatgaggctgcagcccttccctgcccacgccagccggctggagaagcagaacagcaccccagagagtgactatgacaacaccccaaatgacatggagccagatggcatgggcagcagcaggaagggccggcagaggtccatggtgtggccaggagatggcctggtgcctgacacagctgagccccacgtggcccccagccccaccctgcccagcacagaagatgtgatcaggaagacagagcagatcaccaagaacatccaggagctgctgcgggccgcccaggagaacaagcatgacagctacatcccctgcagcgagcgcatccacgtggccgtgacagagatggccgccctcttccccaagaagcccaagagtgacatggtgaggaccagcctgcggctgctgaccagcagcgcctaccgcctgcagagcgagtgcaagaagaccctgcccggggaccccggcagccccacagatgtgcagctggtgacccagcaggtgatccagtgtgcctatgacatcgccaaggccgccaagcagctggtgaccatcaccaccaaggagaacaacaactag

SEQ ID NO: 182155 - DNA, 1950 bp, Artificial Sequence
  derived and/or modified sequence
atgagcaagcggctgcggagcagcgaggtgtgcgccgactgcagcggtcctgatcctagttgggctagcgttaatcgcggaacatttctgtgcgacgaatgctgcagcgttcatagatctctgggcaggcacatatcccaagtccggcacctcaaacacacaccttggccgcctaccctgctgcaaatggtcgagacactttataacaacggcgccaacagcatttgggaacactccctcctagacccagccagtatcatgagcggacgaagaaaagctaacccccaggataaggttcaccctaataaggccgagttcattagggcgaaatatcaaatgttggcgtttgtgcaccgcctgccctgtcgggacgatgatagcgtgaccgcaaaggatctatccaagcaactccacagcagtgttcgaacaggtaacctcgaaacctgccttcgcttgctgagtctcggggcacaggctaatttcttccaccctgaaaaggggaatacccccctacatgtggcctcgaaagccgggcagatcctccaggctgagctgttagccgtgtatggcgcagatccaggaacacaagattcaagcggaaagactcccgtggattacgccaggcaaggcggtcaccacgaactggctgaaagactggtcgaaatccagtatgaactgacggataggctggccttctatctttgcgggagaaagcccgatcataagaacgggcaacacttcatcatcccacagatggctgacagtagccttgatctctcggagctggcgaaagctgccaagaagaaactccagtctttgagtaatcatctcttcgaggaactggccatggacgtatatgacgaggtggatcgcagggagaccgacgcagtttggctagctacacagaatcactctgctcttgtaactgagacaaccgttgtaccatttctccctgtaaatcccgaatactctagcacacggaatcaaggccaaccaaagaaaagcctggacagcgacctctccgacggccccgttaccgttcaggagtttatggaagtgaagaatgctctggtagccagcgaagcaaagatccagcaactgatgaaagtgaataataatctttccgatgagctgcggattatgcaaaaaaaactgcagacacttcagagcgaaaattctaaccttaggaaacaggcgacaacgaacgtgtatcaagtgcagactggcagcgaatacacagatacttctaaccattcttctctgaagagacgaccctccgccagggggtctaggccaatgagtatgtacgagacagggtccggacagaagccatacctcccgatgggggaagcctcccggcccgaagaatcccgcatgcgactgcagcctttccctgctcacgcgagtagactggaaaagcagaattctacccctgagagcgactatgataatacaccaaacgacatggaacctgatggaatgggatccagtcgcaagggccggcaaaggtcgatggtgtggcctggcgatggcctggtgcctgacactgccgagcctcatgtggcaccctcacccactctcccgagcactgaggacgtaatcaggaaaaccgaacagattacaaagaatatccaggagctgctccgggccgcccaggagaataagcatgattcctacatcccatgctcagagcggatccacgtagccgtgacagagatggcagctctttttccaaaaaagccgaaaagcgacatggtaagaaccagccttaggctgctgacatcgtcagcttatcgcctgcagtccgaatgtaagaagacactccccggggaccctggatcacccaccgacgtacagctagtcacccagcaggtcatccagtgcgcgtacgacatagccaaagctgccaagcagcttgtgacaattactaccaaagagaataataactag

SEQ ID NO: 182156 - DNA, 1950 bp, Artificial Sequence
  derived and/or modified sequence
atgagcaagagactgcggtcgtcggaagtgtgcgcagactgctctggtccggacccgtcatgggcaagcgtgaataggggaactttcctgtgcgacgaatgttgctctgtccatcgctccctcgggaggcatatctcccaggtaaggcacctgaaacataccccttggccccctaccctgctccagatggtggagactctgtacaataatggagccaattccatctgggaacactctctgctcgaccctgctagtattatgagcggtcgcagaaaagctaatccacaggacaaggttcaccctaacaaggcagagtttatccgagccaagtaccagatgttggcctttgtacaccgcctgccctgtcgagacgatgactctgtgacggctaaggacctcagcaaacaactacatagtagcgtcaggaccggcaaccttgaaacatgcctcagactcctgagcttgggcgcacaagcaaacttctttcatccagaaaaaggcaatacccctctgcacgtggcttccaaggccggtcaaattctccaggcggagctgctggcagtgtacggcgctgaccctgggacacaggattcctctgggaagacacctgttgactatgcacggcagggtggacaccacgaattggccgagagacttgtagaaatccagtacgagctgaccgataggcttgctttctacctatgtggacgcaaacctgatcataagaacggccagcattttattattccccagatggccgactcctctcttgacctgagcgaacttgccaaggccgctaagaaaaaactgcagtcactatctaatcatttgtttgaagagctggcaatggacgtgtatgacgaggtagaccggcgagagactgacgccgtctggttggcaactcagaatcatagcgctctggtcaccgaaacaacagttgtgcccttcctgccggtcaatcccgaatattcatcaacccgcaaccagggtcagcctaaaaagagcctggattcggacctgagcgatggtcccgtgaccgtacaagagtttatggaggtcaaaaatgcgcttgtcgcctcagaagccaaaattcagcaacttatgaaggttaacaacaatctgtcagatgagctgagaataatgcagaagaagcttcagacacttcaatctgaaaatagtaatctcagaaagcaggctactaccaatgtctaccaggtgcagaccggatcagagtatactgatacttcgaaccacagctcattgaaacggaggccctccgcaagaggttcccggccaatgagcatgtatgaaaccggatccggccagaaaccgtacttacccatgggcgaggcatctaggcccgaggaaagccgcatgagattacagccctttccagcccatgcttcacggcttgagaaacaaaacagcacaccagaatccgattacgacaacactccaaatgacatggaacccgatggcatgggctccagtagaaagggcaggcagcggtccatggtctggccgggagacggcctcgtaccggacaccgcagagcctcacgtggccccatcccccaccctgccgtccacggaggatgtaattcggaagacagagcaaatcaccaagaacatacaagagctgctacgcgctgctcaagagaataaacatgactcctacatcccttgcagtgagcggattcacgtggcggtcaccgaaatggcagccctgtttccaaaaaagcccaaatctgatatggttaggacttctctgcgtctgcttacaagcagtgcttatcggctgcagtctgagtgcaagaaaaccttacccggtgaccccggaagcccgactgacgtccagctggtcacccagcaggttattcagtgcgcttacgacatagccaaggcagccaaacagcttgtgaccataaccacaaaagagaacaataattag

SEQ ID NO: 182157 - DNA, 5291 bp, Artificial Sequence
  derived and/or modified sequence
acctccccgcgcgtgcgtgctgtgccaaggctgcaaggcgctgaggggagaggcgccgccgtcagcgccgccgcagctgggacccgttagagcggaagcgccgccgccaccgccgcctttgctgtcccccggcctctagttccccgcaggtgggaggtgggagccatgtcgaaacggctccggagcagcgaggtgtgcgctgactgcagcgggccggatccttcctgggcatcagtaaataggggaacgtttttatgtgatgagtgctgcagtgtccatcggagtctagggcgccatatctcccaagtgaggcatctgaaacacacaccgtggcctccaacactgcttcagatggttgagaccttgtataataacggtgctaactctatatgggagcattctttgctggaccctgcgtctattatgagtggaagacgtaaagctaatccacaggataaagtacatcccaataaagcggaattcatcagagccaagtatcagatgttagcgttcgtccatcgcttgccctgccgggatgacgatagtgtgactgccaaagatcttagcaagcaactccattcgagcgtgagaacagggaatcttgaaacctgtttgagactgttatctttaggagcacaagccaacttctttcatcctgaaaaaggaaacaccccactccatgttgcctccaaagcagggcagattttacaggctgaattattggcagtatatggagcagacccaggcacacaggattctagtgggaaaactcccgttgattatgcaaggcaaggagggcaccatgagctggcagagcgcctcgtggaaatacagtatgagctaacggacagactagccttctatctctgtggcaggaaaccagatcacaaaaatggacagcactttataatacctcaaatggcagacagcagcctggatttgtctgaattggcaaaagctgctaagaagaaacttcaatctctaagtaatcatttgtttgaagaacttgccatggatgtgtacgatgaagttgacaggcgagagacggatgcagtctggcttgccacgcaaaaccacagcgccctggtaaccgagacaacggtcgtcccctttcttccggtcaatcctgagtactcatcaacacgaaatcagggacagcctaaaaagagcctagattcagatttatcagatggaccagtcactgtacaggaatttatggaggtcaaaaacgctctagtggcttctgaggccaagatacagcagctaatgaaggtgaataacaacttgagtgacgagctgagaattatgcagaaaaagcttcaaacactccagagtgaaaattcgaacctcaggaaacaggccacaaccaatgtatatcaggtgcaaactggttctgagtacacagacacttccaaccactcttccttaaagagacgtccgtctgcccggggcagtaggcccatgtccatgtacgagaccggatcaggtcagaaaccatatctcccaatgggagaagcgagccgccccgaagagagcaggatgagactccagcccttccccgcgcacgcatccaggctggagaagcagaacagcacacctgagagtgactacgacaacactcccaacgacatggagccagatggcatggggtcaagccgaaagggacggcaaagaagtatggtgtggccaggggatggcttggtaccagacacagcagaaccccatgtggccccaagccccactctccctagcaccgaagatgtcatcaggaagactgaacagatcaccaaaaacatacaggagctcttaagagcagcccaagaaaataaacatgacagttatattccctgctcagagaggatacacgtagctgttacagaaatggcagcattattccccaaaaaacccaagtctgatatggtgaggacttcccttcgtttactgacgtccagtgcctaccgactgcagtcagagtgcaagaagaccctcccaggggaccccggctcacccacagacgttcagctggtcacgcagcaggtcatccagtgtgcgtacgacatcgccaaggctgccaagcagctggttaccatcaccaccaaagagaacaacaactgacaagggcagggcaccgcctcctctgttttctaggctttataaagtccaatttcaaattcagacgcagaactcttcagatttctacaaaaagaaacatttaatgacggtttaaaactttttaaaagaaaactcagtattatttttgcatgttttctaaccaattttcaactatttaacccacttgccttattttgtgcctatttgctggtttagtttctgatgttcggttgtgttgtcaacaactgttgagttgatcacatacatccaaaagtatagtttcattgtctaaagtttgtgaaaacttttccatcccttaaaactccctgcctatggctgaaactataaatgaaatttttcataaaacattttcttgagagagttcagttaaaaaagaaaaaatcagcgtcatttgttccctgccaagcatcgtgcaataagtgaatttcctggcctacttcataatctctaagtttggggtatctccaagcatgtatgtagagaaaggactttgccgctttttaaaactagtgtcacagtctctcttgggaggaaacaatgaattggttcatttcttctcagtgttttaccctgttacatgttctgttatttaatgttgttatctcaagctcctatctcttgatgttttcttgtcatcttgaaggctccatggaatgagataaagcattgacccaccacaggacatctcatgaagccatgttcagggtaggagctccacgcacatcaccacccattgtcaggtgctctccctcacccctgtaagccagacagtttgttcaaaacctgcagcaaagagaagcatcagtctaacaagccagaactcattttgtgccacccatttaggtatcactaccatgaactatagggaaaagaaatcacctactccctgacactgtgttgtacccttcatccaaaagtcagcttgcttctctgaccacttacagctttctcacatgagttgcttcacatttttcatcatctttaaggacttcttataaggaaagatgtatcgtatcgcagtcatctgagttagtttctcctccatcacctcatgagtacttaaaaattagacatcaactttcaagagttccttagagagtgtgctctagctggctgcctgctaccccaaagctctgaaagagtaaggttgaagtgctggaacatgctcagattgttttttagttactcaaaagccccttcttgttctgaatgtgaaagctcttcccgttcctgcttactgcagccattctgtgtgtgtggttcagaccctggcctagggccggtgatgtggatgagtgaagggagccaggtacacggcagcagggcagaggagactatggggagcccaccgcctacacagtaggggcagtagcccccagctccacgcctgttgccatgtggaaaagtgggcctagggtggccacagctttgatttttcaagagacaagaaacctagatgttttttggtgccatctctccatttataaatgttggcaaccaatttgaacactttcagagaccatgtgcaggtgagctgtgtcctctaggctgccagctcacagcccccaccccagggccctgtaagctgtgcagtgtgagggcctggcttccccggacacacctggagcagcctctgagtcttacccgtaatggagccggccaaccctgtgtgttatgttgctgtcgctcctgtttttaaccatatgttctgtcccatagcagtcattcacacatgtgaagaagacacaagaatcaaagtacaagttgcctcaatacatgctaataactaagcttctattttcacaggactgatcgatgcacacctttatagcttgaccatatgctgtcatgaaagtagcaccccgacggtgcttgctttactaagtcaccgtgtgtggatgcttttgtcgcattttgcttcactgtgagtagcatgggaaaagggtccacgtctccaaaagactcttccacttgtttgtcccacagccctaagtgccacattgctgttggatgctcccgggatgccttctagaagggggcctcccaccttaagttcaggcgccatctgatagccttttctgcaggcttcatgtccttagctgaccctcctttatcttgcaaacccctgcccctgctgtcccagggaggacgggcttctgtagaggcttctgggaaatgagctgtctgcaggaggtgaagcagtgttttccttggaatgtttgaggacctgcaatagaagatgttgcctttatggccctagagaaagtcaaggaacatggggaccaacaaagcatttccagttgtaagaatatgtcagaagagtgctcggttagcccacggtgccaaaactccaaacaagttccccggtggaatgacgtggccattggagggctgcaggtcgtcctctctgtatgtgccccgcgcatttccttggcctcatctgagatctggtgtcagagttctctgctcctgttggcaaatcgcaccttatctgaacatttgttccagccaccttttgcacatggattccgtaccttgcactagcaatgtctaccttcagtaacgtcgttctttttcaccctgtattctcaatgatcccttcctccccatatgccacccttcccccaaagctgatagggcagaggtgcactttatgaaactggcacttgactgaacagaaggaaacagctgtacctctaagctcctttcacagaaatcgtcatctgccttggaatgcaaatagttcttatttgccaaagaacagtgaattgggcccaaagatcaaacacagcatttcatgtaatcagaattctaaacgcacaactcgggagctgtgcacggcttctcaagtgattcagttgcagaaccaagagcaaaactcgcctgtttttgtcctcaatggcacccatgagctttccaatagtatagttttctttctttccttgtcctggttgaaggtaacgtgttcctagaaaagaaaatgctgcataggaaaactgagatgccttttattccaacgtgtttgatccctgtcactcattattctgtactttttattgtacattctattcctgtaattattgtgccctttaagtgttgtaaaatcgttttggaatttgtgcctgctagttatgcaataaacaggctctacaagtgtt

SEQ ID NO: 182158 - DNA, 1950 bp, Artificial Sequence
  derived and/or modified sequence
atgagcaagagactgagaagcagcgaggtgtgcgccgactgcagcggccccgaccccagctgggccagcgtgaacagaggcaccttcctgtgcgacgagtgctgcagcgtgcacagaagcctgggcagacacatcagccaggtgagacacctgaagcacaccccctggccccccaccctgctgcagatggtggagaccctgtacaacaacggcgccaacagcatctgggagcacagcctgctggaccccgccagcatcatgagcggcagaagaaaggccaacccccaggacaaggtgcaccccaacaaggccgagttcatcagagccaagtaccagatgctggccttcgtgcacagactgccctgcagagacgacgacagcgtgaccgccaaggacctgagcaagcagctgcacagcagcgtgagaaccggcaacctggagacctgcctgagactgctgagcctgggcgcccaggccaacttcttccaccccgagaagggcaacacccccctgcacgtggccagcaaggccggccagatcctgcaggccgagctgctggccgtgtacggcgccgaccccggcacccaggacagcagcggcaagacccccgtggactacgccagacagggcggccaccacgagctggccgagagactggtggagatccagtacgagctgaccgacagactggccttctacctgtgcggcagaaagcccgaccacaagaacggccagcacttcatcatcccccagatggccgacagcagcctggacctgagcgagctggccaaggccgccaagaagaagctgcagagcctgagcaaccacctgttcgaggagctggccatggacgtgtacgacgaggtggacagaagagagaccgacgccgtgtggctggccacccagaaccacagcgccctggtgaccgagaccaccgtggtgcccttcctgcccgtgaaccccgagtacagcagcaccagaaaccagggccagcccaagaagagcctggacagcgacctgagcgacggccccgtgaccgtgcaggagttcatggaggtgaagaacgccctggtggccagcgaggccaagatccagcagctgatgaaggtgaacaacaacctgagcgacgagctgagaatcatgcagaagaagctgcagaccctgcagagcgagaacagcaacctgagaaagcaggccaccaccaacgtgtaccaggtgcagaccggcagcgagtacaccgacaccagcaaccacagcagcctgaagagaagacccagcgccagaggcagcagacccatgagcatgtacgagaccggcagcggccagaagccctacctgcccatgggcgaggccagcagacccgaggagagcagaatgagactgcagcccttccccgcccacgccagcagactggagaagcagaacagcacccccgagagcgactacgacaacacccccaacgacatggagcccgacggcatgggcagcagcagaaagggcagacagagaagcatggtgtggcccggcgacggcctggtgcccgacaccgccgagccccacgtggcccccagccccaccctgcccagcaccgaggacgtgatcagaaagaccgagcagatcaccaagaacatccaggagctgctgagagccgcccaggagaacaagcacgacagctacatcccctgcagcgagagaatccacgtggccgtgaccgagatggccgccctgttccccaagaagcccaagagcgacatggtgagaaccagcctgagactgctgaccagcagcgcctacagactgcagagcgagtgcaagaagaccctgcccggcgaccccggcagccccaccgacgtgcagctggtgacccagcaggtgatccagtgcgcctacgacatcgccaaggccgccaagcagctggtgaccatcaccaccaaggagaacaacaactag

SEQ ID NO: 182159 - protein, 1698 aa, Artificial Sequence
  derived and/or modified sequence
MVGELRYREFRVPLGPGLHAYPDELIRQRVGHDGHPEYQIRWLILRRGDEGDGGSGQVDCKAEHILLWMSKDEIYANCHKMLGEDGQVIGPSQESAGEVGALDKSVLEEMETDVKSLIQRALRQLEECVGTIPPAPLLHTVHVLSAYASIEPLTGVFKDPRVLDLLMHMLSSPDYQIRWSAGRMIQALSSHDAGTRTQILLSLSQQEAIEKHLDFDSRCALLALFAQATLSEHPMSFEGIQLPQVPGRVLFSLVKRYLHVTSLLDQLNDSAAEPGAQNTSAPEELSGERGQLELEFSMAMGTLISELVQAMRWDQASDRPRSSARSPGSIFQPQLADVSPGLPAAQAQPSFRRSRRFRPRSEFASGNTYALYVRDTLQPGMRVRMLDDYEEISAGDEGEFRQSNNGVPPVQVFWESTGRTYWVHWHMLEILGFEEDIEDMVEADEYQGAVASRVLGRALPAWRWRPMTELYAVPYVLPEDEDTEECEHLTLAEWWELLFFIKKLDGPDHQEVLQILQENLDGEILDDEILAELAVPIELAQDLLLTLPQRLNDSALRDLINCHVYKKYGPEALAGNQAYPSLLEAQEDVLLLDAQAQAKDSEDAAKVEAKEPPSQSPNTPLQRLVEGYGPAGKILLDLEQALSSEGTQENKVKPLLLQLQRQPQPFLALMQSLDTPETNRTLHLTVLRILKQLVDFPEALLLPWHEAVDACMACLRSPNTDREVLQELIFFLHRLTSVSRDYAVVLNQLGARDAISKALEKHLGKLELAQELRDMVFKCEKHAHLYRKLITNILGGCIQMVLGQIEDHRRTHQPINIPFFDVFLRYLCQGSSVEVKEDKCWEKVEVSSNPHRASKLTDHNPKTYWESNGSAGSHYITLHMRRGILIRQLTLLVASEDSSYMPARVVVCGGDSTSSLHTELNSVNVMPSASRVILLENLTRFWPIIQIRIKRCQQGGIDTRIRGLEILGPKPTFWPVFREQLCRHTRLFYMVRAQAWSQDMAEDRRSLLHLSSRLNGALRQEQNFADRFLPDDEAAQALGKTCWEALVSPVVQNITSPDEDGISPLGWLLDQYLECQEAVFNPQSRGPAFFSRVRRLTHLLVHVEPCEAPPPVVATPRPKGRNRSHDWSSLATRGLPSSIMRNLTRCWRAVVEKQVNNFLTSSWRDDDFVPRYCEHFNILQNSSSELFGPRAAFLLALQNGCAGALLKLPFLKAAHVSEQFARHIDQQIQGSRIGGAQEMERLAQLQQCLQAVLIFSGLEIATTFEHYYQHYMADRLLGVVSSWLEGAVLEQIGPCFPNRLPQQMLQSLSTSKELQRQFHVYQLQQLDQELLKLEDTEKKIQVGLGASGKEHKSEKEEEAGAAAVVDVAEGEEEEEENEDLYYEGAMPEVSVLVLSRHSWPVASICHTLNPRTCLPSYLRGTLNRYSNFYNKSQSHPALERGSQRRLQWTWLGWAELQFGNQTLHVSTVQMWLLLYLNDLKAVSVESLLAFSGLSADMLNQAIGPLTSSRGPLDLHEQKDIPGGVLKIRDGSKEPRSRWDIVRLIPPQTYLQAEGEDGQNLEKRRNLLNCLIVRILKAHGDEGLHIDQLVCLVLEAWQKGPCPPRGLVSSLGKGSACSSTDVLSCILHLLGKGTLRRHDDRPQVLSYAVPVTVMEPHTESLNPGSSGPNPPLTFHTLQIRSRGVPYASCTATQSFSTFR

SEQ ID NO: 182160 - protein, 1594 aa, Artificial Sequence
  derived and/or modified sequence
MKLYVFLVNTGTTLTFDTELTVQTVADLKHAIQSKYKIAIQHQVLVVNGGECMAADRRVCTYSAGTDTNPIFLFNKEMILCDRPPAIPKTTFSTENDMEIKVEESLMMPAVFHTVASRTQLALEMYEVAKKLCSFCEGLVHDEHLQHQGWAAIMANLEDCSNSYQKLLFKFESIYSNYLQSIEDIKLKLTHLGTAVSVMAKIPLLECLTRHSYRECLGRLDSLPEHEDSEKAEMKRSTELVLSPDMPRTTNESLLTSFPKSVEHVSPDTADAESGKEIRESCQSTVHQQDETTIDTKDGDLPFFNVSLLDWINVQDRPNDVESLVRKCFDSMSRLDPRIIRPFIAECRQTIAKLDNQNMKAIKGLEDRLYALDQMIASCGRLVNEQKELAQGFLANQKRAENLKDASVLPDLCLSHANQLMIMLQNHRKLLDIKQKCTTAKQELANNLHVRLKWCCFVMLHADQDGEKLQALLRLVIELLERVKIVEALSTVPQMYCLAVVEVVRRKMFIKHYREWAGALVKDGKRLYEAEKSKRESFGKLFRKSFLRNRLFRGLDSWPPSFCTQKPRKFDCELPDISLKDLQFLQSFCPSEVQPFLRVPLLCDFEPLHQHVLALHNLVKAAQSLDEMSQTITDLLSEQKASVSQTSPQSASSPRMESTAGITTTTSPRTPPPLTVQDPLCPAVCPLEELSPDSIDAHTFDFETIPHPNIEQTIHQVSLDLDSLAESPESDFMSAVNEFVIEENLSSPNPISDPQSPEMMVESLYSSVINAIDSRRMQDTNVCGKEDFGDHTSLNVQLERCRVVAQDSHFSIQTIKEDLCHFRTFVQKEQCDFSNSLKCTAVEIRNIIEKVKCSLEITLKEKHQKELLSLKNEYEGKLDGLIKETEENENKIKKLKGELVCLEEVLQNKDNEFALVKHEKEAVICLQNEKDQKLLEMENIMHSQNCEIKELKQSREIVLEDLKKLHVENDEKLQLLRAELQSLEQSHLKELEDTLQVRHIQEFEKVMTDHRVSLEELKKENQQIINQIQESHAEIIQEKEKQLQELKLKVSDLSDTRCKLEVELALKEAETDEIKILLEESRAQQKETLKSLLEQETENLRTEISKLNQKIQDNNENYQVGLAELRTLMTIEKDQCISELISRHEEESNILKAELNKVTSLHNQAFEIEKNLKEQIIELQSKLDSELSALERQKDEKITQQEEKYEAIIQNLEKDRQKLVSSQEQDREQLIQKLNCEKDEAIQTALKEFKLEREVVEKELLEKVKHLENQIAKSPAIDSTRGDSSSLVAELQEKLQEEKAKFLEQLEEQEKRKNEEMQNVRTSLIAEQQTNFNTVLTREKMRKENIINDLSDKLKSTMQQQERDKDLIESLSEDRARLLEEKKKLEEEVSKLRSSSFVPSPYVATAPELYGACAPELPGESDRSAVETADEGRVDSAMETSMMSVQENIHMLSEEKQRIMLLERTLQLKEEENKRLNQRLMSQSMSSVSSRHSEKIAIRDFQVGDLVLIILDERHDNYVLFTVSPTLYFLHSESLPALDLKPGEGASGASRRPWVLGKVMEKEYCQAKKAQNRFKVPLGTKFYRVKAVSWNKKV

SEQ ID NO: 182161 - protein, 72 aa, Artificial Sequence
  derived and/or modified sequence
MVPGVAGSAAAAGEGGGVAGVADLKHAIQSKYKIAIQHQVLVVNGGECMAADRRVCTYSAGTDTNPIFLFNK

SEQ ID NO: 182162 - protein, 15 aa, Artificial Sequence
  derived and/or modified sequence
MKLYVFLVNTGTTLT

SEQ ID NO: 182163 - DNA, 4785 bp, Artificial Sequence
  derived and/or modified sequence
atgaagctgtacgtgttcctggtgaacaccggcaccaccctgaccttcgacaccgagctgaccgtgcagaccgtggccgacctgaagcacgccatccagagcaagtacaagatcgccatccagcaccaggtgctggtggtgaacggcggcgagtgcatggccgccgacagaagagtgtgcacctacagcgccggcaccgacaccaaccccatcttcctgttcaacaaggagatgatcctgtgcgacagaccccccgccatccccaagaccaccttcagcaccgagaacgacatggagatcaaggtggaggagagcctgatgatgcccgccgtgttccacaccgtggccagcagaacccagctggccctggagatgtacgaggtggccaagaagctgtgcagcttctgcgagggcctggtgcacgacgagcacctgcagcaccagggctgggccgccatcatggccaacctggaggactgcagcaacagctaccagaagctgctgttcaagttcgagagcatctacagcaactacctgcagagcatcgaggacatcaagctgaagctgacccacctgggcaccgccgtgagcgtgatggccaagatccccctgctggagtgcctgaccagacacagctacagagagtgcctgggcagactggacagcctgcccgagcacgaggacagcgagaaggccgagatgaagagaagcaccgagctggtgctgagccccgacatgcccagaaccaccaacgagagcctgctgaccagcttccccaagagcgtggagcacgtgagccccgacaccgccgacgccgagagcggcaaggagatcagagagagctgccagagcaccgtgcaccagcaggacgagaccaccatcgacaccaaggacggcgacctgcccttcttcaacgtgagcctgctggactggatcaacgtgcaggacagacccaacgacgtggagagcctggtgagaaagtgcttcgacagcatgagcagactggaccccagaatcatcagacccttcatcgccgagtgcagacagaccatcgccaagctggacaaccagaacatgaaggccatcaagggcctggaggacagactgtacgccctggaccagatgatcgccagctgcggcagactggtgaacgagcagaaggagctggcccagggcttcctggccaaccagaagagagccgagaacctgaaggacgccagcgtgctgcccgacctgtgcctgagccacgccaaccagctgatgatcatgctgcagaaccacagaaagctgctggacatcaagcagaagtgcaccaccgccaagcaggagctggccaacaacctgcacgtgagactgaagtggtgctgcttcgtgatgctgcacgccgaccaggacggcgagaagctgcaggccctgctgagactggtgatcgagctgctggagagagtgaagatcgtggaggccctgagcaccgtgccccagatgtactgcctggccgtggtggaggtggtgagaagaaagatgttcatcaagcactacagagagtgggccggcgccctggtgaaggacggcaagagactgtacgaggccgagaagagcaagagagagagcttcggcaagctgttcagaaagagcttcctgagaaacagactgttcagaggcctggacagctggccccccagcttctgcacccagaagcccagaaagttcgactgcgagctgcccgacatcagcctgaaggacctgcagttcctgcagagcttctgccccagcgaggtgcagcccttcctgagagtgcccctgctgtgcgacttcgagcccctgcaccagcacgtgctggccctgcacaacctggtgaaggccgcccagagcctggacgagatgagccagaccatcaccgacctgctgagcgagcagaaggccagcgtgagccagaccagcccccagagcgccagcagccccagaatggagagcaccgccggcatcaccaccaccaccagccccagaacccccccccccctgaccgtgcaggaccccctgtgccccgccgtgtgccccctggaggagctgagccccgacagcatcgacgcccacaccttcgacttcgagaccatcccccaccccaacatcgagcagaccatccaccaggtgagcctggacctggacagcctggccgagagccccgagagcgacttcatgagcgccgtgaacgagttcgtgatcgaggagaacctgagcagccccaaccccatcagcgacccccagagccccgagatgatggtggagagcctgtacagcagcgtgatcaacgccatcgacagcagaagaatgcaggacaccaacgtgtgcggcaaggaggacttcggcgaccacaccagcctgaacgtgcagctggagagatgcagagtggtggcccaggacagccacttcagcatccagaccatcaaggaggacctgtgccacttcagaaccttcgtgcagaaggagcagtgcgacttcagcaacagcctgaagtgcaccgccgtggagatcagaaacatcatcgagaaggtgaagtgcagcctggagatcaccctgaaggagaagcaccagaaggagctgctgagcctgaagaacgagtacgagggcaagctggacggcctgatcaaggagaccgaggagaacgagaacaagatcaagaagctgaagggcgagctggtgtgcctggaggaggtgctgcagaacaaggacaacgagttcgccctggtgaagcacgagaaggaggccgtgatctgcctgcagaacgagaaggaccagaagctgctggagatggagaacatcatgcacagccagaactgcgagatcaaggagctgaagcagagcagagagatcgtgctggaggacctgaagaagctgcacgtggagaacgacgagaagctgcagctgctgagagccgagctgcagagcctggagcagagccacctgaaggagctggaggacaccctgcaggtgagacacatccaggagttcgagaaggtgatgaccgaccacagagtgagcctggaggagctgaagaaggagaaccagcagatcatcaaccagatccaggagagccacgccgagatcatccaggagaaggagaagcagctgcaggagctgaagctgaaggtgagcgacctgagcgacaccagatgcaagctggaggtggagctggccctgaaggaggccgagaccgacgagatcaagatcctgctggaggagagcagagcccagcagaaggagaccctgaagagcctgctggagcaggagaccgagaacctgagaaccgagatcagcaagctgaaccagaagatccaggacaacaacgagaactaccaggtgggcctggccgagctgagaaccctgatgaccatcgagaaggaccagtgcatcagcgagctgatcagcagacacgaggaggagagcaacatcctgaaggccgagctgaacaaggtgaccagcctgcacaaccaggccttcgagatcgagaagaacctgaaggagcagatcatcgagctgcagagcaagctggacagcgagctgagcgccctggagagacagaaggacgagaagatcacccagcaggaggagaagtacgaggccatcatccagaacctggagaaggacagacagaagctggtgagcagccaggagcaggacagagagcagctgatccagaagctgaactgcgagaaggacgaggccatccagaccgccctgaaggagttcaagctggagagagaggtggtggagaaggagctgctggagaaggtgaagcacctggagaaccagatcgccaagagccccgccatcgacagcaccagaggcgacagcagcagcctggtggccgagctgcaggagaagctgcaggaggagaaggccaagttcctggagcagctggaggagcaggagaagagaaagaacgaggagatgcagaacgtgagaaccagcctgatcgccgagcagcagaccaacttcaacaccgtgctgaccagagagaagatgagaaaggagaacatcatcaacgacctgagcgacaagctgaagagcaccatgcagcagcaggagagagacaaggacctgatcgagagcctgagcgaggacagagccagactgctggaggagaagaagaagctggaggaggaggtgagcaagctgagaagcagcagcttcgtgcccagcccctacgtggccaccgcccccgagctgtacggcgcctgcgcccccgagctgcccggcgagagcgacagaagcgccgtggagaccgccgacgagggcagagtggacagcgccatggagaccagcatgatgagcgtgcaggagaacatccacatgctgagcgaggagaagcagagaatcatgctgctggagagaaccctgcagctgaaggaggaggagaacaagagactgaaccagagactgatgagccagagcatgagcagcgtgagcagcagacacagcgagaagatcgccatcagagacttccaggtgggcgacctggtgctgatcatcctggacgagagacacgacaactacgtgctgttcaccgtgagccccaccctgtacttcctgcacagcgagagcctgcccgccctggacctgaagcccggcgagggcgccagcggcgccagcagaagaccctgggtgctgggcaaggtgatggagaaggagtactgccaggccaagaaggcccagaacagattcaaggtgcccctgggcaccaagttctacagagtgaaggccgtgagctggaacaagaaggtgtag

SEQ ID NO: 182164 - DNA, 48 bp, Artificial Sequence
  derived and/or modified sequence
atgaagctgtacgtgttcctggtgaacaccggcaccaccctgacctag

SEQ ID NO: 182165 - DNA, 4785 bp, Artificial Sequence
  derived and/or modified sequence
atgaagctctacgtctttcttgtcaacacaggaactaccctcactttcgatactgagcttacagtgcagactgtggctgacctaaagcacgcgatccagagcaagtacaaaatagctatccaacaccaggttctggttgtcaatgggggggagtgtatggcagctgatcggcgcgtgtgcacatatagcgctgggaccgacacaaacccaatttttctgtttaacaaagagatgattctctgcgacaggccccccgctatccctaagaccaccttctcaactgaaaacgacatggaaattaaggtagaggaatcactaatgatgcctgcggtgtttcatactgtcgcttcgagaactcagcttgcacttgaaatgtacgaggtcgccaagaagctgtgctccttctgtgagggacttgtgcatgacgaacacctgcagcaccagggctgggccgctattatggctaacctggaggattgttctaattcatatcaaaaactgctcttcaaattcgaaagcatctacagtaattatctgcagtctatcgaggacatcaaactgaaattgacccacttgggtacggccgtttctgtgatggctaagattcccctgctggagtgccttaccaggcacagttaccgcgagtgcctgggaaggttggattcgttgcctgagcacgaagattctgagaaggccgagatgaaacgctctactgagctagttttatcgcctgatatgcccaggactacaaatgaatctctcctcactagcttccctaaatccgtggagcatgtctcacctgacactgctgacgccgagagtggcaaggaaattcgcgagtcatgtcagtccactgtccaccagcaggacgaaaccacgattgacaccaaggatggcgatttgcctttcttcaacgtgagccttctggactggataaatgtgcaggataggccaaacgatgttgaatcccttgtccgcaagtgtttcgactccatgtcaaggttagatccaagaatcatcagaccattcatcgctgagtgcagacagaccatcgccaaactcgataaccagaacatgaaggccattaaggggctagaggataggttatatgccctggatcagatgattgcaagctgcgggaggctggtgaacgaacagaaggagctggcacaggggttcctggccaaccagaaacgtgccgagaatctcaaagacgcctctgtgcttcccgacttatgcctctcacatgcgaaccagctcatgatcatgctgcaaaatcatagaaagcttctagatatcaagcagaaatgcacgaccgcaaaacaggagctcgccaataacctgcatgtgcgcctcaaatggtgttgctttgtcatgctgcacgcagaccaggatggcgagaagctgcaggccctgctgcgcttagtcattgagctccttgagcgggtaaaaattgtggaagcacttagcaccgtcccacagatgtactgcctggccgtagtggaagtcgtaagacggaagatgttcattaaacattatcgcgagtgggcaggcgccctcgtgaaggacgggaaaaggttgtatgaagcggagaaatcgaagcgcgaaagcttcggcaaactctttcgaaagtcgttcctgcggaatagactgtttagaggtctggacagctggccaccctctttttgcacacagaaaccgcgtaagttcgactgcgaacttcctgatatcagccttaaggacttgcagtttttgcagagtttctgccctagtgaggtacaaccgtttttgcgcgtgcctctcctgtgtgacttcgagcccctgcaccagcacgttctggctctgcacaatctggtgaaggccgctcaatccctcgacgaaatgagccagacgattaccgatctgctatctgaacagaaagcttctgtttcgcagactagtcctcagagtgccagtagcccccggatggagtccaccgccggcatcactacaaccacttccccacggacaccacctcctttaacagttcaggaccctctttgtcccgcagtttgcccactcgaagagttgtctccggacagcatcgacgcccacacattcgacttcgagacaataccacatcctaacatcgaacagaccatccatcaagtctctctggacctagacagcctggctgagtcgccagagtcagattttatgtctgctgtaaatgagtttgttattgaagagaacctgagctcccctaacccaatttccgatcctcagtccccggagatgatggttgaatccctctacagttctgtcatcaacgcaatcgattctcgtagaatgcaagatactaacgtgtgtgggaaagaagatttcggagatcatacctctctcaatgtacagctggagcgatgccgtgtggtcgctcaggactcacatttctctatccagacgatcaaggaggatctctgccattttaggacatttgtgcaaaaggaacagtgtgacttcagcaattcgctgaaatgtactgctgttgagatcagaaatattatcgaaaaagtgaaatgcagcctcgaaattacactgaaggaaaagcatcaaaaagagttgttgtctttgaaaaatgagtacgagggcaagcttgacgggcttataaaggagactgaggaaaatgagaataagatcaagaagctcaaaggcgaattggtttgtctggaagaggttctccaaaacaaggataacgaattcgccctggttaagcatgagaaagaggctgtgatctgcctgcagaacgagaaggaccagaagctcctggagatggagaatatcatgcactcccagaactgcgaaatcaaagagcttaaacaaagtcgcgaaatcgttctggaggaccttaaaaagttgcacgtcgaaaacgacgagaagctccagctcctccgcgcagaacttcaatcactggagcaatctcaccttaaggaattggaagacaccctccaagttcgtcacattcaagagttcgagaaagtgatgacagatcaccgcgtgtccttagaagagctcaagaaggagaatcagcaaatcattaatcagattcaggagtcccacgccgaaataatccaggagaaagaaaaacaactccaggagcttaaattgaaagtttctgacctatcggatactcggtgcaaattggaggtagaactagctctgaaggaagccgagactgatgagataaagattctgctggaggaatcgcgggcacagcagaaagagaccctgaagagcctgctggagcaggaaactgagaacttaagaaccgaaatttctaagttgaatcagaaaattcaggataacaatgagaactatcaggtggggttagctgaacttcggactctgatgaccatcgaaaaagaccagtgcatatctgaattaataagcaggcatgaggaagagagcaacatactaaaggcagagctgaataaggtcactagcctacacaatcaggccttcgaaatcgaaaagaaccttaaggagcagatcattgagttgcagtctaaactggatagcgagctgtccgcactcgagcgccagaaggacgagaagatcacccagcaggaagaaaagtacgaggctattatccagaacttggagaaggaccggcagaaactggtgagcagccaggagcaagaccgtgaacagttgatccagaaactgaattgtgaaaaggacgaagcaatccagaccgccctcaaggaatttaaactggagcgggaagtagttgagaaggaactcttagaaaaggtgaagcacctcgagaatcaaatcgcaaagtctcctgcgatcgattcgacgcggggcgatagctccagcttagtagccgagttgcaggagaaactgcaagaggagaaagctaaatttctggagcaactagaagaacaggagaagcggaagaatgaggagatgcaaaatgtgaggacttccctgatagcggagcaacagacgaattttaatacagtgctcaccagagagaaaatgcgaaaggaaaatataataaatgatttgtctgataagctcaagagcaccatgcagcagcaggagagagacaaagatttgatagagtcgctcagcgaagatagggccaggctcttagaagagaagaagaagttggaggaggaggtgtctaagctgaggtcctccagctttgttccctccccttacgtcgcaaccgcccctgagctctatggtgcctgcgcccccgagctgcctggggaatccgacagaagtgcagtcgaaactgccgacgaaggccgggtcgatagcgctatggagacgagcatgatgagcgttcaagaaaatattcatatgctctctgaagaaaaacagcgaatcatgttacttgaacggaccctgcagctgaaagaagaggagaacaaacgcctgaaccaacgacttatgagtcagagcatgtcaagcgtgagctcgcgccactcagagaagatagccatcagggacttccaggtgggtgacctcgtactgattattctggatgaacggcacgataattacgtgctcttcaccgtttcccccacactctattttcttcatagtgaatcattgccagccttggaccttaaaccaggcgaaggggccagtggagcgagtagaaggccctgggttctcggcaaggtaatggagaaggagtactgtcaagcaaaaaaggcgcagaatagattcaaagtgccactgggcaccaagttttaccgcgttaaggccgtgtcttggaacaaaaaggtgtag

SEQ ID NO: 182166 - DNA, 48 bp, Artificial Sequence
  derived and/or modified sequence
atgaaactttacgtgtttttggtgaataccggcactaccctaacgtag

SEQ ID NO: 182167 - DNA, 4785 bp, Artificial Sequence
  derived and/or modified sequence
atgaagctgtatgtgttcctggtgaacacaggcaccaccctgacctttgacacagagctgactgtgcagacagtggccgacctgaagcacgccatccagagcaagtacaagatcgccatccagcaccaggtgctggtggtgaatggaggagagtgcatggctgctgacagaagagtgtgcacctacagcgctggaacagacaccaaccccatcttcctgttcaacaaggagatgatcctgtgtgaccggcccccagccatccccaagaccaccttcagcacagaaaatgacatggagatcaaggtggaggagagcctgatgatgcctgctgtgttccacacagtggccagcaggacccagctggccctggagatgtatgaggtggccaagaagctgtgcagcttctgtgagggcctggtgcatgatgagcacctgcagcaccagggctgggccgccatcatggccaacctggaggactgcagcaacagctaccagaagctgctcttcaagtttgagagcatctacagcaactacctgcagagcattgaggacatcaagctgaagctgacccacctgggcacagctgtgtctgtgatggccaagatccccctgctggagtgcctgaccaggcacagctacagagaatgtctgggccgcctggacagcctgcctgagcatgaagattctgagaaggccgagatgaagaggagcacagagctggtgctgagcccagacatgcccaggaccaccaatgaaagcctgctgaccagcttccccaagtctgtggagcacgtgtccccagacacagcagatgctgagagcggcaaggagatccgggagagctgccagagcacagtgcaccagcaggatgagaccaccatcgacaccaaggatggagacctgcccttcttcaacgtgtccctgctggactggatcaacgtgcaggaccggcccaatgatgtggagagcctggtgaggaaatgttttgacagcatgagccggctggacccccgcatcatccggcccttcatcgccgagtgccggcagaccatcgccaagctggacaaccagaacatgaaggccatcaagggcctggaggaccggctgtatgccctggaccagatgattgccagctgtggccgcctggtgaatgagcagaaggagctggcccagggcttcctggccaaccagaagagagctgagaacctgaaggatgcctctgtgctgcctgacctgtgcctgagccacgccaaccagctgatgatcatgctgcagaaccacaggaagctgctggacatcaagcagaagtgcaccacagccaagcaggagctggccaacaacctgcacgtgcggctgaagtggtgctgctttgtgatgctgcacgccgaccaggatggagagaagctgcaggccctgctgcggctggtgattgagctgctggagcgggtgaagatcgtggaggccctgagcacagtgccccagatgtactgcctggccgtggtggaggtggtgcggaggaagatgttcatcaagcactaccgggagtgggccggggccctggtgaaggatggcaagaggctgtatgaggccgagaagagcaagcgggagagctttgggaagctgttcaggaagagcttcctgaggaacagactcttccggggcctggacagctggcccccatccttctgcacccagaagcccaggaagtttgactgtgagctgcctgacatcagcctgaaggacctgcagttcctgcagagcttctgccccagcgaggtgcagcccttcctgcgggtgcccctgctgtgtgactttgagcccctgcaccagcacgtgctggccctgcacaacctggtgaaggccgcccagagcctggatgagatgagccagaccatcacagacctgctgtctgagcagaaggcctctgtgtcccagaccagcccccagagcgccagcagccccaggatggagagcacagctggcatcaccaccaccaccagccccaggaccccaccacccctgactgtgcaggaccccctgtgcccagctgtgtgccccctggaggagctgagcccagacagcattgatgcccacacctttgattttgagaccatcccccaccccaacatcgagcagaccatccaccaggtgtccctggacctggacagcctggccgagagccctgagagtgacttcatgtctgctgtgaatgaatttgtgattgaggagaacctgagcagccccaaccccatcagtgacccccagagccctgagatgatggtggagagcctgtacagcagcgtcatcaatgccatcgacagcaggaggatgcaggacaccaacgtgtgtgggaaggaggactttggagaccacaccagcctgaatgtgcagctggagcgctgccgggtggtggcccaggacagccacttcagcatccagaccatcaaggaggacctgtgccacttccgcacctttgtgcagaaggagcagtgtgacttcagcaacagcctgaagtgcacagctgtggagatccggaacatcatcgagaaggtgaagtgcagcctggagatcaccctgaaggagaagcaccagaaggagctgctgagcctgaagaatgaatatgagggcaagctggatggcctcatcaaggagacagaagaaaatgaaaacaagatcaagaagctgaagggggagctggtgtgcctggaggaggtgctgcagaacaaggacaatgaatttgccctggtgaagcatgagaaggaggccgtcatctgcctgcagaatgagaaggaccagaagctgctggagatggagaacatcatgcacagccagaactgtgagatcaaggagctgaagcagagccgggagatcgtgctggaggacctgaagaagctgcacgtggagaatgatgagaagctgcagctgctgcgggcagagctgcagagcctggagcagagccacctgaaggagctggaggacaccctgcaggtgcgccacatccaggagtttgagaaggtgatgacagaccaccgggtgtccctggaggagctgaagaaggagaaccagcagatcatcaaccagatccaggagagccatgctgagatcatccaggagaaggagaagcagctgcaggagctgaagctgaaggtgtctgacctgagtgacacccgctgcaagctggaggtggagctggccctgaaggaggccgagacagatgagatcaagatcctgctggaggagagccgggcccagcagaaggagaccctgaagagcctgctggagcaggagacagagaacctgaggacagagatcagcaagctgaaccagaagatccaggacaacaatgaaaactaccaggtgggcctggccgagctgcggaccctgatgaccatcgagaaggaccagtgcatcagcgagctgatcagcagacatgaggaggagagcaacatcctgaaggccgagctgaacaaggtgaccagcctgcacaaccaggcctttgaaattgagaagaacctgaaggagcagatcatcgagctgcagagcaagctggacagcgagctgagcgccctggagcggcagaaggatgagaagatcacccagcaggaggagaagtatgaggccatcatccagaacctggagaaggaccggcagaagctggtgagcagccaggagcaggaccgggagcagctgatccagaagctgaactgtgagaaggatgaggccatccagacagccctgaaggagttcaagctggagcgggaggtggtggagaaggagctgctggagaaggtgaagcacctggagaaccagatcgccaagagccctgccatcgacagcaccaggggggacagcagcagcctggtggccgagctgcaggagaagctgcaggaggagaaggccaagttcctggagcagctggaggagcaggagaagaggaagaatgaggagatgcagaatgtgaggaccagcctgattgctgagcagcagaccaacttcaacacagtgctgacccgggagaagatgaggaaggagaacatcatcaatgacctgagtgacaagctgaagagcaccatgcagcagcaggagcgggacaaggacctgattgagagcctgtctgaagatcgggcccggctgctggaggagaagaagaagctggaggaggaggtgtccaagctgcggagcagcagctttgtgcccagcccctacgtggccacagcccctgagctgtatggagcctgtgcccctgagctgcccggggagagtgacagatctgctgtggagacagcagatgagggccgggtggacagcgccatggagacctccatgatgtctgtgcaggagaacatccacatgctgtctgaggagaagcagaggatcatgctgctggagaggaccctgcagctgaaggaggaggagaacaagaggctgaaccagaggctgatgagccagagcatgagctctgtgagcagccgccacagcgagaagatcgccatccgggacttccaggtgggggacctggtgctgatcatcctggatgaaagacatgacaactacgtgctcttcaccgtgagccccaccctgtacttcctgcacagcgagagcctgcctgccctggacctgaagccaggagagggcgccagcggggccagcagaagaccctgggtgctgggcaaggtgatggagaaggagtactgccaggccaagaaggcccagaaccgcttcaaggtgcccctgggcaccaagttctacagagtgaaggctgtgtcctggaacaagaaggtgtag

SEQ ID NO: 182168 - DNA, 48 bp, Artificial Sequence
  derived and/or modified sequence
atgaagctgtatgtgttcctggtgaacacaggcaccaccctgacctag

SEQ ID NO: 182169 - DNA, 4785 bp, Artificial Sequence
  derived and/or modified sequence
atgaagctgtacgtgttcctggtgaacaccggcaccaccctgacctttgacaccgaactcacagtccaaactgtcgccgatctcaagcatgctatacaaagcaaatacaaaatcgcgatccagcaccaagtgctggtcgtaaacggaggcgagtgcatggccgcagaccgcagagtctgcacctacagtgctgggaccgatactaaccccatattcctcttcaataaagagatgatcctgtgtgatcgcccacctgctatcccaaagacaacattctctacagagaatgatatggaaattaaggttgaggagtcgcttatgatgccagctgtttttcacaccgtagcgtcgaggacccaactcgccctagagatgtacgaggtggccaagaagctctgttcattttgcgaaggcctcgttcatgatgaacacctccagcaccaagggtgggccgccattatggctaacctagaagactgcagcaattcttatcagaagctcttattcaaatttgagtccatctacagcaattatttacaatccatcgaggatatcaaattgaagctgacacatctggggacggcggtctccgtcatggctaagatacctttgctggaatgtctgacacggcattcataccgcgagtgtctcggtcggctggacagtcttcccgaacatgaggattctgagaaagccgaaatgaaacggtctaccgaactagtcttatctccggacatgcctagaactaccaacgagtcgttgctcacaagtttccctaaatcggttgaacacgtttccccagacacagccgacgccgagtcaggaaaagaaatcagagagtcttgccagtcaacagtccatcagcaggatgagacaacaatcgatactaaggacggtgacctgcccttcttcaatgtgtccctgctagattggatcaatgtgcaggatcgtcctaatgatgtcgagagcctcgtgagaaagtgttttgacagcatgagtcgcttggacccccgcatcattcgtccattcatcgctgagtgtcggcagactatcgcaaagctagacaaccagaatatgaaggccatcaagggtttagaggataggctgtacgccttggaccagatgatcgcttcttgcggccggctcgtaaacgagcagaaggaactggcccaaggctttctagcaaaccagaagcgcgcggagaacctgaaggacgcaagtgtgttgccagacctttgcctgtcacacgcaaatcaattgatgattatgcttcagaaccaccgcaagctcttggatatcaagcagaaatgcacgaccgccaagcaggagctcgccaataacttgcacgtgcgactgaagtggtgctgtttcgtcatgttgcacgcggaccaagacggtgaaaaactccaggccctgctgagactcgtgatcgaacttttagagcgggtgaagatagtggaggcattatctaccgttccacagatgtattgtctggcagttgttgaagttgttcggaggaagatgttcatcaaacactacagagagtgggctggcgcccttgtgaaggatgggaagaggttgtatgaggcggaaaagagtaagagagagtccttcggcaaacttttcagaaaatcttttcttagaaatcgtttgtttagagggttagattcatggccacccagcttctgcacccagaaaccccgaaagtttgactgtgagctgccagacattagcctaaaagatctccagttcctgcaatccttttgtccttcagaagtgcaaccttttctcagggtgcctttgctttgcgattttgagcccctgcaccagcatgtgctcgccctccataatctcgttaaggctgcccagtccctggatgagatgtcgcaaacaattaccgatctgcttagcgagcagaaggccagtgtctcacagactagtcctcagtctgcaagctccccccgtatggaaagcacggccggcattactaccaccacctctccccggacacctccacccctaacagttcaggatcctctgtgccccgctgtgtgccctctcgaggagttgtcaccagactcgattgatgcgcatactttcgacttcgagacaattcctcatccaaatattgagcagaccattcatcaagtgtctctcgacctcgactctctcgctgagtcccctgaatctgatttcatgagtgccgttaacgagtttgtcattgaggagaacctgtcctcccctaatcccatatcagacccccagtctccggaaatgatggtggaatcactctacagctctgtcattaacgctatagacagtcggcgcatgcaggatactaatgtctgtggaaaagaggatttcggagatcacacaagcctgaatgttcaactcgaacgctgtcgcgttgttgctcaagattctcattttagcatacagacaattaaagaggatctatgtcattttcggacctttgtccagaaggagcaatgtgactttagtaacagtttgaagtgcaccgccgtcgaaataaggaacataatcgagaaagtgaaatgcagcctcgagattacccttaaggagaaacaccaaaaggaacttctctctctgaagaacgagtatgaagggaaacttgatgggttaatcaaggagacagaggagaatgagaataagattaaaaagctgaagggagaactggtatgtctggaggaagtgctccagaacaaggataatgaattcgctctggttaaacatgagaaggaggctgtgatctgcctgcagaacgagaaggatcagaagttgttagagatggaaaatattatgcattcgcagaattgcgagatcaaggagctgaaacaaagccgtgagattgtactggaagacctcaaaaagctgcacgtcgagaacgatgaaaagttgcagttgctgagagctgaactccaatcgctggaacaaagccacttaaaagaactcgaggacaccttgcaggttcgacacatacaagagtttgagaaagtgatgacagaccacagggtttcactggaggagctgaagaaggaaaaccagcaaataataaaccaaattcaggagtcacacgctgagattatccaagagaaggagaaacagctacaggagctcaagctgaaggtttcagacctgagtgacaccaggtgtaagttagaggttgaactggcgttgaaagaggctgaaaccgatgaaataaagatactactggaagagtctcgcgcccagcaaaaagagaccctaaagtctctcctcgagcaggagacggagaatctgcgcacagaaatcagcaaactgaaccagaaaatccaggataacaatgagaattaccaggtggggctggccgagctgcggactctgatgacaatcgagaaggatcagtgtatctcagaactcatttcccgacacgaggaggagagcaacatcctcaaagccgaactgaacaaagtgacctctttgcataaccaagcatttgagatcgagaagaacctgaaagagcagattattgagctccagtcgaaacttgattccgaactttcagctctggaaaggcagaaagacgaaaaaatcacccagcaggaggaaaaatatgaagctattatccaaaatctcgagaaggatcggcaaaagctcgtttcctcacaggaacaagatagggaacaattgatccagaaactaaattgcgaaaaggatgaggcgatccagacggctctgaaagagttcaagctcgagagggaagtcgtggaaaaagagctcctggaaaaggttaagcatttagagaatcagatcgcgaagagccccgccattgatagcacccggggagattcgtcttctctcgtcgccgagcttcaggaaaaactccaagaagagaaagctaaattcctggaacaattagaggagcaggagaaaagaaaaaacgaagagatgcagaatgttcgcacctcacttattgctgagcagcagacaaacttcaataccgttctgacccgcgaaaaaatgcggaaggaaaatatcattaatgatttatcagataagctgaagtctaccatgcagcagcaggagcgagacaaagatctcatcgaatcattgagtgaggacagggctaggctcctggaggagaaaaagaaactggaggaggaggtgtctaagctgcggtcttcatcatttgtgccatcaccatatgtagcgaccgctccggaattgtatggcgcttgtgctcctgaactgcctggtgaatccgataggtctgcagtggagacggctgatgaaggccgtgtggactcggctatggagacttccatgatgtccgtgcaagaaaatatccatatgctgtctgaggaaaagcagcggatcatgttgctggagcgtactcttcagctgaaggaggaggaaaataaaagattgaatcaacgcttaatgtcccagtcaatgagctccgtctcttcaaggcattcagagaaaattgccatccgcgattttcaggttggtgacctagtccttataattttagacgaaagacacgacaactacgtcctctttacagttagtcctactttgtacttcctgcacagtgagtccttaccagcactggacctgaagcccggcgaaggggcctccggtgcctctcggcgtccttgggtcttgggcaaagttatggagaaagagtactgtcaggccaaaaaagctcagaacagattcaaggtgcccctgggcaccaaattctatcgcgtcaaggcagtgtcttggaataaaaaagtgtag

SEQ ID NO: 182170 - DNA, 4785 bp, Artificial Sequence
  derived and/or modified sequence
atgaagctctatgtgtttctcgtcaataccgggacaacactgacttttgatacagaactgactgtgcagaccgtggctgatttgaagcacgctattcagtccaagtacaaaattgccatccagcaccaggtcctcgttgtgaatggcggagagtgcatggcggctgacagacgggtgtgcacttatagcgctggaacagacactaatcctatctttttgtttaacaaggaaatgatcctgtgcgaccgtcctcccgcaatccctaagactactttttcaacggagaatgacatggaaatcaaggtggaggagagcctaatgatgcctgctgtgttccatacagtcgcctcgcgtacacagcttgcgttagagatgtacgaggtggccaaaaaactctgtagtttttgcgaagggttggtgcatgacgaacacctgcaacatcagggttgggcagccataatggctaatttagaggattgcagtaattcgtaccaaaaacttctattcaagtttgagtccatctacagtaattacttacagtcaattgaggacattaaattgaaactgacacacctgggcaccgccgtgagtgttatggctaaaataccgttacttgaatgcctcaccagacattcttaccgtgagtgcctgggcagactcgacagcctgccggaacacgaggacagtgagaaagctgagatgaagaggagcacggaactggtgctgtccccagatatgccaagaaccacaaatgaaagccttctcacatccttccccaagagcgtggagcacgtatcgccagacaccgctgatgccgagtccggaaaggagattagagagtcttgccagtccaccgtacaccagcaggacgagactaccattgatactaaagacggggacctgccatttttcaacgtatccctcttggattggatcaacgtgcaggatcgccctaacgacgttgagtcattggtacgcaagtgctttgactcaatgtcccgcctggatcctagaatcattcggccattcatcgcagagtgtaggcagaccattgccaagctggacaatcagaatatgaaggctattaaaggtcttgaggacagactctacgctctggaccaaatgattgcctcatgcgggaggctcgttaatgagcagaaggaactggcccaaggcttccttgccaaccagaaacgggctgaaaacctgaaggatgcctcggtgcttccggacttatgcctttcacacgctaatcagttaatgataatgctacagaaccacagaaaactactcgacattaaacagaaatgcactactgctaagcaggagctggcaaacaatctacacgttagactgaagtggtgttgcttcgtgatgctgcatgcggaccaagatggagagaaattgcaggccttgttgcggcttgttatcgagctgctggaaagggtcaaaattgtggaggccctttcgactgttccgcagatgtattgcctcgcggtcgttgaagtggttaggcggaagatgttcatcaaacactacagagagtgggccggtgcattggtgaaggacggaaagagactttatgaagccgagaaaagcaagagggaatccttcggaaaacttttcagaaagtcatttcttcggaatcgcctgtttagggggctggatagctggcctccgtctttttgcacccagaagcccaggaaatttgactgcgagctacctgatatttcactaaaagacttacagtttctccagtctttctgcccctccgaggtccagccattcctgcgggtaccactcctgtgtgacttcgaacctcttcaccaacacgtgctggctctgcacaatctcgtaaaggccgctcagtcactagacgagatgagccagaccatcactgacttgctgagtgagcagaaagcaagtgtatctcagactagccctcagagcgcgagtagtcccagaatggagtctacagcgggaataacaaccaccacaagtcccagaacccccccacccctgacggtccaagatccactgtgcccggctgtatgccctttggaggagctcagcccggatagcattgacgcacataccttcgattttgaaaccatcccgcatcctaatatcgagcaaacgatacaccaggtgtccctggatcttgacagtctcgctgaatcgcccgaatcagatttcatgagtgcggtgaatgaattcgtgatagaggaaaacttgtcgagccccaatccaatcagtgacccccaatctcccgagatgatggtggagtccttgtattcatccgtcattaatgccattgattcacggagaatgcaggacacgaacgtatgcgggaaagaggacttcggcgaccacacttcactgaatgtgcaacttgaacggtgcagggtggttgcccaggattcacacttctctattcaaacaattaaggaagacttgtgccactttagaacatttgttcagaaagaacagtgtgacttttccaacagtctgaaatgtacggccgtggaaattagaaatatcatcgaaaaggtgaagtgctcccttgaaatcactctgaaggaaaaacaccagaaggagctgcttagtttgaagaacgagtatgagggaaaactggatggtctcatcaaagaaactgaagaaaatgaaaataagattaaaaaattgaaaggcgagctagtgtgcctagaggaagtgttgcagaataaagataacgagttcgccctggtgaaacatgaaaaagaggcagttatctgtcttcagaatgagaaagaccagaagctgttagagatggagaatattatgcacagtcagaactgtgagattaaggagctaaaacagagtagagagatcgttctcgaagacctcaaaaaactgcacgtggagaatgatgagaaattgcagctactccgcgcagagttgcagtctctggagcagtctcaccttaaagagctggaggacaccctccaagtgagacatattcaggagttcgagaaagttatgaccgaccaccgggtaagtttagaagagcttaaaaaggaaaaccaacaaatcataaatcagatccaggaatctcatgctgagattattcaagagaaggaaaagcagctccaagaactgaaattaaaagtgtcggatctctcggatacccgctgcaagttagaagtggagctggctctgaaggaggctgaaacagacgagattaagattctcttagaggaatctagggcacaacaaaaggaaaccctgaaaagtctcctggaacaggagaccgagaacctgcgtacagaaatcagtaaactgaatcagaaaatacaggacaacaacgagaactaccaggtcggcctcgccgaactgaggaccctcatgactatcgaaaaggatcagtgtatctcagagctaattagcaggcacgaggaagaatccaatatactgaaggcagagctgaataaggtgacctctttgcacaaccaggcgtttgaaatcgagaagaacctgaaagagcagattattgaactgcagtcgaagctggactccgagctgtcagctctggaaagacagaaagatgaaaagataacccagcaggaagagaagtacgaagcgatcattcagaatctggaaaaggaccggcagaaacttgtgtcttcacaagagcaggaccgagagcagctgatccagaagttaaactgtgagaaggacgaggccatacagactgccttgaaagaattcaaactggagcgtgaggtggtcgaaaaggaactgctcgagaaggtgaagcatctggagaatcaaattgccaaaagtcctgccatcgattcaacacgcggtgatagcagttctctcgtggctgaactgcaagaaaaactgcaggaggaaaaagcaaaattcttggaacagctagaagaacaggagaaacgcaagaacgaagaaatgcagaacgtgcgcacttcgctgattgccgaacagcaaaccaattttaatactgtcctgacaagagagaagatgagaaaagagaatatcatcaacgatttaagcgacaaactcaaatccacgatgcagcagcaggaaagggataaggacctgattgagtcattgtctgaggacagggcacgactactagaggagaagaaaaagttggaggaggaagtttccaagctcaggagcagttctttcgtccccagtccttatgtggccacagctcccgagttatacggagcttgcgctcccgagcttcccggagaatccgaccggtccgcagtcgagaccgctgacgaaggcagagtggactctgctatggagacctcgatgatgagtgtgcaggaaaatatccacatgctttcagaagaaaagcagcgcattatgctactcgagaggaccctgcagctgaaagaagaggagaataaacggctcaaccaaaggctgatgagtcagtcaatgtcctcagtcagcagtagacactccgagaaaatcgccatccgcgatttccaagtgggcgacttggtactgattatcctggacgagagacatgataactacgtgctctttacggttagtcccactctgtatttcctgcatagcgagtccctgcccgctcttgatttgaaacccggagaaggggcttcaggcgcttccagacgtccctgggtcctgggaaaggtgatggaaaaagagtattgccaggctaagaaagcacagaacaggtttaaagtgccacttgggactaagttttatcgagttaaggccgtttcatggaataaaaaagtttag

SEQ ID NO: 182171 - DNA, 48 bp, Artificial Sequence
  derived and/or modified sequence
atgaaactttacgtgttcttagttaataccggcacaactttgacatag

SEQ ID NO: 182172 - DNA, 4785 bp, Artificial Sequence
  derived and/or modified sequence
atgaaactgtatgtttttctcgttaacactggcacgacactgacctttgatacagagctgacagtccagaccgtggcagatctcaagcatgccatccagtcaaagtacaagatcgcaatccaacatcaagtgcttgtagtgaacggcggagaatgcatggctgcagatcggagagtatgtacttacagcgccgggacagacactaatcctatttttctgtttaataaagaaatgatcctctgcgatagacctccagcaatccccaagaccacatttagtactgagaacgacatggaaataaaggtggaggagtccttaatgatgcccgccgtgtttcacacagtcgctagtcgtactcagttagctctcgaaatgtatgaggtcgcgaagaagctgtgctcattctgtgagggcctggttcatgatgagcacctacagcaccaaggatgggccgcaataatggcaaacctcgaggactgttcaaacagttatcaaaagttgctgtttaaatttgagtctatatattcgaattacttgcagagcatcgaagatataaaactgaagctcactcatttgggtaccgcagttagtgtgatggctaagattccactgttggaatgtctcactcgacatagttacagagagtgtctgggaaggctggactcacttccagagcacgaggacagcgagaaggctgaaatgaaacgttcaactgagctcgtcctttccccggacatgccccgaaccactaacgagtctctgctgacctcattccctaagagcgtcgaacacgtgagcccagataccgctgatgcggaatcagggaaggagattcgagaatcttgccagtccaccgtgcatcaacaagatgagactacaatagatacaaaagacggggacctgcctttttttaatgtgtcactgctggactggattaatgtgcaagacaggccaaacgacgtagaatcgctcgtgcggaagtgctttgattccatgtcgagactggatccgcgtatcattcgaccttttatagccgaatgtaggcagacgatcgccaaattggacaaccagaatatgaaagcgatcaaggggctggaagatagactttatgccctagatcagatgatcgcgtcctgtggtagactcgtgaatgagcagaaggaattagctcagggattccttgcgaatcagaagagggcagaaaacctgaaggatgcatcagtgctaccagacttatgtctatctcatgctaatcaattgatgattatgttacagaaccatcgaaagctcctggacatcaaacagaaatgtacaaccgctaagcaggagctcgctaacaatttgcatgttaggttaaagtggtgttgttttgttatgctgcatgctgaccaggatggcgagaaacttcaagcactgcttcgtctggtcattgagctgttagagcgggtcaagatcgtggaagcactctccaccgtcccccaaatgtactgcctggcagtcgtcgaagtagtgcgtagaaagatgtttattaagcactaccgcgagtgggccggagccctggtcaaagacgggaaaagactgtatgaagctgaaaagagtaagagggaatccttcggcaaactatttcgcaaatctttcttgagaaacagactgtttagggggcttgactcatggcccccctccttttgcacccaaaaacctcgaaagttcgattgtgaactgccggacatttctctgaaggatttgcaatttctccagtcgttttgccccagcgaggtgcagccgttcctaagggtaccactgctatgtgacttcgagccactccaccagcacgtgttggcactgcataacttggtgaaggccgcacagtccctggacgaaatgagccagacaattaccgaccttctgagtgaacagaaagctagcgtttcccagacttcgccgcaaagcgcctcttctccgcgaatggagtccactgccggtatcactacaactacaagcccaagaactcccccccctttaactgtccaggacccgctatgcccagctgtgtgccctttagaggagctctccccagattccattgacgcccatacgttcgatttcgagaccatccctcaccctaatatcgagcagaccattcatcaagtaagtttagatctggatagtctcgctgagagccctgagagcgatttcatgagcgccgttaatgagtttgtgatagaggagaatttgtcgagccccaatccgatcagcgaccctcagtctcccgagatgatggtggaatctctgtatagctcagtgatcaatgcaatcgactcacggcgaatgcaggataccaatgtgtgtgggaaggaggatttcggcgaccatacttcactgaatgttcagttggagagatgtagggtggtggcccaggattctcacttcagcatccagacgataaaagaggatctgtgccactttagaaccttcgttcagaaggagcagtgcgacttcagtaacagccttaaatgcaccgccgtggagatccgtaatattatcgaaaaagtcaaatgttctctagaaattacattaaaagaaaagcatcagaaggagcttctgtctttaaaaaatgagtacgagggcaagcttgacggtctgatcaaagagaccgaggagaatgagaataagattaagaaactcaagggggagttagtttgtttggaggaggttctgcagaataaggacaacgaatttgcactggttaagcacgaaaaggaggctgtcatctgccttcaaaatgaaaaggatcagaaattgttggaaatggagaacatcatgcacagccagaattgcgagatcaaagaactaaaacagtcaagggagatcgtgcttgaagacttaaaaaagctgcacgtggaaaacgatgagaaactccagctgctcagagcagagctacaatccctggaacagtctcacttgaaagaactcgaggacaccctgcaggtcaggcacatccaagagttcgagaaagttatgacggatcatagggtatcgctcgaggaactgaagaaagagaatcagcagattatcaatcagatccaagagagccatgccgaaatcatccaagaaaaggaaaagcagctgcaagaactcaaactaaaggtatctgatctgagcgacactagatgcaaactggaagtggaactcgccttgaaagaggctgagaccgatgagatcaagatcctcttagaggaaagcagagcgcagcaaaaagagaccctgaagtctctactggaacaggaaacagagaacctccggaccgaaatcagtaagctcaaccagaagatccaggacaacaatgagaactaccaggtggggctcgccgagcttcgcactttgatgactatcgaaaaagatcaatgtattagcgaactgatttctaggcacgaagaggaatctaatattcttaaggccgagctcaacaaagtgacctcgctccacaaccaagcattcgagatagagaagaacctgaaagagcagatcattgagttgcagtccaaactcgatagcgagctgtccgcactcgaaaggcaaaaggatgagaaaattacccagcaggaggaaaagtatgaagctatcatacagaatctggagaaagaccgccagaagctggtcagttcccaggaacaagaccgcgagcagctgatccagaaactcaactgcgaaaaagacgaagccattcagaccgcccttaaggagtttaagctggaacgagaggtggttgaaaaagaattgcttgaaaaagttaaacacctggaaaatcagattgcaaagagtccggctatcgactccaccagaggagacagctcctccctggtagcggagctgcaagagaaactgcaagaggaaaaagctaagtttctggaacaactggaggagcaggaaaaacggaaaaacgaagagatgcagaacgttcggacttccctgatcgccgagcagcagaccaactttaacacggtcctcacccgtgaaaaaatgagaaaagaaaatatcattaacgatctcagtgataagctgaagtcaaccatgcagcagcaagaaagggacaaggacttaatcgaaagcctgtcggaggatagagctcgcctgcttgaagagaaaaagaagttggaagaggaggtgtccaagcttagatcctctagcttcgtgccaagtccatatgtggctacagccccagaactttatggcgcatgtgccccggagctaccaggcgagagtgatcggagtgccgtcgagacagccgatgaaggcagagtggacagtgccatggaaacgtcgatgatgagtgtacaggaaaacatccacatgctgagtgaagaaaaacagcggattatgttactggagaggacactgcagttaaaagaagaggagaacaaaagactaaatcaaaggctgatgtctcaaagcatgtcttcagtgtcaagtcgacatagcgagaagatagctattcgcgatttccaggttggcgacttagtgctgatcatccttgacgagaggcatgacaattacgtgctattcacagtgagcccgaccttgtacttcttgcactccgagtcgcttcctgcattggatcttaagcccggcgagggcgcctctggggccagtcgacgaccttgggtgctaggcaaagtgatggaaaaagagtactgccaggccaagaaggcgcagaacagattcaaagttcctcttggcacaaaattttaccgagtcaaggccgtaagttggaataaaaaggtctag

SEQ ID NO: 182173 - DNA, 4785 bp, Artificial Sequence
  derived and/or modified sequence
atgaaactctacgtgttcctggttaataccgggaccactctgactttcgacaccgagctaactgttcaaaccgtcgccgatcttaaacatgctattcaatccaaatacaaaattgccattcagcatcaagtccttgtggttaacggaggagaatgtatggctgcagaccgacgtgtgtgcacatattcagctggcaccgatactaatcctattttccttttcaataaagagatgatcctgtgtgatcgaccccctgccatcccaaaaaccactttctctaccgaaaatgatatggagatcaaggttgaagagtccctgatgatgcccgcagttttccataccgtggctagcaggacccaactggctttagaaatgtatgaggtggccaagaagctctgttccttttgtgagggattggtgcacgatgaacacttgcaacaccaagggtgggccgccattatggctaatttagaggactgttcaaattcctaccaaaaactgctttttaaatttgagtccatttatagcaattaccttcagtctattgaggatattaaactgaaacttactcatcttggcacagccgtcagtgttatggcaaaaattccccttctagaatgtttgactagacattcctacagagagtgtctaggacgattagattcccttccggagcacgaagattctgaaaaggcagagatgaaaagaagcacggaactcgtactgtcccctgacatgccacggaccacaaacgaatccctcctcacatctttccccaaatctgtcgaacatgtcagccccgacacggctgacgctgagagtggaaaggaaatcagagagagttgccagtctacagtacaccagcaggatgagaccaccatagatacgaaagacggagaccttcctttttttaatgtgtcccttttagactggatcaacgtgcaggaccgaccgaatgacgtcgaaagcctggttaggaaatgcttcgattccatgtctaggttggatccccgaattatccggccatttattgcagagtgccgacagacgatcgcaaagttagacaatcagaacatgaaagcaattaaaggcctcgaggaccggctgtatgccctggatcagatgatagcttcctgtggtcgcctagttaacgaacaaaaagagctggctcagggattcctcgcaaaccagaagcgggctgaaaacctgaaagatgcgtcagttctgccagacttatgcctttcgcacgctaaccagcttatgatcatgcttcagaaccacagaaagttattagacataaagcagaaatgcacaacagcaaagcaagagttggcaaataacctccacgttagactaaagtggtgctgcttcgtgatgctgcacgctgatcaggacggggaaaagttacaggccctccttagattggtgattgagctccttgaaagggttaaaattgtagaggcactttctaccgtgccacagatgtactgcctcgctgttgtcgaagtggtcaggcggaagatgttcattaagcattaccgggagtgggccggcgccctcgtaaaggacgggaaaagactgtacgaagccgagaaatctaaacgcgagagctttggcaaactcttcaggaaatcttttctcaggaatcgactgtttcgtggactggacagttggccaccatccttctgcacccagaaaccacgtaaattcgattgtgaacttccagacatatcactcaaagacctacaatttctgcaaagtttctgcccctcagaggtccaacctttcctccgggtcccacttttgtgtgacttcgaacctctgcaccagcatgttctagcactacataatttggtcaaagctgcccaatctctcgacgagatgtcacagacaataactgatctgctttctgaacaaaaggcaagcgtgtcgcagacttctccccagtccgcctctagccccaggatggagtccacagctggcattacaactacaacttcacccagaaccccaccacctttgactgttcaagatcccctctgccctgcggtctgcccccttgaagaactgtctccggactcaatcgacgctcacaccttcgatttcgaaactattccccacccaaacatcgagcagacaatccaccaggtaagtctagacctcgactctctggccgaatctcccgaatccgattttatgtcagccgtgaacgaatttgtgatagaagagaacctatcttcccccaacccaattagcgacccccagagccctgagatgatggtggagtccttgtacagctcagtcattaatgctatcgattcccgcagaatgcaggataccaatgtgtgcggtaaagaagacttcggggatcacacctcactgaacgtgcagctggagcgttgccgcgttgtggcccaggacagccacttttctattcaaactattaaggaggacttgtgccacttccgaaccttcgtacagaaagaacagtgcgacttttccaactccctgaagtgcacagccgtggagattaggaacatcatagaaaaagtaaagtgctcgctcgagattaccctaaaggaaaaacatcagaaagagctgctgagcttaaagaacgaatatgagggcaaactggacggactcattaaggaaaccgaggaaaatgaaaataagattaaaaaattgaagggcgaactcgtttgcctcgaagaagtgctacagaacaaagacaatgaatttgccctggtgaaacatgaaaaagaggccgttatctgcctgcagaacgaaaaggatcaaaaactgctggagatggagaacattatgcattcccaaaattgtgaaatcaaggaactcaaacagtctcgggagatcgtgcttgaggatctgaagaaattgcacgttgagaacgatgaaaaattacagcttcttcgagccgagcttcaaagcctcgagcagagccacctcaaagaactggaagatactctacaagtgagacatattcaggagtttgagaaagtgatgactgatcatagagtctcattagaggagcttaaaaaagaaaaccaacagattatcaatcagatccaggaatctcatgctgagataattcaggaaaaagaaaagcaactgcaagaactgaagttgaaagtcagcgacctcagtgacacaagatgcaaattagaggtggaattggccttaaaggaagcagagacagatgagattaaaatccttctagaggagtctagagcccagcagaaagagactctcaagagcttgctggaacaagaaaccgagaacttgaggaccgagatcagtaagctcaatcagaagattcaggataacaacgagaattaccaggtcgggctagcggagttgcgaacgctgatgaccatcgagaaagaccagtgcatttccgagcttatatccagacatgaagaagagagtaacattttgaaggccgaattaaataaggtaacgtctttgcacaaccaagcatttgaaatcgaaaagaatctgaaagaacagattatagaactgcaatccaaactagatagcgaactctccgccctagagagacagaaagatgagaaaatcactcagcaggaggagaaatacgaagccattatacagaacctggaaaaggacaggcagaaactggtgagctcccaggaacaggatcgcgagcaactgatccagaaactgaactgcgaaaaggacgaagccatccagactgccttaaaagagttcaaacttgaacgtgaagtggtggaaaaagagttgctggaaaaggtaaaacatttggaaaatcagatcgcaaaatcccccgctatagacagcactcgaggagattcctcatcacttgtcgctgaactccaagaaaaacttcaggaagagaaggccaagtttctggagcaacttgaagaacaagagaaaaggaaaaatgaggagatgcaaaatgtcagaacctctctcatagcagaacaacagacgaactttaatactgtactcactagagagaagatgcgtaaggagaatattattaacgatctgtccgataagctgaagtctacaatgcagcagcaggaaagggacaaagatttaatagagagcttgtctgaggaccgggccaggttactagaggagaaaaagaaacttgaagaagaggtatccaagctgagaagtagctccttcgtacctagcccttatgtggccacggcccctgaactttacggggcatgtgcccccgaactcccaggcgaatccgatcgctctgcagtagaaaccgccgatgagggccgggtcgactcagcaatggaaacttctatgatgtccgtgcaggaaaacattcacatgctgtccgaggaaaaacaaaggattatgctcctcgagagaacactgcagttaaaggaagaagagaataaaaggcttaaccagcgcctcatgagtcaatctatgtcgtcagtgtccagcagacatagcgaaaaaatagctatccgcgatttccaagtgggagatctagtcctgataattcttgacgaaagacacgacaactacgtcctcttcacagtgtcgcctaccctttattttctgcatagcgaatccctccccgccctagatcttaagccaggcgaaggtgccagcggggccagcaggcgtccctgggttctgggcaaagtgatggaaaaggaatactgtcaggccaaaaaggcacagaatagatttaaagttccgctgggtaccaaattttaccgtgttaaagctgtaagctggaacaaaaaagtttag

SEQ ID NO: 182174 - DNA, 6635 bp, Artificial Sequence
  derived and/or modified sequence
gtcgacaataacaaaccaagccgcggcggtgtccgcggccctgccgagccctcggcgttgcctcagaatcccccagtcgcctgggcccctcggctctgacaggccgcggccttctgtcccccggccccagacccagagccgaggggcctgctcgcgtccttgtccgcccggacccctccctgcctcctagagttcggggccgcggcgggcgggcgcccgggacgccggcggttgtgtcggcttagcggtgccgaatgggcggttggtaaccgctgccgaggactaggcggcggcggaagatggtgccgggggtcgctggctctgctgctgccgccggcgaaggaggaggcgttgccggttttctgagtttaaccagtaatgccattcagttgccaatctcaagcaaagcaaacataagccagttttaatctactttttaagaaaagtggtagtccttttcacagtgcctgacgtaactgtatcagagggtgaggtataagctcacagaattcagataaatcatcatgaagttatatgtatttctggttaacactggaactactctaacatttgacactgaacttacagtgcaaactgtggcagaccttaagcatgccattcaaagcaaatacaagattgctattcaacaccaggtgctggtggtcaatggaggagaatgcatggctgcagatcgaagagtgtgtacctacagtgctgggacggatacaaatccaatttttctttttaacaaagaaatgatcttatgtgatcgtccacctgctattcctaaaactaccttttcgacagaaaatgacatggaaataaaagttgaagaatctcttatgatgcctgcagtttttcatactgttgcttcaaggacacagcttgcattggaaatgtatgaagttgccaagaaactttgttctttttgtgaaggtcttgtacatgatgaacatcttcaacaccaaggctgggctgcaatcatggccaacctggaggactgttcaaattcataccaaaagctacttttcaagtttgaaagtatttattcaaattatctgcagtccatagaagacatcaagttaaaacttactcatttaggaactgcagtttcagtaatggccaagattccactgttggagtgcctaaccagacatagttacagagaatgtttgggaagactggattctttacctgaacatgaagactcagaaaaagctgagatgaaaagatccactgaactggtgctctctcctgatatgcctagaacaactaacgaatctttgttaacctcatttcccaagtcagtggaacatgtgtccccagataccgcagatgctgaaagtggcaaagaaattagggaatcttgtcaaagtactgttcatcagcaagatgaaactacgattgacactaaagatggtgatctgcccttttttaatgtctctttgttagactggataaatgttcaagatagacctaatgatgtggaatctttggtcaggaagtgctttgattctatgagcaggcttgatccaaggattattcgaccatttatagcagaatgccgtcaaactattgccaaacttgataatcagaatatgaaagccattaaaggacttgaagatcggctctacgccctggaccagatgattgctagctgtggccgactggtgaatgaacagaaagagcttgctcagggatttttagctaatcagaagagagctgaaaacttaaaggatgcatctgtattacctgatttatgcctgagtcacgcaaatcagttgatgattatgttgcaaaatcatagaaaactgttagatattaagcagaagtgtaccactgccaaacaagaactagcaaataacctacatgtcagactgaagtggtgttgctttgtaatgcttcatgctgatcaagatggagagaagttacaagctttgctccgcctcgtaatagagctgttagaaagagtcaaaattgttgaagctcttagtacagttcctcagatgtactgcttagctgttgttgaggttgtaagaagaaaaatgttcataaaacactacagggagtgggctggtgctttagtcaaagatggaaagagattatatgaagcagaaaaatcaaaaagggaatcctttgggaaattatttaggaagtcttttttaagaaatcgtctgtttaggggactggactcctggcccccttccttttgtactcaaaagcctcgaaagtttgactgtgaacttccagatatttcattaaaagatttacagtttctgcaatcattttgtccttcggaagttcagccattcctcagggttcccttactttgtgactttgaacctctacaccagcatgtacttgctctacataatttggtaaaagcagcacaaagtttggatgaaatgtcacagaccattacagatctactgagtgaacaaaaggcatctgtgagtcagacatccccacagtctgcttcttcaccaaggatggaaagtacagcaggaattacaactactacctcaccgagaactcctccaccactgactgttcaggatcccttatgtcctgcagtttgtcccttagaagaattatctccagatagtattgatgcacatacgtttgattttgaaactattccccatccaaacatagaacagactattcaccaagtttctttagacttggattcattagcagaaagtcctgaatcagattttatgtctgctgtgaatgagtttgtaatagaagaaaatttgtcgtctcctaatcctataagtgatccacaaagcccagaaatgatggtggaatcactttattcatcagttatcaatgcgatagacagtagacgaatgcaggatacaaatgtatgtggtaaggaggattttggagatcatacttctctgaatgtccagttggaaagatgtagagttgttgcccaagactctcacttcagtatacaaaccattaaggaagacctttgccactttagaacatttgtacaaaaagaacagtgtgacttctcaaattcattaaaatgtacagcagtagaaataagaaacattattgaaaaagtaaaatgttctctggaaataacactaaaagaaaaacatcaaaaagaactactgtctttaaaaaatgaatatgaaggtaaacttgacggactaataaaggaaactgaagagaatgaaaacaaaattaaaaaattgaagggagagttagtatgccttgaggaggttttacaaaataaagataatgaatttgctttggttaaacatgaaaaagaagctgtaatctgcctgcagaatgaaaaggatcagaagttgttagagatggaaaatataatgcactctcaaaattgtgaaattaaagaactgaagcagtcacgagaaatagtgttagaagacttaaaaaagctccatgttgaaaatgatgagaagttacagttattgagggcagaacttcagtccttggagcaaagtcatctaaaggaattagaggacacacttcaggttaggcacatacaagagtttgagaaggttatgacagaccacagagtttctttggaggaattaaaaaaggaaaaccaacaaataattaatcaaatacaagaatctcatgctgaaattatccaggaaaaagaaaaacagttacaggaattaaaactcaaggtttctgatttgtcagacacgagatgcaagttagaggttgaacttgcgttgaaggaagcagaaactgatgaaataaaaattttgctggaagaaagcagagcccagcagaaggagaccttgaaatctcttcttgaacaagagacagaaaatttgagaacagaaattagtaaactcaaccaaaagattcaggataataatgaaaattatcaggtgggcttagcagagctaagaactttaatgacaattgaaaaagatcagtgtatttccgagttaattagtagacatgaagaagaatctaatatacttaaagctgaattaaacaaagtaacatctttgcataaccaagcatttgaaatagaaaaaaacctaaaagaacaaataattgaactgcagagtaaattggattcagaattgagtgctcttgaaagacaaaaagatgaaaaaattacccaacaagaagagaaatacgaagctattatccagaaccttgagaaagacagacaaaaattggtcagcagccaggagcaagacagagaacagttaattcagaagcttaattgtgaaaaagatgaagctattcagactgccctaaaagaatttaaattggagagagaagttgttgagaaagagttattagaaaaagttaaacatcttgagaatcaaatagcaaaaagtcctgccattgactctaccagaggagattcttcaagcttagttgctgaacttcaagaaaagcttcaggaagaaaaagctaagtttctagaacaacttgaagagcaagaaaaaagaaagaatgaagaaatgcaaaatgttcgaacatctttgattgcggaacaacagaccaattttaacactgttttaacaagagagaaaatgagaaaagaaaacataataaatgatcttagtgataagttgaaaagtacaatgcagcaacaagaacgggataaagatttgatagagtcactttctgaagatcgagctcgtttgcttgaggaaaagaaaaagcttgaagaagaagtcagtaagttgcgtagtagcagttttgttccttcaccatatgtagctacagccccagaactttatggagcttgtgcacctgaactcccaggtgaatcagatagatccgctgtggaaacagcagatgaaggaagagtggattcagcaatggagacaagcatgatgtctgtacaagaaaatattcatatgttgtctgaagaaaaacagcggataatgctgttagaacgaacattgcaattgaaagaagaagaaaataaacggttaaatcaaagactgatgtctcagagcatgtcttcagtatcttcaaggcattctgaaaagatagctattagagattttcaggtgggagatttggtactcatcatcctagacgaacgccatgacaattatgtgttatttactgttagtcctactttatattttctacattcagagtctctacctgccctggatctcaaaccaggtgagggtgcttcaggtgcatctagaagaccctgggtacttggaaaagtaatggaaaaagaatactgtcaagccaaaaaggcacaaaacagatttaaagttcctttggggacaaagttttacagagtgaaagccgtatcatggaataagaaagtataacttatggacaaaattaatacattctatgacatttttttctgatttgtcctgcagtgctcattcatcactccaaaaacagcaggccatctttttatgcaaaagtcagcgtgacaatatacttcactggtgtacatcgtttactttttaactggcttcattttaggaataataaattcatcagaatccttggctgaattaaaatggtttttgttttttggtttttttttttacccagacaactctagaaatgcggaccaaactacttcattttctcaaagggcataccttgtgcattgtggcttatgatgagccatattaattgcctgttaaatatacactagcttgaacttagatgttaaatgttattattaccagcatttgtccttttgtgaaatcagtatcagaatacttgcactctttaacacattctttataaaatgtataaattattcagaactatttaaaataaagaggagtgttattgcatgctgataatcattttgagtttgcctcagtagatactaaagcaaattgtttcagtttttttaaatgccctttgatgtttcaaaaaaaaaaaggaactgtaatttgattgactgattttaagatcagccataagtaatcagcaatcttcaaaagcactttcagtggattggtcatctgggttctaaagggaagagtctgtgctactaaccatttcaaatgcagactcaaaccttcccaacatctttatgactctagaataatcatattgatgaaatcgtaattcatggttgagtttcagaacaaaagatattcattgcacattaaccatttagaggtcatttaaataacaaaatattgtattgtaaaagaactgtacaattttaaaacaataaagatttgaacctgtaaatgtgtgtgccttttaaagaaggatacatttttaatatatttgagtgattgctgggaagtgtgaaaatattgttatgtatcatatcaaagagaaacatgtttattacaaaaatgttctttaactatatactatgtaacagggtaaacagtgttatgtagaatagaattgtgtaaactagatctttagagaagttgccattgagcaaagttatttaaatgagttagttgagttggatgagaattgtttgaggtttgttgctagagaacaataataaaataattctttttcagaaaatatttaatttcttcataaaaataagttaaatatttttttaaatatgtatatctaatagtacaaaatggaataaacatcatagtgtatagaaaactgaatttgacaagttaatgaataaatgaacaaatgatttcaca

SEQ ID NO: 182175 - RNA, 4785 nt, Artificial Sequence
  derived and/or modified sequence
augaaacuguauguuuuucucguuaacacuggcacgacacugaccuuugauacagagcugacaguccagaccguggcagaucucaagcaugccauccagucaaaguacaagaucgcaauccaacaucaagugcuuguagugaacggcggagaaugcauggcugcagaucggagaguauguacuuacagcgccgggacagacacuaauccuauuuuucuguuuaauaaagaaaugauccucugcgauagaccuccagcaauccccaagaccacauuuaguacugagaacgacauggaaauaaagguggaggaguccuuaaugaugcccgccguguuucacacagucgcuagucguacucaguuagcucucgaaauguaugaggucgcgaagaagcugugcucauucugugagggccugguucaugaugagcaccuacagcaccaaggaugggccgcaauaauggcaaaccucgaggacuguucaaacaguuaucaaaaguugcuguuuaaauuugagucuauauauucgaauuacuugcagagcaucgaagauauaaaacugaagcucacucauuuggguaccgcaguuagugugauggcuaagauuccacuguuggaaugucucacucgacauaguuacagagagugucugggaaggcuggacucacuuccagagcacgaggacagcgagaaggcugaaaugaaacguucaacugagcucguccuuuccccggacaugccccgaaccacuaacgagucucugcugaccucauucccuaagagcgucgaacacgugagcccagauaccgcugaugcggaaucagggaaggagauucgagaaucuugccaguccaccgugcaucaacaagaugagacuacaauagauacaaaagacggggaccugccuuuuuuuaaugugucacugcuggacuggauuaaugugcaagacaggccaaacgacguagaaucgcucgugcggaagugcuuugauuccaugucgagacuggauccgcguaucauucgaccuuuuauagccgaauguaggcagacgaucgccaaauuggacaaccagaauaugaaagcgaucaaggggcuggaagauagacuuuaugcccuagaucagaugaucgcguccugugguagacucgugaaugagcagaaggaauuagcucagggauuccuugcgaaucagaagagggcagaaaaccugaaggaugcaucagugcuaccagacuuaugucuaucucaugcuaaucaauugaugauuauguuacagaaccaucgaaagcuccuggacaucaaacagaaauguacaaccgcuaagcaggagcucgcuaacaauuugcauguuagguuaaagugguguuguuuuguuaugcugcaugcugaccaggauggcgagaaacuucaagcacugcuucgucuggucauugagcuguuagagcgggucaagaucguggaagcacucuccaccgucccccaaauguacugccuggcagucgucgaaguagugcguagaaagauguuuauuaagcacuaccgcgagugggccggagcccuggucaaagacgggaaaagacuguaugaagcugaaaagaguaagagggaauccuucggcaaacuauuucgcaaaucuuucuugagaaacagacuguuuagggggcuugacucauggccccccuccuuuugcacccaaaaaccucgaaaguucgauugugaacugccggacauuucucugaaggauuugcaauuucuccagucguuuugccccagcgaggugcagccguuccuaaggguaccacugcuaugugacuucgagccacuccaccagcacguguuggcacugcauaacuuggugaaggccgcacagucccuggacgaaaugagccagacaauuaccgaccuucugagugaacagaaagcuagcguuucccagacuucgccgcaaagcgccucuucuccgcgaauggaguccacugccgguaucacuacaacuacaagcccaagaacuccccccccuuuaacuguccaggacccgcuaugcccagcugugugcccuuuagaggagcucuccccagauuccauugacgcccauacguucgauuucgagaccaucccucacccuaauaucgagcagaccauucaucaaguaaguuuagaucuggauagucucgcugagagcccugagagcgauuucaugagcgccguuaaugaguuugugauagaggagaauuugucgagccccaauccgaucagcgacccucagucucccgagaugaugguggaaucucuguauagcucagugaucaaugcaaucgacucacggcgaaugcaggauaccaaugugugugggaaggaggauuucggcgaccauacuucacugaauguucaguuggagagauguagggugguggcccaggauucucacuucagcauccagacgauaaaagaggaucugugccacuuuagaaccuucguucagaaggagcagugcgacuucaguaacagccuuaaaugcaccgccguggagauccguaauauuaucgaaaaagucaaauguucucuagaaauuacauuaaaagaaaagcaucagaaggagcuucugucuuuaaaaaaugaguacgagggcaagcuugacggucugaucaaagagaccgaggagaaugagaauaagauuaagaaacucaagggggaguuaguuuguuuggaggagguucugcagaauaaggacaacgaauuugcacugguuaagcacgaaaaggaggcugucaucugccuucaaaaugaaaaggaucagaaauuguuggaaauggagaacaucaugcacagccagaauugcgagaucaaagaacuaaaacagucaagggagaucgugcuugaagacuuaaaaaagcugcacguggaaaacgaugagaaacuccagcugcucagagcagagcuacaaucccuggaacagucucacuugaaagaacucgaggacacccugcaggucaggcacauccaagaguucgagaaaguuaugacggaucauaggguaucgcucgaggaacugaagaaagagaaucagcagauuaucaaucagauccaagagagccaugccgaaaucauccaagaaaaggaaaagcagcugcaagaacucaaacuaaagguaucugaucugagcgacacuagaugcaaacuggaaguggaacucgccuugaaagaggcugagaccgaugagaucaagauccucuuagaggaaagcagagcgcagcaaaaagagacccugaagucucuacuggaacaggaaacagagaaccuccggaccgaaaucaguaagcucaaccagaagauccaggacaacaaugagaacuaccagguggggcucgccgagcuucgcacuuugaugacuaucgaaaaagaucaauguauuagcgaacugauuucuaggcacgaagaggaaucuaauauucuuaaggccgagcucaacaaagugaccucgcuccacaaccaagcauucgagauagagaagaaccugaaagagcagaucauugaguugcaguccaaacucgauagcgagcuguccgcacucgaaaggcaaaaggaugagaaaauuacccagcaggaggaaaaguaugaagcuaucauacagaaucuggagaaagaccgccagaagcuggucaguucccaggaacaagaccgcgagcagcugauccagaaacucaacugcgaaaaagacgaagccauucagaccgcccuuaaggaguuuaagcuggaacgagaggugguugaaaaagaauugcuugaaaaaguuaaacaccuggaaaaucagauugcaaagaguccggcuaucgacuccaccagaggagacagcuccucccugguagcggagcugcaagagaaacugcaagaggaaaaagcuaaguuucuggaacaacuggaggagcaggaaaaacggaaaaacgaagagaugcagaacguucggacuucccugaucgccgagcagcagaccaacuuuaacacgguccucacccgugaaaaaaugagaaaagaaaauaucauuaacgaucucagugauaagcugaagucaaccaugcagcagcaagaaagggacaaggacuuaaucgaaagccugucggaggauagagcucgccugcuugaagagaaaaagaaguuggaagaggagguguccaagcuuagauccucuagcuucgugccaaguccauauguggcuacagccccagaacuuuauggcgcaugugccccggagcuaccaggcgagagugaucggagugccgucgagacagccgaugaaggcagaguggacagugccauggaaacgucgaugaugaguguacaggaaaacauccacaugcugagugaagaaaaacagcggauuauguuacuggagaggacacugcaguuaaaagaagaggagaacaaaagacuaaaucaaaggcugaugucucaaagcaugucuucagugucaagucgacauagcgagaagauagcuauucgcgauuuccagguuggcgacuuagugcugaucauccuugacgagaggcaugacaauuacgugcuauucacagugagcccgaccuuguacuucuugcacuccgagucgcuuccugcauuggaucuuaagcccggcgagggcgccucuggggccagucgacgaccuugggugcuaggcaaagugauggaaaaagaguacugccaggccaagaaggcgcagaacagauucaaaguuccucuuggcacaaaauuuuaccgagucaaggccguaaguuggaauaaaaaggucuag

SEQ ID NO: 182176 - RNA, 4785 nt, Artificial Sequence
  derived and/or modified sequence
augaaacucuacguguuccugguuaauaccgggaccacucugacuuucgacaccgagcuaacuguucaaaccgucgccgaucuuaaacaugcuauucaauccaaauacaaaauugccauucagcaucaaguccuugugguuaacggaggagaauguauggcugcagaccgacgugugugcacauauucagcuggcaccgauacuaauccuauuuuccuuuucaauaaagagaugauccugugugaucgacccccugccaucccaaaaaccacuuucucuaccgaaaaugauauggagaucaagguugaagagucccugaugaugcccgcaguuuuccauaccguggcuagcaggacccaacuggcuuuagaaauguaugagguggccaagaagcucuguuccuuuugugagggauuggugcacgaugaacacuugcaacaccaagggugggccgccauuauggcuaauuuagaggacuguucaaauuccuaccaaaaacugcuuuuuaaauuugaguccauuuauagcaauuaccuucagucuauugaggauauuaaacugaaacuuacucaucuuggcacagccgucaguguuauggcaaaaauuccccuucuagaauguuugacuagacauuccuacagagagugucuaggacgauuagauucccuuccggagcacgaagauucugaaaaggcagagaugaaaagaagcacggaacucguacuguccccugacaugccacggaccacaaacgaaucccuccucacaucuuuccccaaaucugucgaacaugucagccccgacacggcugacgcugagaguggaaaggaaaucagagagaguugccagucuacaguacaccagcaggaugagaccaccauagauacgaaagacggagaccuuccuuuuuuuaaugugucccuuuuagacuggaucaacgugcaggaccgaccgaaugacgucgaaagccugguuaggaaaugcuucgauuccaugucuagguuggauccccgaauuauccggccauuuauugcagagugccgacagacgaucgcaaaguuagacaaucagaacaugaaagcaauuaaaggccucgaggaccggcuguaugcccuggaucagaugauagcuuccuguggucgccuaguuaacgaacaaaaagagcuggcucagggauuccucgcaaaccagaagcgggcugaaaaccugaaagaugcgucaguucugccagacuuaugccuuucgcacgcuaaccagcuuaugaucaugcuucagaaccacagaaaguuauuagacauaaagcagaaaugcacaacagcaaagcaagaguuggcaaauaaccuccacguuagacuaaaguggugcugcuucgugaugcugcacgcugaucaggacggggaaaaguuacaggcccuccuuagauuggugauugagcuccuugaaaggguuaaaauuguagaggcacuuucuaccgugccacagauguacugccucgcuguugucgaaguggucaggcggaagauguucauuaagcauuaccgggagugggccggcgcccucguaaaggacgggaaaagacuguacgaagccgagaaaucuaaacgcgagagcuuuggcaaacucuucaggaaaucuuuucucaggaaucgacuguuucguggacuggacaguuggccaccauccuucugcacccagaaaccacguaaauucgauugugaacuuccagacauaucacucaaagaccuacaauuucugcaaaguuucugccccucagagguccaaccuuuccuccgggucccacuuuugugugacuucgaaccucugcaccagcauguucuagcacuacauaauuuggucaaagcugcccaaucucucgacgagaugucacagacaauaacugaucugcuuucugaacaaaaggcaagcgugucgcagacuucuccccaguccgccucuagccccaggauggaguccacagcuggcauuacaacuacaacuucacccagaaccccaccaccuuugacuguucaagauccccucugcccugcggucugcccccuugaagaacugucuccggacucaaucgacgcucacaccuucgauuucgaaacuauuccccacccaaacaucgagcagacaauccaccagguaagucuagaccucgacucucuggccgaaucucccgaauccgauuuuaugucagccgugaacgaauuugugauagaagagaaccuaucuucccccaacccaauuagcgacccccagagcccugagaugaugguggaguccuuguacagcucagucauuaaugcuaucgauucccgcagaaugcaggauaccaaugugugcgguaaagaagacuucggggaucacaccucacugaacgugcagcuggagcguugccgcguuguggcccaggacagccacuuuucuauucaaacuauuaaggaggacuugugccacuuccgaaccuucguacagaaagaacagugcgacuuuuccaacucccugaagugcacagccguggagauuaggaacaucauagaaaaaguaaagugcucgcucgagauuacccuaaaggaaaaacaucagaaagagcugcugagcuuaaagaacgaauaugagggcaaacuggacggacucauuaaggaaaccgaggaaaaugaaaauaagauuaaaaaauugaagggcgaacucguuugccucgaagaagugcuacagaacaaagacaaugaauuugcccuggugaaacaugaaaaagaggccguuaucugccugcagaacgaaaaggaucaaaaacugcuggagauggagaacauuaugcauucccaaaauugugaaaucaaggaacucaaacagucucgggagaucgugcuugaggaucugaagaaauugcacguugagaacgaugaaaaauuacagcuucuucgagccgagcuucaaagccucgagcagagccaccucaaagaacuggaagauacucuacaagugagacauauucaggaguuugagaaagugaugacugaucauagagucucauuagaggagcuuaaaaaagaaaaccaacagauuaucaaucagauccaggaaucucaugcugagauaauucaggaaaaagaaaagcaacugcaagaacugaaguugaaagucagcgaccucagugacacaagaugcaaauuagagguggaauuggccuuaaaggaagcagagacagaugagauuaaaauccuucuagaggagucuagagcccagcagaaagagacucucaagagcuugcuggaacaagaaaccgagaacuugaggaccgagaucaguaagcucaaucagaagauucaggauaacaacgagaauuaccaggucgggcuagcggaguugcgaacgcugaugaccaucgagaaagaccagugcauuuccgagcuuauauccagacaugaagaagagaguaacauuuugaaggccgaauuaaauaagguaacgucuuugcacaaccaagcauuugaaaucgaaaagaaucugaaagaacagauuauagaacugcaauccaaacuagauagcgaacucuccgcccuagagagacagaaagaugagaaaaucacucagcaggaggagaaauacgaagccauuauacagaaccuggaaaaggacaggcagaaacuggugagcucccaggaacaggaucgcgagcaacugauccagaaacugaacugcgaaaaggacgaagccauccagacugccuuaaaagaguucaaacuugaacgugaagugguggaaaaagaguugcuggaaaagguaaaacauuuggaaaaucagaucgcaaaaucccccgcuauagacagcacucgaggagauuccucaucacuugucgcugaacuccaagaaaaacuucaggaagagaaggccaaguuucuggagcaacuugaagaacaagagaaaaggaaaaaugaggagaugcaaaaugucagaaccucucucauagcagaacaacagacgaacuuuaauacuguacucacuagagagaagaugcguaaggagaauauuauuaacgaucuguccgauaagcugaagucuacaaugcagcagcaggaaagggacaaagauuuaauagagagcuugucugaggaccgggccagguuacuagaggagaaaaagaaacuugaagaagagguauccaagcugagaaguagcuccuucguaccuagcccuuauguggccacggccccugaacuuuacggggcaugugcccccgaacucccaggcgaauccgaucgcucugcaguagaaaccgccgaugagggccgggucgacucagcaauggaaacuucuaugauguccgugcaggaaaacauucacaugcuguccgaggaaaaacaaaggauuaugcuccucgagagaacacugcaguuaaaggaagaagagaauaaaaggcuuaaccagcgccucaugagucaaucuaugucgucaguguccagcagacauagcgaaaaaauagcuauccgcgauuuccaagugggagaucuaguccugauaauucuugacgaaagacacgacaacuacguccucuucacagugucgccuacccuuuauuuucugcauagcgaaucccuccccgcccuagaucuuaagccaggcgaaggugccagcggggccagcaggcgucccuggguucugggcaaagugauggaaaaggaauacugucaggccaaaaaggcacagaauagauuuaaaguuccgcuggguaccaaauuuuaccguguuaaagcuguaagcuggaacaaaaaaguuuag

SEQ ID NO: 182177 - protein, 1023 aa, Artificial Sequence
  derived and/or modified sequence
MWDQRLVRLALLQHLRAFYGIKVKGVRGQCDRRRHETAATEIGGKIFGVPFNALPHSAVPEYGHIPSFLVDACTSLEDHIHTEGLFRKSGSVIRLKALKNKVDHGEGCLSSAPPCDIAGLLKQFFRELPEPILPADLHEALLKAQQLGTEEKNKATLLLSCLLADHTVHVLRYFFNFLRNVSLRSSENKMDSSNLAVIFAPNLLQTSEGHEKMSSNTEKKLRLQAAVVQTLIDYASDIGRVPDFILEKIPAMLGIDGLCATPSLEGFEEGEYETPGEYKRKRRQSVGDFVSGALNKFKPNRTPSITPQEERIAQLSESPVILTPNAKRTLPVDSSHGFSSKKRKSIKHNFNFELLPSNLFNSSSTPVSVHIDTSSEGSSQSSLSPVLIGGNHLITAGVPRRSKRIAGKKVCRVESGKAGCFSPKISHKEKVRRSLRLKFNLGKNGREVNGCSGVNRYESVGWRLANQQSLKNRIESVKTGLLFSPDVDEKLPKKGSEKISKSEETLLTPERLVGTNYRMSWTGPNNSSFQEVDANEASSMVENLEVENSLEPDIMVEKSPATSCELTPSNLNNKHNSNITSSPLSGDENNMTKETLVKVQKAFSESGSNLHALMNQRQSSVTNVGKVKLTEPSYLEDSPEENLFETNDLTIVESKEKYEHHTGKGEKCFSERDFSPLQTQTFNRETTIKCYSTQMKMEHEKDIHSNMPKDYLSKQEFSSDEEIKKQQSPKDKLNNKLKENENMMEGNLPKCAAHSKDEARSSFSQQSTCVVTNLSKPRPMRIAKQQSLETCEKTVSESSQMTEHRKVSDHIQWFNKLSLNEPNRIKVKSPLKFQRTPVRQSVRRINSLLEYSRQPTGHKLASLGDTASPLVKSVSCDGALSSCIESASKDSSVSCIKSGPKEQKSMSCEESNIGAISKSSMELPSKSFLKMRKHPDSVNASLRSTTVYKQKILSDGQVKVPLDDLTNHDIVKPVVNNNMGISSGINNRVLRRPSERGRAWYKGSPKHPIGKTQLLPTSKPVDL

SEQ ID NO: 182178 - DNA, 3072 bp, Artificial Sequence
  derived and/or modified sequence
atgtgggatcagcgccttgtgcggctggctttactgcagcacctgagggctttttacggaattaaagtgaagggagtacgaggtcagtgtgacagacgccgccacgagacagccgccaccgaaatcggtgggaagatattcggcgtcccctttaacgctctcccccatagcgccgtccctgagtatggccacatcccttcattcctcgtcgacgcctgcacaagtctggaggaccatattcacacagaggggctgtttagaaagagtggctctgtaatccgcttaaaagccctcaaaaacaaagtggaccatggcgaaggatgcctgagcagcgccccaccatgtgacatcgctggactcctgaaacagttttttcgagagcttcctgagccgatcttaccagcagacctgcatgaggcgctcctgaaggcacagcagctaggaactgaagaaaagaataaggcaacactgctgttgtcatgcctgctggctgaccacaccgttcacgtcctgcgctacttctttaactttctgcggaatgtcagtctgcggagcagtgaaaacaagatggattcttccaaccttgctgttatttttgctcctaatctgctgcagacctccgaagggcatgagaagatgagctccaacaccgaaaaaaagctgcgtctccaggccgccgttgtgcagacactcattgattatgcctcagacatcggtcgggttcccgatttcatcctggaaaaaataccggctatgcttggtattgatggactctgtgccacaccgtccctggagggcttcgaggagggtgaatatgagacaccgggtgaatataagcgcaagcgtaggcagtctgttggggatttcgtttctggcgccctcaacaaatttaagccaaaccgcacccctagtatcacccctcaagaggagcggatcgcccaactttccgaatcccctgtaattttgacaccaaacgctaaacgcacccttcctgtcgattcttcacatggattttctagcaagaaacgcaaaagtatcaagcacaattttaactttgagctgttgccgtccaatctttttaactcgtcctccactcctgtgagtgtgcatatagatacctccagcgagggttcctctcagagctcactgagtccagtcctgatcggcggcaaccaccttatcactgcaggagtcccacgtcggtctaaaaggattgctggcaagaaagtttgccgagtggaatctggtaaagccggctgctttagcccaaagatcagtcataaagaaaaggtcaggagaagcctgcgcctcaaattcaatcttggtaagaatgggcgggaggtgaacggctgcagcggcgtgaaccggtacgagagcgtgggctggagactcgccaaccagcagtccctcaagaataggattgaatctgtaaaaaccggcctgctcttcagcccagacgtggatgagaaactacccaagaaaggcagcgagaagatttcgaaaagtgaggagacactcctaaccccagagaggctcgttggtactaattatcgaatgagttggaccggccccaacaatagttcattccaggaggtagacgctaatgaagcctctagtatggtcgaaaatctggaggtcgaaaatagccttgaacctgatatcatggtcgagaagagccctgcaacctcttgtgagctgacccctagcaatctcaacaacaagcacaacagcaacatcacaagcagtccactgtccggcgacgagaataacatgacaaaagaaactctcgtgaaggttcagaaggccttttcagaatccgggagcaatctgcacgctctcatgaaccaacggcagtctagtgttaccaatgtgggcaaggtaaaattaacggagccaagttatctggaggatagtcctgaggagaacctcttcgagaccaatgatttaaccatcgtggagtccaaggagaaatacgaacatcacaccggcaaaggtgagaagtgcttctcagagcgggattttagcccgctgcagacccagacattcaaccgagaaactacaattaagtgttattctacacaaatgaaaatggaacatgagaaggacattcactctaacatgcccaaagactatttgtccaagcaggagttcagcagcgacgaagaaatcaagaagcagcagtctcccaaagataagttgaacaataaattgaaagagaacgagaatatgatggaaggaaacctgccaaagtgcgctgctcacagtaaagacgaagctcgaagctcattttcacaacagagtacctgtgtcgtgacaaacctttccaagccgcggcccatgcgaattgccaagcaacagagtctggagacttgtgagaaaaccgtgtcggagtcttctcagatgactgagcacaggaaagtgtccgatcatatccagtggttcaataagctgagcctgaatgaaccgaaccggatcaaggtgaagtcccccttgaaatttcagcgaaccccggtccgtcaaagcgtccgccgcatcaattccctcctcgagtactcccgtcagccaaccgggcacaagctcgcttctcttggagatactgcctctccactggtgaaatccgtgtcttgcgacggggcactgagttcgtgcatagaatccgcatccaaggatagcagcgtgtcctgtatcaagtcaggcccgaaggagcagaaaagtatgtcgtgcgaagagagcaacataggcgccatctccaaatcttcaatggaattgccctcgaagagctttcttaagatgcggaagcatccagatagcgtgaatgcatccctgcggtccaccactgtttataagcagaaaatcctttctgatggacaggtaaaggttccgttggatgacttaaccaatcatgatatcgtgaagcctgttgtgaataataatatgggtatttcgagcggaattaacaaccgcgtgcttcgccgccccagcgagaggggaagggcatggtataaaggatctcccaagcatcctatcggtaagacacagctactgccgaccagcaagccggtcgatctgtag

SEQ ID NO: 182179 - DNA, 3072 bp, Artificial Sequence
  derived and/or modified sequence
atgtgggaccagaggctggtgcggctggccctgctgcagcacctgcgggccttctacggcatcaaggtgaagggcgtgcggggccagtgtgacagaagaagacatgaaacagctgccacagagatcggcggcaagatctttggagtgcccttcaatgccctgccccacagcgctgtgcctgaatatggccacatccccagcttcctggtggatgcctgcaccagcctggaggaccacatccacacagagggcctcttcaggaagagcggcagcgtcatccggctgaaggccctgaagaacaaggtggaccacggggagggctgcctgagcagcgccccaccctgtgacattgctggcctgctgaagcagttcttccgggagctgcctgagcccatcctgcctgctgacctgcacgaggccctgctgaaggcccagcagctgggcacagaggagaagaacaaggccaccctgctgctgagctgcctgctggccgaccacacagtgcacgtgctgcgctacttcttcaacttcctgagaaatgtgtccctgcggagcagcgagaacaagatggacagcagcaacctggccgtcatctttgcccccaacctgctgcagaccagcgagggccacgagaagatgagcagcaacacagagaagaagctgcggctgcaggccgctgtggtgcagaccctgattgattatgccagtgacatcggccgggtgcctgacttcatcctggagaagatcccagccatgctgggcattgatggcctgtgtgccacccccagcctggagggctttgaggagggggagtatgagaccccaggagagtacaagaggaagaggcggcagagcgtgggggactttgtgtctggggccctgaacaagttcaagcccaacagaacacccagcatcaccccccaggaggagcgcatcgcccagctgtctgagagccctgtgatcctgaccccaaatgccaagaggaccctgcctgtggacagcagccacggcttcagcagcaagaagaggaagagcatcaagcacaacttcaactttgagctgctgcccagcaacctcttcaacagcagcagcacccctgtgtctgtgcacatcgacaccagcagcgagggcagcagccagagcagcctgagccctgtgctgattggaggcaaccacctgatcacagctggggtgccccggcgcagcaagagaattgctgggaagaaggtgtgccgggtggagagcggcaaggccggctgcttcagccccaagatcagccacaaggagaaggtgcggcgcagcctgcggctgaagttcaacctgggcaagaatggccgggaggtgaatggctgcagcggcgtgaacagatatgaatctgtgggctggaggctggccaaccagcagagcctgaagaaccgcatcgagagcgtgaagacaggcctgctcttctccccagatgtggatgagaagctgcccaagaagggcagcgagaagatcagcaagtctgaggagaccctgctgaccccagagcggctggtgggcaccaactacaggatgtcctggacaggccccaacaacagcagcttccaggaggtggatgccaatgaggccagctccatggtggagaacctggaggtggagaacagcctggagccagacatcatggtggagaagagccctgccaccagctgtgagctgacccccagcaacctgaacaacaagcacaacagcaacatcaccagcagccccctgtctggagatgagaacaacatgaccaaggagaccctggtgaaggtgcagaaggccttcagcgagagcggcagcaacctgcacgccctgatgaaccagaggcagagctctgtgaccaacgtgggcaaggtgaagctgacagagcccagctacctggaggacagccctgaggagaacctgtttgagaccaatgacctgaccatcgtggagagcaaggagaagtatgagcaccacacaggcaagggggagaagtgcttcagcgagcgggacttcagccccctgcagacccagaccttcaaccgggagaccaccatcaagtgctacagcacccagatgaagatggagcacgagaaggacatccacagcaacatgcccaaggactacctgagcaagcaggagttcagcagtgatgaggagatcaagaagcagcagagccccaaggacaagctgaacaacaagctgaaggaaaatgaaaacatgatggagggcaacctgcccaagtgtgccgcccacagcaaggatgaggcccggagcagcttcagccagcagagcacctgtgtggtgaccaacctgagcaagccccggcccatgagaattgccaagcagcagagcctggagacctgtgagaagacagtgtctgagagcagccagatgacagagcacaggaaggtgtctgaccacatccagtggttcaacaagctgagcctgaatgagcccaaccgcatcaaggtgaagagccccctgaagttccagaggacccctgtgcggcagagcgtgcggcgcatcaacagcctgctggagtacagccggcagcccaccggccacaagctggccagcctgggggacacagccagccccctggtgaagtctgtgtcctgtgatggagccctgagcagctgcatcgagagcgccagcaaggacagctctgtgtcctgcatcaagagcggccccaaggagcagaagtccatgagctgtgaggagagcaacattggagccatcagcaagagctccatggagctgcccagcaagagcttcctgaagatgaggaagcacccagattctgtgaatgccagcctgcggagcaccaccgtgtacaagcagaagatcctgagtgatggccaggtgaaggtgcccctggatgacctgaccaaccacgacatcgtgaagcctgtggtgaacaacaacatgggcatcagcagcggcatcaacaacagagtgctgcggcggcccagcgagcggggccgggcctggtacaagggcagccccaagcaccccatcggcaagacccagctgctgcccaccagcaagcctgtggacctgtag

SEQ ID NO: 182180 - DNA, 3072 bp, Artificial Sequence
  derived and/or modified sequence
atgtgggaccagcggctggtgcggctggccctgctgcagcacctgcgggcattttacgggattaaggtaaaaggtgtgcgaggacagtgcgatagaagaaggcatgagacggcagccactgagatcggcggtaagatctttggcgtcccctttaatgccctgcctcatagcgccgtccctgagtacggacatataccctcctttttggttgacgcgtgtacctcacttgaagatcatatccacaccgaggggctcttcagaaaaagtggctcagttatcaggcttaaggccctcaaaaataaggtcgatcacggtgaaggctgtctcagctccgccccaccatgtgacatcgccggactgcttaagcagttcttcagggagctgccagaacccatactgcccgcagatctccacgaagctctgctaaaagcccagcagctgggcaccgaagaaaaaaacaaggccactctcctcttgtcttgtttgttagcagatcatactgtacatgtgttgcgctattttttcaattttctgagaaatgtctccctacgaagttctgagaacaagatggatagttctaacttagcggtgattttcgcccccaatttgctccaaacctctgaaggccatgagaagatgtcctctaacacggaaaagaaactccgccttcaggctgccgtggtacagaccttaattgattatgccagtgatattggaagagtacccgattttatactggagaagatccccgcgatgctgggcattgatgggctgtgtgctacaccgtctctggagggattcgaggaaggggagtacgagacacccggcgaatataagagaaagagaaggcagagcgtgggggactttgtgagcggtgcattgaacaagttcaaacccaaccggaccccttccatcacgcctcaggaagaaaggatagcacagctgtccgagagcccagtgatcctgactcctaatgcaaagaggactctgcccgtagattcttctcatggctttagctcaaagaagcggaaatctataaaacacaacttcaattttgagctgctgccctctaatttattcaattctagcagtacccctgtgtcagtgcatatcgatacttccagcgagggtagtagccaatcaagtctgagcccggtccttatcgggggcaaccacctaattacggccggagtcccccgacgcagtaaacggattgcaggaaaaaaagtttgtcgggtggagtccggcaaggcaggatgcttcagcccaaagatatcccacaaagaaaaagtgaggcggagtctgaggttaaagttcaatctgggaaaaaatgggcgcgaagtgaatgggtgcagcggggtgaataggtatgagtctgtcgggtggaggctggccaatcagcagtccctcaaaaaccgtatcgagagcgtcaaaaccggcctacttttctcgccagacgttgatgaaaagctgcctaaaaaggggtcagagaaaatctccaaaagcgaggagaccctgctgacacccgagcggttagtggggacaaactaccgcatgtcatggacgggccccaacaatagctcattccaggaagtcgatgcaaacgaagcctcaagcatggtggagaacctggaagtcgagaactctctcgaaccggacatcatggttgaaaagagcccagcaacctcctgtgaactaactcccagtaatctgaacaacaaacacaatagtaacattacctcatctccgttgtcaggagacgaaaacaatatgaccaaggaaacccttgtaaaagtgcaaaaggcattttctgaatccggctccaacctgcacgcactgatgaaccagaggcagtcatcagtcactaatgtgggtaaggtcaaactgacagagcccagctacctggaggacagcccagaggagaacctgttcgagacaaatgacctgacaatcgtggaaagtaaagagaaatatgaacaccataccgggaaaggggaaaaatgtttcagcgaaagagactttagtcccctgcagacacagacctttaacagagaaacaactatcaaatgctattccacccagatgaagatggaacacgaaaaggacattcattcgaatatgcccaaagactatttatctaaacaggagttttcttctgatgaagaaatcaaaaagcagcaaagtccaaaagataagcttaacaacaaactgaaagagaatgagaacatgatggagggaaatctacctaaatgtgccgcacattcaaaggatgaagcaaggagctcttttagtcaacagtcaacctgcgtcgtgactaatctaagtaagcctagacctatgcggattgctaaacaacagtctttagagacctgcgagaagacagtgagcgaaagctcacaaatgactgagcaccggaaggtgtccgatcatatccagtggttcaataaactcagcctgaatgagccaaacaggatcaaagtcaaatctcccctgaagttccaacggacgcccgtgcgccagagtgttcggcggataaatagtcttttggagtactcacgccaaccaactgggcacaaactggcttcactgggggataccgcatcccccctggtgaagtccgtgagctgcgacggcgccctttcatcctgcatcgaatctgccagcaaggactccagtgtttcttgcatcaagtctggcccgaaggaacagaaatctatgagctgcgaagaatccaatattggcgctatctctaagtccagcatggagcttccctctaaaagcttccttaaaatgcgcaagcaccccgacagtgtcaatgcctctctccgtagtactaccgtctataaacagaaaatcctgagcgatgggcaggtcaaagtgccccttgatgacctgaccaatcatgatatagtcaaaccagtggtgaacaataatatgggcataagctcgggcattaacaatagggttctgagaaggcccagtgagcgaggtcgcgcctggtacaagggttcacccaaacatcctattggcaaaacccagcttctccctacctctaagccagtcgacctgtag

SEQ ID NO: 182181 - DNA, 3072 bp, Artificial Sequence
  derived and/or modified sequence
atgtgggatcagcggctggttcgccttgcccttttgcagcatctgagggccttctatggaataaaggttaagggagtgcggggacagtgcgatagacggagacatgagacagcggctaccgagataggaggaaaaattttcggcgtgccattcaacgccttgccccattccgcggtacccgagtatggccatatcccctccttcctggtcgatgcctgcactagcctagaggatcatatccacactgaaggactgttcaggaaaagtggatccgtcatcaggctgaaagcgctcaaaaataaagtggaccacggagaagggtgtctgtctagcgccccaccctgtgatattgccggactgttaaagcaatttttcagagaactgcccgagcctatcctgccagcggacttgcacgaggcattgctgaaggcccaacaactggggacagaggaaaagaataaggccaccctgctcctctcgtgtctcttagccgatcataccgtacatgtgctgcggtacttttttaatttccttcgcaacgtatcactgagatccagcgagaacaagatggactcctccaacttagccgtgattttcgcccctaatttgttacagaccagcgaaggtcatgaaaaaatgtcttcaaataccgagaaaaagctgagactgcaagcggcagttgtgcaaacgttaatcgactacgcttccgatataggccgtgtaccagactttatacttgagaaaattcccgcaatgctcggaatagatgggctatgtgctacaccatctctggagggattcgaagaaggggaatatgaaacacctggggagtacaagaggaaacggaggcaaagcgtcggggactttgtcagcggcgcactgaataagttcaagccaaaccggacacccagcatcaccccacaagaagagcgcatagcccaactgagtgaatctcccgtgatcctcacgcctaacgccaagcggacactccctgtggactcatctcatggattttcttcaaaaaaaaggaagtccatcaagcataacttcaatttcgagctgctgccaagcaatctgttcaacagcagctcaactcctgtttccgtccacatcgatacttcttcagaggggtcctcccagtctagcctttctcctgtgctaattggcggtaatcacctgatcaccgccggagtcccaaggcggagtaaaagaatcgccggtaagaaagtgtgtcgcgtggagtctgggaaagcaggttgcttctctcctaagatctctcacaaggagaaggtccgccgaagcctcaggctgaaattcaacctgggaaagaacggtcgtgaagtcaacggttgttcaggagtcaaccggtatgagtccgtcggctggaggttggccaatcaacagagtctgaaaaatagaattgaatccgtaaagaccggactcctgttctccccggatgtggatgagaagctgcccaagaagggctcagagaagatctctaagtccgaagagaccctgctcactcctgagagactggttggaactaactaccggatgtcatggacaggcccaaacaattcttcctttcaggaagtcgacgctaacgaggctagcagcatggtcgagaatctggaggtcgagaactcactcgaacctgatatcatggtcgaaaagagtcccgctactagttgcgaattgactccgtcaaatctcaacaacaagcacaactctaacattacctcaagtcccttgtcaggcgatgagaacaacatgaccaaggagaccctggttaaagttcagaaggcgttttcagagtccggctccaacttacacgctctcatgaatcaaagacagagttctgtaacaaacgtgggaaaagtcaagttaacagagccttcatatctggaggattcacctgaggaaaaccttttcgaaacaaatgatttgactatcgtggagtctaaggagaaatatgagcaccatactggcaaaggcgagaaatgcttctcagagcgagattttagtccacttcagacacagacattcaacagggaaacgacaatcaagtgttacagcacacaaatgaaaatggagcacgaaaaggatatacatagcaacatgcctaaagactatttgagcaaacaggagttctcctctgatgaagaaatcaaaaaacagcagtctccgaaggataaactcaataataagttaaaggaaaacgagaacatgatggagggaaacctcccaaaatgcgccgctcactcaaaggatgaagccaggtcctccttctcacagcagtcaacctgcgtcgtgactaacctgagtaagccgcgaccaatgcgcatcgccaagcagcagtctttagagacgtgtgaaaaaactgtgtccgaatctagccagatgacagaacatcgcaaagtgagcgatcacatccaatggttcaacaagctgtctttgaatgaacccaataggattaaagttaagagtcctctcaaatttcagcggactccagtgaggcagtctgtgcggagaatcaatagcctcctggaatatagcagacagccaacagggcataaacttgctagcctcggcgacaccgcaagcccacttgtcaaaagtgtgtcatgtgatggggcactcagcagctgtatcgagtcagccagcaaggatagctctgtcagctgcatcaaaagtggaccgaaggagcaaaaatccatgtcttgcgaagagtccaatatcggggcaatctcaaagtcctcaatggaactgccatccaaatcctttttgaagatgcgcaagcacccagatagtgtgaatgcttcacttaggtcgacaaccgtgtacaagcagaagattcttagcgatggtcaggtgaaagttcctcttgacgatttgacaaatcatgatattgtgaaaccagttgtaaataacaacatgggcatatcctccggaataaataatagggtgctaaggcgcccatcagagcggggaagggcctggtacaaaggctcacccaaacatcccataggtaaaacccaactcctccccacgtccaaacccgtggatctgtag

SEQ ID NO: 182182 - DNA, 5898 bp, Artificial Sequence
  derived and/or modified sequence
gaaactgcgggtgtgacccccccgtggtggctctgggtgtctgcggaggagctgggggcggaagcatgaggctaacggcttggcttcagtgaacgcaccgggatgtgcaggccgggaggtagaggcaggctgatgggggagggaacgagcagcctgtgagacggggtgacggcggctaccagcccgggcgggcaccgggactggaagagttgcctgagcagccggctggtccggcggccaggctagggcgggggcgagcgcccagttgagcctgctggggctggaggagcgagaagggttttcttcacatttcagagcgaaccagacggggacagtaaggtttggaggaagggggatcgttggaagtagcaagaagtggagagaatctggcaatagacgagaaaccgaaagaatcagaaagaagtctatgtgagtagctgaaagcattgggtgaccagaaagaaggtcggtgtaagtgaaggaagagtgaggtgtggctggatcaaagggctaagagaagcgggtctgtgtaagtggatgtgagtgaggatcaaggaaaagccgtggaagtggccgggggtcggggccgcagaagtgccagacggggccggaaagcagccgagcggagttcaaatttgagagcgtttggaaattggaagacttggtggcgaacgagggtcaggacctgcatcctgcctcagagagttatcgacgtatccggaatgtgggatcagaggctggtgaggttggccctgttgcagcatctgcgggccttctatggtattaaggtgaagggtgtccgtgggcagtgcgatcgcaggagacatgaaacagcagccacggaaatagggggtaaaatatttggagtaccttttaatgcactgccccattctgctgtaccagaatatggacacattccaagctttcttgtcgatgcttgcacatctttagaagaccatattcataccgaagggctttttcggaaatcaggatctgtgattcgcctaaaagcactaaagaataaagtggatcatggtgaaggttgcctatcttctgcacctccttgtgatattgcgggacttcttaagcagttttttagggaactgccagagcccattctcccagctgatttgcatgaagcacttttgaaagctcaacagttaggcacagaggaaaagaataaagctacactgttgctctcctgtcttctggctgaccacacagttcatgtattaagatacttctttaactttctcaggaatgtttctcttagatccagtgagaataagatggacagcagcaatcttgcagtaatatttgcaccgaatcttcttcagacaagtgaaggacatgaaaagatgtcttctaacacagaaaagaagctacgattacaggctgcagtagtacagactcttatcgattatgcatcagatattgggcgtgtaccagattttatcctggaaaagataccagccatgttgggtattgatggtctctgtgctactccatcactggaaggctttgaagaaggtgaatatgaaactcctggtgaatataagagaaagagaagacaaagtgtaggagattttgttagtggagcactaaataaatttaaacctaacagaacaccttctattacacctcaagaagaaagaattgcccagctatctgaatcaccagtgattcttacaccaaatgctaagcgtacattgccagtagattcttctcatggtttctcaagtaagaaaaggaagtccatcaagcacaattttaactttgagctgttgccaagtaatctcttcaatagcagttctacaccggtatcagttcacatcgatacaagctcagaagggtcatctcagagttcactctctcctgtactcattggtggaaaccatttgatcactgcaggtgtgccaaggcgaagtaaaagaattgcaggcaaaaaagtttgcagagtggaatcaggaaaagcaggctgcttttctcctaaaatcagccataaagaaaaggttcgaagatctctgcgtttgaaattcaatctagggaaaaatggcagagaagtaaatggatgttctggtgtcaatagatatgaaagtgttggttggcgacttgcaaatcaacaaagtttaaaaaatcgaattgaatctgtaaaaacaggtttgctttttagcccagatgttgatgaaaagttaccaaagaaaggttcagaaaagatcagtaagtctgaggaaaccttactaactccagagcgactagttggaacaaattaccggatgtcttggacaggacctaataattcaagttttcaagaagtagatgcaaatgaagcttcttcaatggtggaaaatcttgaggtagaaaactctttggagcctgatattatggtagaaaagtcacctgctacttcatgtgaactcaccccttccaatttaaacaataagcataatagcaacataacaagtagccctcttagcggggatgaaaataacatgaccaaagagactttggtgaaagttcaaaaagcgttttctgaatctggaagtaatcttcacgcattgatgaatcagaggcagtcatcagtaactaatgtggggaaagtaaaattaactgaaccatcttatttagaagatagcccagaggaaaatctatttgaaactaatgatttgactatagtagaatcaaaggagaaatatgaacaccacactggtaaaggtgaaaaatgtttttcagagagggacttttcaccccttcaaactcaaacatttaatagagaaacaactataaaatgttattcaactcagatgaagatggaacatgaaaaagacattcattcaaatatgccaaaagattatttaagcaagcaagaattctccagtgatgaagaaataaagaaacagcagtccccaaaggataaactaaataataaattaaaagagaatgagaatatgatggaaggtaacttaccgaagtgtgcagcacatagcaaggacgaggctagatcctctttctcacagcagagtacatgtgttgtaacaaacttgtcaaaacctaggcctatgagaattgctaaacagcagtcattggaaacatgtgagaaaacagtttctgaaagttcacaaatgacagaacatagaaaggtttctgatcacatacagtggtttaacaagctttctttaaatgaaccaaatagaataaaagtcaagtcacctcttaagtttcagcgtactcctgttcgtcagtccgtcagaagaattaattctttgttggagtatagcagacaacctacagggcataagttggcgagtcttggtgatacagcttctcctttggtcaaatcagtgagctgtgacggtgctctttcctcttgtatagaaagtgcatcaaaagattcctctgtttcatgtatcaaatcaggtcctaaagaacagaagtccatgtcatgtgaagagtcaaatattggtgcaatttcaaagtcaagcatggagttaccctcgaaatctttcttaaagatgaggaagcacccagattcagtgaatgcttctcttaggtctactacagtttataaacagaagatcttatctgatggccaagttaaggttcccttggatgatctgactaatcatgatatagtaaaaccagttgtaaataacaacatgggcatttcttctgggataaataacagggtccttaggagaccatcagaaagaggaagggcctggtacaaaggttctccaaaacatcctatcggaaaaactcaattactaccaacaagtaaacctgtagatttgtaattggtaaatgttatacttgtcattaatgtaaataaagtgagtaattggtatgacttgcaggatgatgtacatgttagtttgtagctcaggatgattgttaagcaatagatttgctctattgaaaatgtttcatttttttcactgtacaagcaacttagatttttatttgtacaaattacttctttgtttttcttaatgatggcaatttttaaactttaattttattgtgatctcttaaagcagaggttagactttacctttctgactctgtcgtccaggctggagtgcagtggcgcaatctcactgcaagctccacttcctgggttcatgccattttcctgcctcagcctcccgagtagctgggactacaggtgcccgccaccacgcccagctaattttttgtatttttagtagagacggtttcaccgtgttagccaggatggtctcgatctcctgacgttgtgatccgcccgcctcagcctcccaaagtgctgggattacaggcatgagccaccacgcccggctagactttacctttctaaagaaattgtttactggatttataagaagttaatttttgaaaatgacatatttttgtgtgatagaaagaatggagcaagttgtgcctatttcctccaagtcagataaggtttctaaaataaataaatttctagcatataaagggtagagataaactctgcaaatcttatgtctggaattatattaatgtttattgtccttgccaaaattcctagaaattaatttccttcaatagcatcctaaaactctatttttatttggggcagagtaatttcatttatagtgccagtaggtgtaccttgtgttcactcgaactaagaacaatggttaaggcagaataatgactaaaatatgttcatatattatgatgtggaaataattgataacttttaagccatactatgtttttaaagataatttgcacaaacacgtttgtgtctgttctgtccaatatagatttggcaattatttaaagagggataatcttgaaaaaaattaaccaaggtgatttcttatatgtagatgctcgattttggaatttgaaatagtagatgcacctctttaccttttttacttggataaaaacctatgatgattttgtcctgtgtgtaaatgttatttatttagcatagacattaaagataactctctggaaaatgacttgactaaggctctcatgaaattcaaagtgccatttagaacatgcaccaaattgtcaagtaaatctgtctaaatttatattttaaattattacaaattacacatctttgaggaaagagtattatgaacaatagaacatattctctaggttgtagaggaaggaataagcagacagaatcaaccactaaaggtagtttttcagattggttgttagaatgtcatgtttagatgttggagcagattagagcagcattcatgccactcggagcaaccagacttacagcataagtatgtacgaggaatttcaaatcatcagatgtttgcttggctaggttctactttgtttatttgatatcaaataggtttgtagatgtttatggcatttctaattgtaagtagagacaaaatattcatatagtcagatatatgttgtctgctttaaacaatttttaaattttaaaaatgcattaacgtctttttatatccatcaagggaaggatgaaatgttgaatttgaagactaattcagtaagaagtcctaggggtttaactgtacatactacctgaactggcttttctgagagatgaatcaataatgaaacatgtctgttttaaaaactaccacatgtgactcctatttttgttagctgaaagctgctatacggagtattacaggaatgtgaaggtgactagcttgaaggtagggtaactagagagccagaaaagttttgttttaaacttgatttaatgcgtttttattttttcttatacaaaatagagataatgttgctaacttcatggaatatttgaggaaatgatatgaaagtgtctggacgtgcagtaacctcatgggttcttctcactgtcttataaatgtaaataaagatctaatattaatttggtta

SEQ ID NO: 182183 - DNA, 3152 bp, Artificial Sequence
  derived and/or modified sequence
ggcttcagtgaacgcaccgggatgtgcaggccgggagagcgaaccagacggggacagtaaggtttggaggaagggggatcgttggaagtagcaagaagtggagagaatctggcaatagacgagaaaccgaaagaatcagaaagaagtctatggtaaaatatttggagtaccttttaatgcactgccccattctgctgtaccagaatatggacacattccaagctttcttgtcgatgcttgcacatctttagaagaccatattcataccgaagggctttttcggaaatcaggatctgtgattcgcctaaaagcactaaagaataaagtggatcatggtgaaggttgcctatcttctgcacctccttgtgatattgcgggacttcttaagcagttttttagggaactgccagagcccattctcccagctgatttgcatgaagcacttttgaaagctcaacagttaggcacagaggaaaagaataaagctacactgttgctctcctgtcttctggctgaccacacagttcatgtattaagatacttctttaactttctcaggaatgtttctcttagatccagtgagaataagatggacagcagcaatcttgcagtaatatttgcaccgaatcttcttcagacaagtgaaggacatgaaaagatgtcttctaacacagaaaagaagctacgattacaggctgcagtagtacagactcttatcgattatgcatcagatattgggcgtgtaccagattttatcctggaaaagataccagccatgttgggtattgatggtctctgtgctactccatcactggaaggctttgaagaaggtgaatatgaaactcctggtgaatataagagaaagagaagacaaagtgtaggagattttgttagtggagcactaaataaatttaaacctaacagaacaccttctattacacctcaagaagaaagaattgcccagctatctgaatcaccagtgattcttacaccaaatgctaagcgtacattgccagtagattcttctcatggtttctcaagtaagaaaaggaagtccatcaagcacaattttaactttgagctgttgccaagtaatctcttcaatagcagttctacaccggtatcagttcacatcgatacaagctcagaagggtcatctcagagttcactctctcctgtactcattggtggaaaccatttgatcactgcaggtgtgccaaggcgaagtaaaagaattgcaggcaaaaaagtttgcagagtggaatcaggaaaagcaggctgcttttctcctaaaatcagccataaagaaaaggttcgaagatctctgcgtttgaaattcaatctagggaaaaatggcagagaagtaaatggatgttctggtgtcaatagatatgaaagtgttggttggcgacttgcaaatcaacaaagtttaaaaaatcgaattgaatctgtaaaaacaggtttgctttttagcccagatgttgatgaaaagttaccaaagaaaggttcagaaaagatcagtaagtctgaggaaaccttactaactccagagcgactagttggaacaaattaccggatgtcttggacaggacctaataattcaagttttcaagaagtagatgcaaatgaagcttcttcaatggtggaaaatcttgaggtagaaaactctttggagcctgatattatggtagaaaagtcacctgctacttcatgtgaactcaccccttccaatttaaacaataagcataatagcaacataacaagtagccctcttagcggggatgaaaataacatgaccaaagagactttggtgaaagttcaaaaagcgttttctgaatctggaagtaatcttcacgcattgatgaatcagaggcagtcatcagtaactaatgtggggaaagtaaaattaactgaaccatcttatttagaagatagcccagaggaaaatctatttgaaactaatgatttgactatagtagaatcaaaggagaaatatgaacaccacactggtaaaggtgaaaaatgtttttcagagagggacttttcaccccttcaaactcaaacatttaatagagaaacaactataaaatgttattcaactcagatgaagatggaacatgaaaaagacattcattcaaatatgccaaaagattatttaagcaagcaagaattctccagtgatgaagaaataaagaaacagcagtccccaaaggataaactaaataataaattaaaagagaatgagaatatgatggaaggtaacttaccgaagtgtgcagcacatagcaaggacgaggctagatcctctttctcacagcagagtacatgtgttgtaacaaacttgtcaaaacctaggcctatgagaattgctaaacagcagtcattggaaacatgtgagaaaacagtttctgaaagttcacaaatgacagaacatagaaaggtttctgatcacatacagtggtttaacaagctttctttaaatgaaccaaatagaataaaagtcaagtcacctcttaagtttcagcgtactcctgttcgtcagtccgtcagaagaattaattctttgttggagtatagcagacaacctacagggcataagttggcgagtcttggtgatacagcttctcctttggtcaaatcagtgagctgtgacggtgctctttcctcttgtatagaaagtgcatcaaaagattcctctgtttcatgtatcaaatcaggtcctaaagaacagaagtccatgtcatgtgaagagtcaaatattggtgcaatttcaaagtcaagcatggagttaccctcgaaatctttcttaaagatgaggaagcacccagattcagtgaatgcttctcttaggtctactacagtttataaacagaagatcttatctgatggccaagttaaggttcccttggatgatctgactaatcatgatatagtaaaaccagttgtaaataacaacatgggcatttcttctgggataaataacagggtccttaggagaccatcagaaagaggaagggcctggtacaaaggttctccaaaacatcctatcggaaaaactcaattactaccaacaagtaaacctgtagatttgtaattggtaaatgttatacttgtcattaatgtaaataaagtgagtaattggtatgacttgc

SEQ ID NO: 182184 - DNA, 3072 bp, Artificial Sequence
  derived and/or modified sequence
atgtgggaccagagactggtgagactggccctgctgcagcacctgagagccttctacggcatcaaggtgaagggcgtgagaggccagtgcgacagaagaagacacgagaccgccgccaccgagatcggcggcaagatcttcggcgtgcccttcaacgccctgccccacagcgccgtgcccgagtacggccacatccccagcttcctggtggacgcctgcaccagcctggaggaccacatccacaccgagggcctgttcagaaagagcggcagcgtgatcagactgaaggccctgaagaacaaggtggaccacggcgagggctgcctgagcagcgcccccccctgcgacatcgccggcctgctgaagcagttcttcagagagctgcccgagcccatcctgcccgccgacctgcacgaggccctgctgaaggcccagcagctgggcaccgaggagaagaacaaggccaccctgctgctgagctgcctgctggccgaccacaccgtgcacgtgctgagatacttcttcaacttcctgagaaacgtgagcctgagaagcagcgagaacaagatggacagcagcaacctggccgtgatcttcgcccccaacctgctgcagaccagcgagggccacgagaagatgagcagcaacaccgagaagaagctgagactgcaggccgccgtggtgcagaccctgatcgactacgccagcgacatcggcagagtgcccgacttcatcctggagaagatccccgccatgctgggcatcgacggcctgtgcgccacccccagcctggagggcttcgaggagggcgagtacgagacccccggcgagtacaagagaaagagaagacagagcgtgggcgacttcgtgagcggcgccctgaacaagttcaagcccaacagaacccccagcatcaccccccaggaggagagaatcgcccagctgagcgagagccccgtgatcctgacccccaacgccaagagaaccctgcccgtggacagcagccacggcttcagcagcaagaagagaaagagcatcaagcacaacttcaacttcgagctgctgcccagcaacctgttcaacagcagcagcacccccgtgagcgtgcacatcgacaccagcagcgagggcagcagccagagcagcctgagccccgtgctgatcggcggcaaccacctgatcaccgccggcgtgcccagaagaagcaagagaatcgccggcaagaaggtgtgcagagtggagagcggcaaggccggctgcttcagccccaagatcagccacaaggagaaggtgagaagaagcctgagactgaagttcaacctgggcaagaacggcagagaggtgaacggctgcagcggcgtgaacagatacgagagcgtgggctggagactggccaaccagcagagcctgaagaacagaatcgagagcgtgaagaccggcctgctgttcagccccgacgtggacgagaagctgcccaagaagggcagcgagaagatcagcaagagcgaggagaccctgctgacccccgagagactggtgggcaccaactacagaatgagctggaccggccccaacaacagcagcttccaggaggtggacgccaacgaggccagcagcatggtggagaacctggaggtggagaacagcctggagcccgacatcatggtggagaagagccccgccaccagctgcgagctgacccccagcaacctgaacaacaagcacaacagcaacatcaccagcagccccctgagcggcgacgagaacaacatgaccaaggagaccctggtgaaggtgcagaaggccttcagcgagagcggcagcaacctgcacgccctgatgaaccagagacagagcagcgtgaccaacgtgggcaaggtgaagctgaccgagcccagctacctggaggacagccccgaggagaacctgttcgagaccaacgacctgaccatcgtggagagcaaggagaagtacgagcaccacaccggcaagggcgagaagtgcttcagcgagagagacttcagccccctgcagacccagaccttcaacagagagaccaccatcaagtgctacagcacccagatgaagatggagcacgagaaggacatccacagcaacatgcccaaggactacctgagcaagcaggagttcagcagcgacgaggagatcaagaagcagcagagccccaaggacaagctgaacaacaagctgaaggagaacgagaacatgatggagggcaacctgcccaagtgcgccgcccacagcaaggacgaggccagaagcagcttcagccagcagagcacctgcgtggtgaccaacctgagcaagcccagacccatgagaatcgccaagcagcagagcctggagacctgcgagaagaccgtgagcgagagcagccagatgaccgagcacagaaaggtgagcgaccacatccagtggttcaacaagctgagcctgaacgagcccaacagaatcaaggtgaagagccccctgaagttccagagaacccccgtgagacagagcgtgagaagaatcaacagcctgctggagtacagcagacagcccaccggccacaagctggccagcctgggcgacaccgccagccccctggtgaagagcgtgagctgcgacggcgccctgagcagctgcatcgagagcgccagcaaggacagcagcgtgagctgcatcaagagcggccccaaggagcagaagagcatgagctgcgaggagagcaacatcggcgccatcagcaagagcagcatggagctgcccagcaagagcttcctgaagatgagaaagcaccccgacagcgtgaacgccagcctgagaagcaccaccgtgtacaagcagaagatcctgagcgacggccaggtgaaggtgcccctggacgacctgaccaaccacgacatcgtgaagcccgtggtgaacaacaacatgggcatcagcagcggcatcaacaacagagtgctgagaagacccagcgagagaggcagagcctggtacaagggcagccccaagcaccccatcggcaagacccagctgctgcccaccagcaagcccgtggacctgtag

SEQ ID NO: 182185 - protein, 1522 aa, Artificial Sequence
  derived and/or modified sequence
MSVRLPQSIDRLSSLSSLGDSAPERKSPSHHRQPSDASETTGLVQRCVIIQKDQHGFGFTVSGDRIVLVQSVRPGGAAMKAGVKEGDRIIKVNGTMVTNSSHLEVVKLIKSGAYVALTLLGSSPSSMGISGLQQDPSPAGAPRITSVIPSPPPPPPLPPPQRITGPKPLQDPEVQKHATQILRNMLRQEEKELQDILPLYGDTSQRPSEGRLSLDSQEGDSGLDSGTERFPSLSESLMNRNSVLSDPGLDSPRTSPVIMARVAQHHRRQGSDAAVPSTGDQGVDQSPKPLIIGPEEDYDPGYFNNESDIIFQDLEKLKSRPAHLGVFLRYIFSQADPSPLLFYLCAEVYQQASPKDSRSLGKDIWNIFLEKNAPLRVKIPEMLQAEIDSRLRNSEDARGVLCEAQEAAMPEIQEQIHDYRTKRTLGLGSLYGENDLLDLDGDPLRERQVAEKQLAALGDILSKYEEDRSAPMDFALNTYMSHAGIRLREARPSNTAEKAQSAPDKDKWLPFFPKTKKSSNSKKEKDALEDKKRNPILKYIGKPKSSSQSTFHIPLSPVEVKPGNVRNIIQHFENNQQYDAPEPGTQRLSTGSFPEDLLESDSSRSEIRLGRSESLKGREEMKRSRKAENVPRSRSDVDMDAAAEATRLHQSASSSTSSLSTRSLENPTPPFTPKMGRRSIESPSLGFCTDTLLPHLLEDDLGQLSDLEPEPDAQNWQHTVGKDVVAGLTQREIDRQEVINELFVTEASHLRTLRVLDLIFYQRMKKENLMPREELARLFPNLPELIEIHNSWCEAMKKLREEGPIIKEISDLMLARFDGPAREELQQVAAQFCSYQSIALELIKTKQRKESRFQLFMQEAESHPQCRRLQLRDLIISEMQRLTKYPLLLESIIKHTEGGTSEHEKLCRARDQCREILKYVNEAVKQTENRHRLEGYQKRLDATALERASNPLAAEFKSLDLTTRKMIHEGPLTWRISKDKTLDLHVLLLEDLLVLLQKQDEKLLLKCHSKTAVGSSDSKQTFSPVLKLNAVLIRSVATDKRAFFIICTSKLGPPQIYELVALTSSDKNTWMELLEEAVRNATRHPGAAPMPVHPPPPGPREPAQQGPTPSRVELDDSDVFHGEPEPEELPGGTGSQQRVQGKHQVLLEDPEQEGSAEEEELGVLPCPSTSLDGENRGIRTRNPIHLAFPGPLFMEGLADSALEDVENLRHLILWSLLPGHTMETQAAQEPEDDLTPTPSVISVTSHPWDPGSPGQAPPGGEGDNTQLAGLEGERPEQEDMGLCSLEHLPPRTRNSGIWESPELDRNLAEDASSTEAAGGYKVVRKAEVAGSKVVPALPESGQSEPGPPEVEGGTKATGNCFYVSMPSGPPDSSTDHSEAPMSPPQPDSLPAGQTEPQPQLQGGNDDPRRPSRSPPSLALRDVGMIFHTIEQLTLKLNRLKDMELAHRELLKSLGGESSGGTTPVGSFHTEAARWTDGSLSPPAKEPLASDSRNSHELGPCPEDGSDAPLEDSTADAAASPGP

SEQ ID NO: 182186 - DNA, 4569 bp, Artificial Sequence
  derived and/or modified sequence
atgagcgtgagactgccccagagcatcgacagactgagcagcctgagcagcctgggcgacagcgcccccgagagaaagagccccagccaccacagacagcccagcgacgccagcgagaccaccggcctggtgcagagatgcgtgatcatccagaaggaccagcacggcttcggcttcaccgtgagcggcgacagaatcgtgctggtgcagagcgtgagacccggcggcgccgccatgaaggccggcgtgaaggagggcgacagaatcatcaaggtgaacggcaccatggtgaccaacagcagccacctggaggtggtgaagctgatcaagagcggcgcctacgtggccctgaccctgctgggcagcagccccagcagcatgggcatcagcggcctgcagcaggaccccagccccgccggcgcccccagaatcaccagcgtgatccccagcccccccccccccccccccctgccccccccccagagaatcaccggccccaagcccctgcaggaccccgaggtgcagaagcacgccacccagatcctgagaaacatgctgagacaggaggagaaggagctgcaggacatcctgcccctgtacggcgacaccagccagagacccagcgagggcagactgagcctggacagccaggagggcgacagcggcctggacagcggcaccgagagattccccagcctgagcgagagcctgatgaacagaaacagcgtgctgagcgaccccggcctggacagccccagaaccagccccgtgatcatggccagagtggcccagcaccacagaagacagggcagcgacgccgccgtgcccagcaccggcgaccagggcgtggaccagagccccaagcccctgatcatcggccccgaggaggactacgaccccggctacttcaacaacgagagcgacatcatcttccaggacctggagaagctgaagagcagacccgcccacctgggcgtgttcctgagatacatcttcagccaggccgaccccagccccctgctgttctacctgtgcgccgaggtgtaccagcaggccagccccaaggacagcagaagcctgggcaaggacatctggaacatcttcctggagaagaacgcccccctgagagtgaagatccccgagatgctgcaggccgagatcgacagcagactgagaaacagcgaggacgccagaggcgtgctgtgcgaggcccaggaggccgccatgcccgagatccaggagcagatccacgactacagaaccaagagaaccctgggcctgggcagcctgtacggcgagaacgacctgctggacctggacggcgaccccctgagagagagacaggtggccgagaagcagctggccgccctgggcgacatcctgagcaagtacgaggaggacagaagcgcccccatggacttcgccctgaacacctacatgagccacgccggcatcagactgagagaggccagacccagcaacaccgccgagaaggcccagagcgcccccgacaaggacaagtggctgcccttcttccccaagaccaagaagagcagcaacagcaagaaggagaaggacgccctggaggacaagaagagaaaccccatcctgaagtacatcggcaagcccaagagcagcagccagagcaccttccacatccccctgagccccgtggaggtgaagcccggcaacgtgagaaacatcatccagcacttcgagaacaaccagcagtacgacgcccccgagcccggcacccagagactgagcaccggcagcttccccgaggacctgctggagagcgacagcagcagaagcgagatcagactgggcagaagcgagagcctgaagggcagagaggagatgaagagaagcagaaaggccgagaacgtgcccagaagcagaagcgacgtggacatggacgccgccgccgaggccaccagactgcaccagagcgccagcagcagcaccagcagcctgagcaccagaagcctggagaaccccaccccccccttcacccccaagatgggcagaagaagcatcgagagccccagcctgggcttctgcaccgacaccctgctgccccacctgctggaggacgacctgggccagctgagcgacctggagcccgagcccgacgcccagaactggcagcacaccgtgggcaaggacgtggtggccggcctgacccagagagagatcgacagacaggaggtgatcaacgagctgttcgtgaccgaggccagccacctgagaaccctgagagtgctggacctgatcttctaccagagaatgaagaaggagaacctgatgcccagagaggagctggccagactgttccccaacctgcccgagctgatcgagatccacaacagctggtgcgaggccatgaagaagctgagagaggagggccccatcatcaaggagatcagcgacctgatgctggccagattcgacggccccgccagagaggagctgcagcaggtggccgcccagttctgcagctaccagagcatcgccctggagctgatcaagaccaagcagagaaaggagagcagattccagctgttcatgcaggaggccgagagccacccccagtgcagaagactgcagctgagagacctgatcatcagcgagatgcagagactgaccaagtaccccctgctgctggagagcatcatcaagcacaccgagggcggcaccagcgagcacgagaagctgtgcagagccagagaccagtgcagagagatcctgaagtacgtgaacgaggccgtgaagcagaccgagaacagacacagactggagggctaccagaagagactggacgccaccgccctggagagagccagcaaccccctggccgccgagttcaagagcctggacctgaccaccagaaagatgatccacgagggccccctgacctggagaatcagcaaggacaagaccctggacctgcacgtgctgctgctggaggacctgctggtgctgctgcagaagcaggacgagaagctgctgctgaagtgccacagcaagaccgccgtgggcagcagcgacagcaagcagaccttcagccccgtgctgaagctgaacgccgtgctgatcagaagcgtggccaccgacaagagagccttcttcatcatctgcaccagcaagctgggccccccccagatctacgagctggtggccctgaccagcagcgacaagaacacctggatggagctgctggaggaggccgtgagaaacgccaccagacaccccggcgccgcccccatgcccgtgcacccccccccccccggccccagagagcccgcccagcagggccccacccccagcagagtggagctggacgacagcgacgtgttccacggcgagcccgagcccgaggagctgcccggcggcaccggcagccagcagagagtgcagggcaagcaccaggtgctgctggaggaccccgagcaggagggcagcgccgaggaggaggagctgggcgtgctgccctgccccagcaccagcctggacggcgagaacagaggcatcagaaccagaaaccccatccacctggccttccccggccccctgttcatggagggcctggccgacagcgccctggaggacgtggagaacctgagacacctgatcctgtggagcctgctgcccggccacaccatggagacccaggccgcccaggagcccgaggacgacctgacccccacccccagcgtgatcagcgtgaccagccacccctgggaccccggcagccccggccaggccccccccggcggcgagggcgacaacacccagctggccggcctggagggcgagagacccgagcaggaggacatgggcctgtgcagcctggagcacctgccccccagaaccagaaacagcggcatctgggagagccccgagctggacagaaacctggccgaggacgccagcagcaccgaggccgccggcggctacaaggtggtgagaaaggccgaggtggccggcagcaaggtggtgcccgccctgcccgagagcggccagagcgagcccggcccccccgaggtggagggcggcaccaaggccaccggcaactgcttctacgtgagcatgcccagcggcccccccgacagcagcaccgaccacagcgaggcccccatgagccccccccagcccgacagcctgcccgccggccagaccgagccccagccccagctgcagggcggcaacgacgaccccagaagacccagcagaagcccccccagcctggccctgagagacgtgggcatgatcttccacaccatcgagcagctgaccctgaagctgaacagactgaaggacatggagctggcccacagagagctgctgaagagcctgggcggcgagagcagcggcggcaccacccccgtgggcagcttccacaccgaggccgccagatggaccgacggcagcctgagcccccccgccaaggagcccctggccagcgacagcagaaacagccacgagctgggcccctgccccgaggacggcagcgacgcccccctggaggacagcaccgccgacgccgccgccagccccggcccctag

SEQ ID NO: 182187 - DNA, 4569 bp, Artificial Sequence
  derived and/or modified sequence
atgagcgttcgactgccacagagcatcgaccgcctcagcagcctgagcagtctaggggattccgcacctgagagaaagagcccctctcaccataggcagccgagcgatgccagcgaaactaccggcctggtgcaacggtgtgtgattatccaaaaggatcagcatggattcggttttaccgtgagcggcgatcgtatcgtgctagtgcagtccgtcagacctgggggggctgctatgaaagccggcgtgaaagagggcgaccgcatcattaaggttaacggaacaatggtaaccaattcttcccatctggaagtagttaaactgatcaagtcaggcgcgtacgtggctcttactctgctgggctccagtccgagttccatggggatctctggcctacagcaggacccctctcccgccggcgcacccaggatcacatctgtgattccttcaccacctccaccaccaccactaccgcctccccagaggatcaccgggccaaagcccctgcaggatccggaggtccagaagcatgcgacccagatcctgcggaacatgttacgtcaggaggaaaaggaactacaggatatcttgcccctgtatggcgacacatcgcagagaccatccgagggccgcttgagtctggatagtcaagagggagactctgggctggattccggtacagagaggtttccatcactgtccgagtcacttatgaaccggaactctgttctgagcgacccaggactagactccccccgcaccagccccgtcataatggcccgggttgcccagcaccacaggcggcaaggaagtgacgctgcggttccttccaccggcgatcagggcgtcgatcagagccccaaaccccttattatcggtccagaggaggattatgaccctgggtatttcaataacgaatccgacattattttccaggatcttgagaaacttaagtccaggcctgcccatttaggggtgttcctgcgttacattttctctcaggcggatccctcaccccttctcttttatctgtgcgcagaagtgtatcagcaggcctctcccaaggattcacgaagcctcggaaaggacatctggaatatatttctggagaaaaatgccccactcagggtaaagatccctgaaatgttacaggctgagatcgacagccggctgcgtaactcggaggatgccagaggggtgctatgtgaggcccaggaggcagctatgcccgaaattcaggaacagattcacgattataggaccaaacgtacgctcggactgggctccctgtacggagaaaatgacttactcgacctcgacggcgatccccttcgtgagcgccaagtcgcagagaagcagctggctgccttgggagacatcctgtcaaagtatgaagaagatcggagcgcccctatggatttcgctctcaacacatacatgtcacacgcgggaatcagattgagagaagcccgccccagtaatactgctgaaaaagctcaatctgcacctgataaggacaaatggctgcctttcttcccgaaaactaaaaagtctagcaatagtaaaaaggaaaaagacgcactggaggataaaaagcgaaatccgatcttgaaatacattggaaagccgaagtcgtcgtctcagagcactttccacatacccctctcacctgtcgaagtcaagcccggcaacgtgagaaacatcattcagcatttcgagaataatcagcagtatgatgcacccgagcccggcactcagcggttgtcaacaggtagctttcctgaagacttattggaatccgattcaagtcgatcagagattcggctggggcgctcggaatcgctgaaaggacgggaggagatgaagcgctctcgtaaagctgagaacgtgcctcgctcacgatctgatgtggacatggatgccgccgccgaggcaacgcggctgcatcaatcagcaagcagtagtactagttccttatctaccagatccctcgagaatccaactccgccttttaccccaaaaatgggaaggagatcaatcgagagtccatccctgggattctgtacagacaccctgctgcctcatctgttagaggatgacctgggacagttgagcgatttggaaccggagccagatgctcaaaattggcaacacacggtgggcaaagatgtagtagcggggcttacccaaagagaaatcgaccgccaagaggtgatcaacgaactattcgtgactgaagcctctcatttaaggaccttgagggtccttgatttaatcttctaccaacgtatgaaaaaagaaaatctcatgccccgagaagagcttgcgaggctatttccgaacctgccagagctaattgaaatacataacagttggtgcgaagccatgaaaaaattacgggaagaggggcccattattaaggaaatctcagatctgatgctcgcccgcttcgacggtcctgcaagagaggaacttcagcaggtggcggcccaattttgcagctatcagagcattgccctcgaactcataaaaaccaagcagagaaaggagagcagattccagctgtttatgcaggaagcagagtctcacccacaatgtcggcgactgcaactccgggatctgatcatcagcgagatgcagagactaaccaaatacccccttctgctcgagtcaattattaagcataccgaagggggcacgtccgaacacgagaagctgtgccgcgcacgcgaccaatgcagagaaatactgaagtacgtcaatgaagctgttaaacaaactgagaacagacatagacttgaaggctaccagaaacgccttgatgccactgctttagagcgcgcctccaatccattggccgccgagttcaagtctctggatctcaccactaggaaaatgatacatgagggtccattgacttggcgcattagcaaagacaagacacttgacctccatgtgctgttgttggaggacctgttagtgctattacaaaagcaggatgaaaagctgctcctgaaatgccactccaaaaccgccgtgggctcttctgacagtaagcaaaccttttctcccgttctgaagctgaacgcagtgctgatcagatctgtggccaccgacaagcgtgcattttttattatctgtaccagtaaactgggtccaccacagatctatgaattggtggcactgaccagttctgataaaaatacatggatggaattgctagaagaagccgtacggaacgcaaccaggcatccaggcgcagcgcccatgcccgtccacccacccccaccagggccaagagagccagcgcagcagggacccaccccctctagggtggagttggatgactccgatgtcttccacggcgagcccgagcccgaagaactacccgggggcaccggctcccagcagcgtgtgcaagggaagcatcaggtgttgcttgaggatcctgagcaagagggatccgccgaagaggaagaactgggcgttctgccctgtccgtctacgtctctagacggggagaacagagggattagaacaaggaaccccattcacctggccttccctgggcccctcttcatggaaggactcgcggattccgctctggaggatgtcgagaacttacgtcacctcattctctggagtcttttaccagggcacaccatggaaacccaggcagcccaggaacctgaggacgacctgacgcctactcccagtgtaatctccgttacatctcatccatgggatcccggcagccctgggcaggcaccccccggaggagagggtgataacactcaactggctggattggaaggggaacgcccagagcaggaagacatgggattatgcagtctggagcatctgccgccccgaacacgcaactccggtatctgggagtcacccgagctggaccggaatctggctgaggacgcctccagtacggaggccgccggtggttacaaggtcgtccgcaaggccgaagtcgctggcagcaaggtagttcctgctcttccggagtccggacagtccgagcctggtcccccagaagtggaggggggtactaaagcaaccgggaactgcttctatgtttcgatgccttccggccccccggatagcagtacagatcactctgaggctcctatgtctcccccccaacctgattcactgccagcgggacagactgagccccagccccagcttcagggtgggaacgacgacccacgaagacctagtcgctcccctccctcgctcgccctgcgtgatgtgggtatgatcttccataccatagaacagttgactttaaaactcaacagacttaaagatatggagctggcccaccgtgaactgcttaagagcttaggcggtgagtcttccggcgggaccacgcccgtaggttcctttcataccgaagccgcccgttggacggacggcagcctatcccccccggctaaagaaccactggcctccgattctaggaattctcatgagctcggcccctgtcccgaagatggctcagacgccccattagaggattccaccgccgatgcggcagcaagtccgggaccatag

SEQ ID NO: 182188 - DNA, 4569 bp, Artificial Sequence
  derived and/or modified sequence
atgtctgtgcggctgccccagagcattgaccggctgagcagcctgagcagcctgggggacagcgcccctgagaggaagagccccagccaccaccggcagcccagtgatgccagcgagaccaccggcctggtgcagagatgtgtgatcatccagaaggaccagcacggcttcggcttcaccgtgtctggggaccgcatcgtgctggtgcagagcgtgcggcctgggggcgccgccatgaaggccggcgtgaaggagggggaccgcatcatcaaggtgaatggcaccatggtgaccaacagcagccacctggaggtggtgaagctgatcaagagcggggcctacgtggccctgaccctgctgggcagcagccccagctccatgggcatcagcggcctgcagcaggaccccagccctgctggggccccccgcatcaccagcgtcatccccagccccccacctcctccacccctgcccccaccccagaggatcaccggccccaagcccctgcaggaccctgaggtgcagaagcacgccacccagatcctgaggaacatgctgcggcaggaggagaaggagctgcaggacatcctgcccctgtatggagacaccagccagaggcccagcgagggccgcctgagcctggacagccaggagggggacagcggcctggacagcggcacagagcgcttccccagcctgtctgagagcctgatgaacagaaacagcgtgctgagtgaccccggcctggacagccccaggaccagccctgtgatcatggcccgggtggcccagcaccaccggcggcagggcagtgatgctgctgtgcccagcactggagaccagggcgtggaccagagccccaagcccctcatcatcggccctgaggaggactatgaccccggctacttcaacaatgaaagtgacatcatcttccaggacctggagaagctgaagagcaggcctgcccacctgggcgtcttcctgcgctacatcttcagccaggccgaccccagccccctgctcttctacctgtgtgccgaggtgtaccagcaggccagccccaaggacagccgcagcctgggcaaggacatctggaacatcttcctggagaagaatgcccccctgcgggtgaagatccctgagatgctgcaggccgagattgacagccggctgaggaacagtgaagatgcccggggcgtgctgtgtgaggcccaggaggccgccatgcctgagatccaggagcagatccatgactaccgcaccaagaggaccctgggcctgggcagcctgtatggagaaaatgacctgctggacctggatggagaccccctgcgggagcggcaggtggccgagaagcagctggccgccctgggggacatcctgagcaaatatgaggaggacagaagtgcccccatggactttgccctgaacacctacatgagccatgctggcatccggctgcgggaggcccggcccagcaacacagctgagaaggcccagagcgccccagacaaggacaagtggctgcccttcttccccaagaccaagaagagcagcaacagcaagaaggagaaggatgccctggaggacaagaagaggaaccccatcctgaagtacatcggcaagcccaagagcagcagccagagcaccttccacatccccctgagccctgtggaggtgaagccaggaaatgtgaggaacatcatccagcactttgagaacaaccagcagtatgatgcccctgagcccggcacccagaggctgagcacaggcagcttccctgaggacctgctggagagtgacagcagccgctctgagatccggctgggccgctctgagagcctgaagggccgggaggagatgaagaggagcaggaaggccgagaatgtgcccaggagcagaagtgatgtggacatggatgctgctgctgaggccacccggctgcaccagagcgccagcagcagcaccagcagcctgagcaccaggagcctggagaaccccaccccacccttcacccccaagatgggcagaagaagcattgagagccccagcctgggcttctgcacagacaccctgctgccccacctgctggaggatgacctgggccagctgagtgacctggagcctgagccagatgcccagaactggcagcacacagtgggcaaggatgtggtggccggcctgacccagcgggagattgaccggcaggaggtgatcaatgagctgtttgtgacagaggccagccacctgcggaccctgcgggtgctggacctgatcttctaccagaggatgaagaaggagaacctgatgccccgggaggagctggcccggctcttccccaacctgcctgagctgattgagatccacaacagctggtgtgaggccatgaagaagctgcgggaggagggccccatcatcaaggagatcagtgacctgatgctggccaggtttgatggccctgcccgggaggagctgcagcaggtggccgcccagttctgcagctaccagagcatcgccctggagctgatcaagaccaagcagaggaaggagagccgcttccagctgttcatgcaggaggccgagagccacccccagtgccggcggctgcagctgcgggacctgatcatcagcgagatgcagaggctgaccaagtaccccctgctgctggagagcatcatcaagcacacagagggcggcaccagcgagcacgagaagctgtgccgggcccgggaccagtgccgggagatcctgaagtatgtgaatgaagctgtgaagcagacagagaacagacaccggctggagggctaccagaagaggctggatgccacagccctggagcgggccagcaaccccctggccgctgagttcaagagcctggacctgaccaccaggaagatgatccacgagggccccctgacctggaggatcagcaaggacaagaccctggacctgcacgtgctgctgctggaggacctgctggtgctgctgcagaagcaggatgagaagctgctgctgaagtgccacagcaagacagctgtgggcagcagtgacagcaagcagaccttcagccctgtgctgaagctgaatgctgtgctgatccgctctgtggccacagacaagagggccttcttcatcatctgcaccagcaagctgggccccccccagatctatgagctggtggccctgaccagcagtgacaagaacacctggatggagctgctggaggaggccgtgagaaatgccaccaggcaccctggagctgcccccatgcctgtgcaccccccacctcctggcccccgggagcccgcccagcagggccccacccccagccgggtggagctggatgacagtgatgtgttccatggagagcctgagcctgaggagctgcccggcggcaccggcagccagcagagggtgcagggcaagcaccaggtgctgctggaggaccctgagcaggagggcagcgctgaggaggaggagctgggcgtgctgccctgccccagcaccagcctggatggagagaacagaggcatccgcaccaggaaccccatccacctggccttccctggccccctcttcatggagggcctggccgacagcgccctggaggatgtggagaacctgcggcacctgatcctgtggagcctgctgcccggccacaccatggagacccaggccgcccaggagccagaagatgacctgacccccaccccatctgtcatctctgtgaccagccacccctgggaccccggcagccctggccaggcccctcctggaggagagggggacaacacccagctggccggcctggagggggagaggcctgagcaggaggacatgggcctgtgcagcctggagcacctgccccccaggaccagaaattctggcatctgggagagccctgagctggacaggaacctggctgaagatgccagcagcacagaggccgccggcggctacaaggtggtgaggaaggccgaggtggccggcagcaaggtggtgcctgccctgcctgagagcggccagagcgagcccggccccccagaggtggagggcggcaccaaggccactggaaactgcttctacgtgtccatgcccagcggccccccagacagcagcacagaccacagcgaggcccccatgagccccccccagcctgacagcctgcctgctggccagacagagccccagccccagctgcagggcggcaatgatgacccccggcggcccagccgcagcccccccagcctggccctgagagatgtgggcatgatcttccacaccatcgagcagctgaccctgaagctgaaccggctgaaggacatggagctggcccaccgggagctgctgaagagcctgggcggggagagcagcggcggcaccacccctgtgggcagcttccacacagaagctgcccgctggacagatggcagcctgagccccccagccaaggagcccctggccagtgacagcaggaacagccatgagctgggcccctgcccagaagatggcagtgatgcccccctggaggacagcacagcagatgctgctgccagccctggcccctag

SEQ ID NO: 182189 - DNA, 4569 bp, Artificial Sequence
  derived and/or modified sequence
atgagcgtgcggctgccccagagcatcgaccggctgagcagcctgagcagcttaggcgattccgctcccgagcgcaaatcgcctagtcatcaccgccagccatccgatgcttccgaaaccaccgggctggtgcaacggtgtgtgattatccagaaggaccagcacgggttcgggttcactgtaagtggggaccggatcgtgttagtacagtctgttaggcccggtggcgcagctatgaaggccggggtcaaggaaggcgacagaataattaaggtgaatgggaccatggtgactaacagcagccatcttgaagtggtgaaactgataaagtctggagcctatgtggccctgaccttattaggtagctctccaagcagcatgggtatatccggactgcagcaggatccttcacctgccggagcgcccagaatcacctccgtgatcccatctccacctccacctccgccattgcctccaccccagcgcattactggtccaaagcccttgcaggaccccgaggttcagaaacacgccacgcagattttacggaacatgctaaggcaagaagagaaggagctccaggatatcctcccactgtacggggatacgagccagcgtccttcagaagggagactttctctagattcgcaggaaggcgactccggtttggatagcggaactgagagattcccgtccctgtccgagtcgcttatgaatcgcaactcggtgctctctgatcctggcctggactcccctcgcaccagccctgtcatcatggccagggttgcccaacatcaccgaagacagggttcagacgccgccgtccctagcaccggggatcaaggggtggaccagtcccctaagcccctgatcatcgggccggaggaagactacgaccccggctacttcaataatgagagcgatatcatctttcaggacctggagaagttaaagtctcggccagctcatcttggggtcttcttgaggtatatcttcagccaggcagatcctagccccctgctgttttatctctgtgcagaggtgtatcagcaggcaagcccaaaagacagcaggtccctggggaaggacatctggaacatcttcctcgagaaaaatgccccactcagggtcaagatcccggagatgctacaggctgaaatcgatagccggctgaggaactcggaagatgctcgcggagttctgtgtgaggcacaggaggcagcgatgcctgagattcaagaacagatccacgactataggaccaagagaactctgggtctcgggagtctttatggcgagaacgatttattagatttggatggagaccctctgagggaacgccaggtggctgaaaagcaactggcagcccttggagacatcctttctaagtacgaggaggatcgctcagcccctatggattttgctttgaatacttatatgagtcacgctggaatcaggctgagagaggcacggccgtcaaacaccgcagagaaggcgcagagcgctccagacaaggataagtggttgccttttttcccgaaaactaagaaatcatctaattcgaaaaaggaaaaagacgccctggaagataagaagcgaaatccaatcctaaagtatattggcaagcctaagtcgtcatcacagagcacttttcatattcctctgtctcccgtcgaagtgaagcccggtaacgtgaggaacattatacagcattttgaaaataatcagcagtatgatgctcccgagccagggactcagagattgtcaaccggctcttttccagaggacctcctggagtctgactcatctagatccgaaattcgcctgggtagatccgagagcctgaaaggtagagaggaaatgaagcggagccgcaaagctgagaatgtcccccggtcacggagtgatgtagatatggacgcagcagcagaggcgacccgtttgcaccaaagcgcatcaagcagcacctctagcctctctactcggtccttggagaaccctacccctcccttcaccccgaagatggggcggcgctctattgagtctccatccctgggtttttgtacagatactctcctaccacacctcttggaggatgacctcggtcagttaagcgacctagaaccagaacccgacgctcagaattggcaacacaccgtggggaaagacgtggttgctggcctgactcagcgcgaaatcgatcgacaggaggttattaatgaactctttgtcactgaggcctcacatcttcggactctgcgtgtgcttgatcttattttttatcaaaggatgaaaaaggagaacctaatgccgcgtgaggagctagcaagactcttccccaacttgcctgaattgatcgagatccataattcgtggtgtgaggccatgaaaaagctacgggaagagggacctatcataaaggagatctctgatttgatgctcgcacgcttcgacgggcccgctagagaagaactgcaacaggttgcggctcagttttgttcttaccagtccatcgcactcgagctgatcaaaacaaagcaaagaaaggaatctagatttcaacttttcatgcaggaggccgaatctcacccccagtgtcgtcggctgcaattacgcgacctcataatcagcgaaatgcaaagattgaccaagtatcctctcctccttgagtctatcatcaagcacaccgagggggggacttccgaacatgagaagctttgcagagccagggaccagtgcagagaaatacttaagtatgtgaatgaggccgtgaagcagaccgagaatcgtcatcgacttgagggttaccagaagcgattggacgccactgccttggaacgcgcgtcaaatcctctggctgcagagtttaagtctctggatttgaccaccagaaagatgatccacgagggcccactgacttggagaatctccaaggacaagaccctggaccttcatgtgctgctcctggaagacctgttagtgttattgcaaaaacaggatgaaaagctgctcctcaagtgtcatagcaaaacggctgtgggatcatccgattccaagcagactttctcccccgtgctgaagctgaacgcggtgctcataagatcagtcgcaacagacaaacgggctttctttatcatttgcaccagtaaactcggacccccgcagatatacgaattggtggccttgacaagtagcgacaagaacacttggatggaactcctggaggaggcagtgcgcaacgcgacgaggcatccgggggcagcaccaatgcctgtgcaccctccgcccccgggcccccgtgagccagcgcagcaaggtcctaccccctctcgggtcgagcttgatgactcagacgtctttcatggcgagcccgagcccgaggaactccccggaggcaccggaagtcagcagagagtccagggcaagcaccaggtcctcctggaggatcccgagcaagaaggctctgctgaggaggaggaactcggcgtgctgccatgcccaagcaccagcctggacggcgagaatcggggcatccgaacccggaacccaatccatctggcttttcctggcccactcttcatggaaggactggccgatagcgcactggaggacgtagaaaatctccggcatctcatcctgtggtcccttcttccagggcatacaatggaaacacaggccgcccaagagccagaggacgaccttacacctactccaagcgtcatcagtgtgacctcccacccctgggatcccggcagccctgggcaggctcccccaggcggcgagggtgataacactcagctggccggtttagagggagagaggccagagcaggaagacatgggcctctgctccctggagcatctccctcctagaacccggaacagcggaatttgggagtccccagaactggaccggaaccttgctgaggacgcttccagcactgaagccgccggcggctataaagtcgtgcgcaaggccgaagtagcaggttctaaagtcgtgcccgcacttcccgagagtggacagtcggagcctggtccccccgaggtcgagggtgggaccaaggcaacgggcaactgtttctacgtcagcatgccatccgggcctccggattcttcaactgatcatagcgaagctccaatgtcccctcctcaaccagattccctgcccgccggccaaacagagccccagccccagctgcagggcggcaatgacgacccacgccgccctagcagaagccctccttctcttgccctgagggacgtggggatgatctttcacactatcgagcagctcactctgaagctcaacagactgaaggacatggagctagcccatcgagagctcctgaaatccttagggggggagagttccggcggcaccacaccggttggaagctttcataccgaggccgcaagatggacagacgggagcctgagccctccggctaaggaaccactggcgtcggacagtcgtaatagccacgaattgggcccatgcccggaagacggctctgatgcccctctggaagactcaacagcagatgccgccgccagtcccggcccctag

SEQ ID NO: 182190 - DNA, 4569 bp, Artificial Sequence
  derived and/or modified sequence
atgagcgtacgactgccgcaaagcatcgatcggctgtcctccctgtcttcattgggagacagtgctccagagcggaaaagcccatcacaccatcggcagcctagtgatgctagtgagactacaggattagtgcagagatgtgtgatcattcagaaggaccagcacgggtttggcttcaccgtgtccggtgatcgcatagtgctcgttcagagtgtacggccagggggagcggcaatgaaagctggtgtgaaagaaggcgatcggatcatcaaggtgaacggcactatggtcaccaatagcagccatctcgaagttgtgaagctaataaaatcgggtgcctacgtggcactgaccctgctggggagcagtccgagcagtatgggaatctccggcctgcagcaggaccctagccccgcaggagccccaaggataacatccgtgatcccgtcgccacctcctccaccaccactgccacctccccagaggatcaccggcccaaagccgctgcaggatcctgaagtccagaaacacgctacacagattttgcggaatatgttaagacaggaggagaaggaactgcaggatattctgcctctctatggggacacatctcagaggccctctgaagggcgtcttagcctggatagccaggaaggtgattcagggcttgactcagggactgaaagattccctagcctgagcgaaagcctgatgaaccgaaatagtgtgctgagcgatcctgggctcgactcacctcggacaagccccgtgatcatggccagagtggctcagcaccacaggaggcagggatccgatgctgctgttccttccaccggggaccagggggtggatcagagcccaaaacctctgatcataggccctgaagaagactacgatcccggatatttcaacaacgagtctgacatcattttccaggacctcgagaaactgaagagtcgaccggctcacctcggagtgttcctccggtacatctttagccaagcagatccatcacctctcctgttctacctttgcgcagaagtctaccaacaggcatcccccaaggatagccgcagcctgggcaaagacatctggaacatctttcttgaaaaaaacgcccctctccgtgtcaagattcctgaaatgctgcaggctgaaatcgatagcagactgaggaatagcgaggatgctcgaggggttctgtgcgaggcccaagaggctgcgatgccagaaattcaggagcagatccacgactatcgaaccaagagaacactcggcctgggttcgctttacggggagaatgatcttctggacctggacggggatcccctaagagagcgccaggtggcagagaagcagctggcggcactgggggacatcctttcaaagtatgaagaagaccgctctgccccaatggattttgccctcaacacttacatgagccacgcaggtatccgcctgagggaagcaagacccagtaacactgcagagaaggcccagtccgcgcctgacaaggacaagtggctgccattcttccccaaaaccaagaagtctagcaactcaaagaaagagaaagacgctctggaggacaaaaagcggaatcctattctaaagtatatcgggaagcccaagtcttcctcccagtccacctttcacattcccctcagcccagtggaggtgaaacccggaaatgttaggaatattatccaacacttcgagaataaccagcagtacgatgcaccagagccaggcacccagcgtctgagtactggcagtttcccagaagacctcctcgaatcggactcaagccggagcgagatccgactagggaggagtgagagcctgaaagggcgagaagaaatgaaaaggagcagaaaggcagagaatgtaccacgcagcaggagtgacgttgatatggacgcagcggcagaagcaacaagactgcaccaatctgcctccagttctactagtagtctgtcaacacgctctttggaaaaccccacaccacccttcaccccaaagatgggcaggcgatcgattgaaagcccatctcttggtttttgtaccgatactctgctgccgcatctgctggaggatgacctgggccagctctcagacctggagccagaacccgatgctcaaaactggcagcacaccgtcggcaaggatgtcgtcgctggactgacgcaacgcgaaattgacaggcaggaggtgatcaatgaactgttcgtcacggaagcctctcatttgcgtactctgagagtcctggatctcatattctaccagcggatgaaaaaagagaacctgatgcccagggaggagcttgctcggctattccctaatctgcccgaactgattgaaatccacaacagttggtgcgaggccatgaaaaagctgagagaagaagggccaatcattaaggagatcagcgacctaatgctggcacgttttgacggacccgctagagaggagcttcaacaggttgctgcccaattttgtagctaccaatccattgccttagagctgattaagacgaagcagagaaaagaatctaggttccagctgtttatgcaagaggctgaatcccatccacaatgtcgccgtctccagctcagagacctgataatctcggagatgcagcgactgactaagtaccccctcctactggagtcaatcataaaacataccgagggtggaacatccgaacacgagaagctttgtcgcgcaagggatcaatgtcgggaaatccttaagtacgttaacgaggcagtcaagcaaaccgaaaaccgccataggctggaaggctaccaaaagcggctcgacgccactgcactcgaaagggcttctaatccgctcgctgcagagtttaaaagcctcgacctcaccactagaaagatgatccacgagggcccactcacatggcggatttccaaggataaaactttggatttacacgtacttctgctagaagaccttttggtcttgttgcagaagcaagatgagaagctactcctgaagtgccattctaaaacagctgtgggcagtagtgactctaagcaaacatttagcccggtgctaaagctcaacgctgtcctcatccggagcgtggcaacagataaacgagcctttttcatcatctgtactagcaaactgggtccaccccagatctacgaactggtggctctgacctcaagcgataaaaatacctggatggaactgctagaggaggcagtgcggaacgcgactaggcatccaggtgcggcacctatgcctgtgcacccacctcctccaggcccacgggagccagcccaacaagggcctacaccttcccgggtggaactggacgatagcgacgtcttccacggggagcctgaacctgaagaactacccggaggaacgggtagtcagcagagagttcaaggcaaacatcaagtgctgctggaagatcccgagcaggagggttccgcagaggaggaagaactgggagttcttccctgcccgagtaccagcctggatggagaaaatcgaggaattcgtaccagaaaccctatccacctggcttttccaggcccactcttcatggaaggtctggccgatagcgccctggaggatgttgaaaatttacgccacctgattctgtggtcgcttcttccgggtcacactatggagacacaggccgcacaggagcctgaggatgatcttacgcctaccccttcagtgatctcagtgaccagtcacccttgggatccaggaagcccaggccaggcccctccaggtggtgagggcgacaacacacagctcgctggattggaaggcgaaagacctgagcaagaggacatgggcttgtgttcactcgaacatcttccaccaaggacccgcaatagtgggatctgggagagtcccgagctcgacaggaatctggctgaggacgcctccagcacagaggctgctggaggctacaaagtcgtcaggaaagctgaagtcgcaggtagcaaggtggtacctgctctacccgaaagcggtcaatctgaaccaggcccaccagaagttgaaggtggcactaaggccacgggcaactgtttctacgttagcatgccttcaggaccacccgactctagtacagatcatagcgaagcacctatgtctcccccacagcctgatagtctcccggctggacagactgagccccagccacagctacaaggaggcaacgatgatccccgacgtccctcccggtctcccccaagtctggcattaagagacgtggggatgattttccacacaatcgaacagcttactctgaagttgaaccgtttgaaagacatggaactggctcaccgagagctgcttaagtcactgggaggcgaatcttccggcggtaccactccggtgggttctttccatacggaggccgcaaggtggactgacggctcactttctcctccagcaaaggaacctctggccagcgattctagaaactctcacgagctcggcccttgtccagaagacgggagcgatgctcctctggaagatagtacggcagatgcggcagcgagccccggaccttag

SEQ ID NO: 182191 - DNA, 5788 bp, Artificial Sequence
  derived and/or modified sequence
aattggctcatttaagaatttcaaaacatttaatgtaaaagcttttttttttttaaggaagtccataaattttggttcccagggttgcactggacttggaaggagtgctgttgtgtacatactattgtatggttttatttattattttactgtacaaatcagccgaaagaatttttccaagtgccatttcggatttattaatccttttttttttcctttcctcaaagatatttgctgttgtcatattaagcattggagactagaaaattactttccccctttgagctagagggtctcttgccaacagaaggacagctgagaaagctggatttaaaggatggttttatctgtactttgcagttaacagtgatattttgaaggcacatttttctgtgattcatttttttttggccatagtgctaaccttgaagagattcgtggctgggtttttggtttctgagaaggtcgtagtttttcctcttttcctttttttttcttttttcttttcttttctttttttttaaagcgggggaggggaagaggggctgagaaaggaaatcatgttcactggtagaagtagagtggagcatcagttaccagggtcctgagagctggaggagaaaggattctatcttcaagttgggaggccctcctctcaccttgctcaaaaattgcaagcgattcaatcctgatcaagacaccaaagctacaggattctggaaccgtggagacaccgagaaaccatgagtgtaaggttaccccagagtatagacaggttaagtagcctgtcttctctgggagattctgcaccagagcgcaagtccccttcccaccatcgccagccttcggatgcctctgagacaacaggtctcgttcaacgctgtgtcattatccaaaaggaccagcatggcttcggcttcacagtcagtggggatcgcattgttctggtgcagtctgtgcggcctggaggtgcagccatgaaggccggtgtgaaagagggcgaccggatcatcaaagtcaacggcaccatggtgaccaatagctcacacctggaagtggtaaagctgatcaaatctggcgcctatgtcgcactcaccctcctgggctcttcaccttcatccatgggcatctctgggctccagcaggacccatccccagcaggagctccccgaatcacgtcagtgatcccctcaccaccacctcctccacctctaccacctccacaacgcatcacaggacccaaacctctgcaggatcccgaagttcaaaaacatgccacccagatcctcaggaatatgctgaggcaggaagaaaaagaattacaggacatacttccactatatggtgacaccagccagagaccatcagaaggccggctctctctggattcccaggagggggacagtggcttggactctgggacagaacgctttccttccctcagtgagtcattgatgaatcggaactcggtactgtcagaccctgggctagacagtcctcgaacctcccctgtgatcatggccagggtggcccagcaccacaggcggcagggctcggatgcagcagtcccctcaaccggtgaccagggtgtagatcaaagcccaaagcctttaattattggcccagaggaagactatgacccgggttatttcaacaacgagagcgacatcatattccaggatctggagaaactgaagtctcggccagctcacctgggggtttttctacgttacatcttctctcaggcggaccccagtccactgcttttttacctgtgtgcagaagtttatcagcaggcaagccccaaggattcccgaagcttggggaaagacatctggaatattttcctggagaaaaatgcgcctctgagagtgaagatccctgagatgctacaggctgaaattgactcgcgcctgcggaacagcgaagatgcccgtggtgttctctgtgaagctcaagaggcagccatgcctgagatccaagagcagatccacgactacagaacgaagcgcacactggggctgggcagcctgtatggtgaaaatgacctgctggacctggatggggaccctctccgagagcgccaagtggctgagaagcagctggctgcccttggagatattttgtccaagtatgaggaagacaggagcgcccccatggacttcgccctcaatacctacatgagccatgctgggatccgtcttcgagaggcacgaccttccaacacagctgaaaaggcccagtctgctcctgacaaggacaagtggctaccgttcttccctaagaccaagaagagcagcaattccaagaaagaaaaggatgccttggaggacaagaagcgaaaccctatcctcaaatacattgggaagcccaaaagctcttctcaaagcacatttcatattcccttgtcccctgtggaagtcaaaccaggcaatgtgaggaacatcattcagcactttgagaacaaccagcagtatgatgccccagaacctgggacacaacgactctcgaccggaagctttcctgaggacctgctggagagtgacagttcacgctcagagattcgcctgggccgctctgaaagcctcaagggccgggaagagatgaaacggtctcgaaaggcagagaacgtgccccgctctcgcagtgatgttgacatggatgctgctgcggaggctactcgcctgcaccagtcagcctcgtcctctacctccagcctctccaccaggtctcttgagaacccaacccctccattcactcccaaaatgggccgcaggagcattgagtcccccagtttggggttctgcacagataccctccttccccacctcctagaggatgatctgggccagctgtctgacctggagccagagccagatgcccaaaattggcagcatacagtgggcaaggatgtggtggctgggctaacccagcgggagattgaccggcaagaggtcatcaatgagctgtttgtgactgaagcttcccacctgcgcacactccgggtcctggacctgatcttctaccagcgaatgaagaaggagaacctgatgccccgggaggagctggcccggctcttcccgaacctgcctgaactcatagagattcacaattcctggtgtgaagccatgaagaagctccgggaggaaggccccatcatcaaagagatcagtgacctcatgctggcccggtttgatggccctgcccgagaggaactccagcaagtggctgcacagttctgttcctatcagtcaatagccctagagctaatcaagaccaagcaacgcaaggagagtcgattccagctcttcatgcaggaggctgagagccaccctcagtgtcggcggctgcagctgagagacctcatcatctctgagatgcagcggctcaccaagtacccgctgctgctggagagcatcatcaagcacacagagggtggcacctctgagcatgagaagctgtgccgggcccgggaccagtgccgggagattctcaagtatgtgaatgaagcggtaaaacaaacagagaaccgccaccgtttagagggctaccagaaacgcctggatgccaccgccctggagagggccagcaaccccctggcagcagagttcaagagcctggatcttacaaccagaaaaatgatccatgagggacccctgacctggaggatcagcaaggataagaccttggacctccacgtgctgctgctggaggacctcctagtgctgctacagaaacaggatgagaagctattgctgaagtgccacagcaagactgctgtgggctcctcagacagcaagcagaccttcagccccgtgctcaagctcaatgctgtgctcatccgctctgtggccacagataaacgggccttcttcatcatctgcacctccaagctgggcccaccccagatctatgagctggttgcattgacgtcatcagacaagaacacatggatggagctcttagaagaggccgtgcggaatgccaccaggcaccccggagctgccccaatgcccgtccatcctccacccccaggtccccgggagccagcccagcagggccccacacccagcagggtagaactggatgactcagacgtgttccatggtgaacctgaacctgaggagctgcctggaggcactgggtcccagcagagggtccaagggaagcaccaggtcctgctagaggaccctgagcaggagggcagtgcagaggaagaggaactgggtgtcctgccttgcccttccacatccctggatggagagaacaggggcatcaggacaaggaaccccatccacttggccttcccaggccctctgttcatggaagggctcgctgactccgctctggaagatgtggagaacctgcgacatctgatcctgtggagcctgctgccaggtcacaccatggaaactcaggctgcccaggagcccgaggacgacctgacacccacaccttctgtcatcagcgtcacctctcacccctgggacccaggctccccagggcaagcaccccctgggggtgaaggggacaacacccagcttgcagggctggagggggaacggccagagcaggaagacatgggtctctgttctctggaacacctacccccaaggaccagaaattctgggatatgggagtctccagaactggacaggaatctggctgaagatgcttcaagcacagaggcagcaggaggttacaaagttgtgagaaaagctgaggtggcaggcagcaaggttgtccctgcactaccagagagtggccagtcagagcctgggccacctgaagtggaaggcggaacaaaggctacggggaactgcttttatgtcagcatgccatcaggacccccggactcaagcaccgaccactcagaggcacccatgagcccccctcagcctgacagcctccctgcagggcagacagagcctcagcctcagctgcagggaggcaacgatgatccaagacgccccagccgctctcctccaagcctggccctcagggacgtgggcatgatcttccataccattgagcagctcactctcaagctcaacaggctcaaggatatggagctggcccacagagagctgctcaagtcccttgggggagagtcatctggtggcaccacgcctgtgggcagtttccacacagaagcagctagatggacagatggctccctctcacctcccgctaaggagcccctagcttctgactccaggaacagccatgaactggggccctgccctgaggatggctctgacgcccccctggaagacagcacagcagacgcagccgcgtcaccaggaccataaccgtacaaaccaccaaatcctctgcgtccccactcctccttcagggactggcctgagaccggggcacagggtaggggggatcccaacactcctccctgtggaggaggcagttagggaaactaggatccagccaaggcccggggggagacccgcatgttgcttggtctgctcaagtcggagtcaggtttcagtgtcttttccctcccttagcccaaccctccaaggcctcatgtctcctaagcatgctgactgcatccgaaaggcccccactcaccatggtctgccctcaccccacatatgtgtgtacacgcgcacgcctgtatgtgcgctgccctcagacatgcaagtgaaaggaggaggcttctgtgtaaatgcactttcttcctcccctctttctccataagaccccaggcagaggtgggtgcctcccctcccctctttgtcactttggtttcctataaatatgtatgtatcgt

SEQ ID NO: 182192 - protein, 2063 aa, Artificial Sequence
  derived and/or modified sequence
MADGAPRPQLYRSVSFKLLERWSGGPGLREEDTDTPGLRRRASCRPTTAARGQPSRRVSKLASGPLAAPAQPRPLRSLSPSVRQLSRRFDAPRLDDGSAGTRDGGVLPAAAEEAAEGPARGAWPSVTEMRKLFGGPGSRRPSADSESPGTPSPDGAAWEPPARESRQPPTPPPRTCFPLAGLRSARPLTGPETEGRLRRPQQQQERAQRPADGLHSWHIFSQPQAGARASCSSSSIAASYPVSRSRAASSSEEEEEGPPQLPGAQSPAYHGGHSSGSDDDRDGEGGHRWGGRPGLRPGSSLLDQDCRPDSDGLNLSSMNSAGVSGSPEPPTSPRAPREEGLREWGSGSPPCVPGPQEGLRPMSDSVGGAFRVAKVSFPSYLASPAGSRGSSRYSSTETLKDDDLWSSRGSGGWGVYRSPSFGAGEGLLRSQARTRAKGPGGTSRALRDGGFEPEKSRQRKSLSNPDIASETLTLLSFLRSDLSELRVRKPGGSSGDRGSNPLDGRDSPSAGGPVGQLEPIPIPAPASPGTRPTLKDLTATLRRAKSFTCSEKPMARRLPRTSALKSSSSELLLTGPGAEEDPLPLIVQDQYVQEARQVFEKIQRMGAQQDDGSDAPPGSPDWAGDVTRGQRSQEELSGPESSLTDEGIGADPEPPVAAFCGLGTTGMWRPLSSSSAQTNHHGPGTEDSLGGWALVSPETPPTPGALRRRRKVPPSGSGGSELSNGEAGEAYRSLSDPIPQRHRAATSEEPTGFSVDSNLLGSLSPKTGLPATSAMDEGLTSGHSDWSVGSEESKGYQEVIQSIVQGPGTLGRVVDDRIAGKAPKKKSLSDPSRRGELAGPGFEGPGGEPIREVEPMLPPSSSEPILVEQRAEPEEPGATRSRAQSERALPEALPPPATAHRNFHLDPKLADILSPRLIRRGSKKRPARSSHQELRRDEGSQDQTGSLSRARPSSRHVRHASVPATFMPIVVPEPPTSVGPPVAVPEPIGFPTRAHPTLQAPSLEDVTKQYMLNLHSGEVPAPVPVDMPCLPLAAPPSAEAKPPEAARPADEPTPASKCCSKPQVDMRKHVAMTLLDTEQSYVESLRTLMQGYMQPLKQPENSVLCDPSLVDEIFDQIPELLEHHEQFLEQVRHCMQTWHAQQKVGALLVQSFSKDVLVNIYSAYIDNFLNAKDAVRVAKEARPAFLKFLEQSMRENKEKQALSDLMIKPVQRIPRYELLVKDLLKHTPEDHPDHPLLLEAQRNIKQVAERINKGVRSAEEAERHARVLQEIEAHIEGMEDLQAPLRRFLRQEMVIEVKAIGGKKDRSLFLFTDLIVCTTLKRKSGSLRRSSMSLYTAASVIDTASKYKMLWKLPLEDADIIKGASQATNRENIQKAISRLDEDLTTLGQMSKLSESLGFPHQSLDDALRDLSAAMHRDLSEKQALCYALSFPPTKLELCATRPEGTDSYIFEFPHPDARLGFEQAFDEAKRKLASSKSCLDPEFLKAIPIMKTRSGMQFSCAAPTLNSCPEPSPEVWVCNSDGYVGQVCLLSLRAEPDVEACIAVCSARILCIGAVPGLQPRCHREPPPSLRSPPETAPEPAGPELDVEAAADEEAATLAEPGPQPCLHISIAGSGLEMTPGLGEGDPRPELVPFDSDSDDESSPSPSGTLQSQASRSTISSSFGNEETPSSKEATAETTSSEEEQEPGFLPLSGSFGPGGPCGTSPMDGRALRRSSHGSFTRGSLEDLLSVDPEAYQSSVWLGTEDGCVHVYQSSDSIRDRRNSMKLQHAASVTCILYLNNQVFVSLANGELVVYQREAGHFWDPQNFKSVTLGTQGSPITKMVSVGGRLWCGCQNRVLVLSPDTLQLEHMFYVGQDSSRCVACMVDSSLGVWVTLKGSAHVCLYHPDTFEQLAEVDVTPPVHRMLAGSDAIIRQHKAACLRITALLVCEELLWVGTSAGVVLTMPTSPGTVSCPRAPLSPTGLGQGHTGHVRFLAAVQLPDGFNLLCPTPPPPPDTGPEKLPSLEHRDSPWHRGPAPARPKMLVISGGDGYEDFRLSSGGGSSSETVGRDDSTNHLLLWRV

SEQ ID NO: 182193 - DNA, 6192 bp, Artificial Sequence
  derived and/or modified sequence
atggccgacggcgctccaaggccacagctttacaggagcgtctctttcaaactcttggaacggtggagcgggggaccggggctgcgggaggaagacactgacaccccaggactgcgacggagagccagctgtagaccgactactgccgctagagggcagccctcacgcagagtgtcgaagctcgctagcggacctcttgcagctcccgcgcaacctcggccgcttagaagtttatcaccgtcggtcagacaactgtcaaggcgatttgacgccccacgcttggatgatggcagcgcgggtactcgtgatggcggcgtactgccagctgcggccgaagaggctgcagaaggaccagccagaggtgcctggccaagcgtaacagagatgcgaaagctgttcggagggcctggaagcaggcgaccatccgctgatagtgaaagcccagggactccatctcccgatggggccgcttgggaaccgcccgctagagagagtcgacagccacctacccccccaccccggacctgtttccccctggctgggctgcgcagcgccaggcctctgacaggaccagagaccgaggggaggctgagaaggccgcagcagcagcaggagagagcccaaagacccgcggacggtctccatagttggcacatcttttctcagccacaggccggagctagagccagttgcagcagctctagtattgcagcctcctatccagtcagcaggtctagggcagccagcagcagcgaggaggaagaggaaggccctccccagctgcctggtgcccaaagcccagcctatcacggggggcactcctccggctccgatgacgatagagatggggagggtgggcataggtggggcgggaggcctgggctgaggccagggagctccctcctcgaccaggactgcagacccgattctgatggcttaaatctgagttccatgaactctgctggagtctccggctctccagagcctcctacttcaccccgagcaccaagggaggagggcctcagggaatgggggagtggatctccaccttgtgtgcccggaccgcaagagggacttaggcctatgtcagactctgtcggcggagcgttcagagtggccaaggtgtcttttcccagttacctggcttcacctgccggttcccgtggctctagcaggtatagtagtaccgaaacgctgaaagatgatgacctatggtcatcccgcgggtctgggggttggggggtgtatcggtcgccttcatttggagcaggggagggcctcttaagaagtcaggcacgtacaagagcaaagggccctggggggacaagccgtgctctgcgagacggtggctttgagccagaaaagtcccggcagaggaagtctttaagcaatcctgacatcgcctcagagaccctgaccctgctttctttccttcgatctgacctgtccgagctgcgggtcaggaaaccgggaggtagctcgggtgataggggctctaatccacttgatgggagggacagccccagcgcaggcggccctgtcggacaactggagccaattcctattccagcacctgcaagccctggtaccagacccacactcaaggacctgacggccacactcaggcgggcaaagtcctttacttgctcggaaaaacccatggcacgacgactgccccggacctccgcattaaaaagcagctcgagtgaactgctcctaaccgggccaggggctgaagaagacccactccccctcatagttcaggaccagtatgtgcaggaagcacgacaggtctttgagaagatacagagaatgggcgcccagcaggatgatggcagcgatgccccgcccggctcacctgattgggcaggcgacgtgactagaggccaacggtctcaggaagagctgtctgggccagagtcatctctcactgacgaaggtatcggcgccgatccagagcctcctgtggccgccttttgcggtttaggaacgaccggcatgtggagacctctaagttcctcatccgcacagaccaaccaccacgggccaggcaccgaagactcgctgggagggtgggctctagttagccctgaaacccccccgacccccggagccctccgccggaggagaaaggttccgccctccggctctggaggctcagagttgagcaacggagaggctggtgaggcttacaggtccttaagcgaccctatcccacagcggcatagagccgcaacgagcgaagaacccacggggtttagtgtggatagcaatctgttaggcagcctgtccccaaaaaccggactgcccgcaacttcagcgatggacgaggggctcacctctgggcattcagactggtcagtgggatccgaggaaagcaaaggctaccaggaggtcatccagtctattgtgcagggtcccgggactttaggacgtgttgtggatgacagaatcgccggaaaagcaccgaaaaaaaagtcactttccgacccctcaaggcgtggcgagctggccggccccggattcgagggcccggggggagaacccatccgcgaggttgagccaatgctgccgccctctagtagcgaacccatcttggtagagcagagggcagaacctgaagaaccgggagctacaaggagccgcgcacaatccgagcgagcactgccggaagctttgccaccgcctgctaccgcgcatcgtaatttccatctagacccgaaactggcagacatcttaagtcctagacttattcgccggggatcaaagaaaagacccgccaggagttcacaccaggagctgcgccgcgatgagggctctcaagaccagacggggtcactgtcgagagctcgaccttcctccaggcacgttaggcacgcttctgtgccagctacttttatgcctatcgtcgtgccggagcccccaacatcggtgggtcccccagtcgcagtgcccgagcccatcggcttccccacccgcgctcatccaacactccaggcaccatccttggaggacgtgaccaaacagtacatgttgaacctgcattccggtgaggtcccagcccccgtcccagttgacatgccctgtctccctctcgcagcacccccgtccgccgaagccaaaccgcccgaggctgcccgacccgcagatgagccaacccctgctagcaagtgctgttctaaaccccaggtggacatgcggaagcatgtcgccatgacactcctggataccgagcagtcatatgtagaatctctgaggaccctcatgcagggatacatgcaaccattaaagcaaccagagaattccgtactgtgtgatcctagtctcgtggacgagattttcgaccagatccccgagctcctggaacatcatgaacagtttctcgagcaggtaagacactgcatgcagacgtggcacgcgcagcagaaggttggcgcgttgcttgtccagagcttcagcaaggatgtgctagtgaacatctacagtgcttacattgacaattttctgaatgccaaggacgcagtgagagtcgctaaggaagctcgaccggcatttctgaagttcctcgagcagtctatgagagagaataaggagaaacaggccctcagtgatctcatgatcaaacccgtgcagcgtatcccgcggtacgagctgctcgtgaaagatctgcttaaacataccccggaggatcaccctgaccacccattgttattggaagcccaacgtaacatcaaacaggtggcagagcgtatcaataagggagttaggtccgctgaagaagctgaaagacacgcccgcgttcttcaagagatcgaagcccacatcgagggcatggaggacctccaggcaccgctgcgcagattcctcagacaggagatggtgatagaagtgaaagccatcggtggaaagaaagaccgtagcctgtttctattcaccgacctgatagtgtgcaccacgttgaaaagaaagtcgggtagtctgaggagaagctcaatgagtttatacacagccgcttccgtgatagatacggcgtctaaatacaagatgctgtggaagttgccgcttgaggacgctgatatcatcaaaggggcatcgcaggcgaccaaccgggagaatatccagaaagctattagtaggctggacgaagacctgaccactctcggacagatgtctaagctgtccgaatccctgggattcccccatcagagcttggacgacgccctgcgagacctcagtgcagccatgcatagagacctgagcgaaaagcaggccctgtgctacgcgctctcttttccacccacaaagctggaactgtgtgctacaagaccggaaggcaccgatagctatatatttgaattcccacaccctgatgccaggctgggttttgagcaggctttcgacgaggctaagcgaaagctggctagctctaagtcctgtttagatcccgagtttcttaaggccattccaattatgaaaacaaggtccggaatgcagttctcttgcgcagcccctacgctcaattcctgtccagaaccttcacctgaagtgtgggtatgcaactcagacggatatgttggacaggtttgcctgctctccttacgtgcagaaccagatgttgaggcgtgtatcgctgtctgctccgcgcggatactctgcatcggggccgtccctggattgcagccgcgctgccatagagagcccccacccagtctgagaagtccaccggaaactgccccagagcccgctggtcctgaactcgatgtcgaggctgccgctgacgaggaagccgccactctggccgagcccgggcctcaaccttgcttgcacatctctatcgccggcagcggactggaaatgactccggggctaggcgagggagatccgcggccagaactggtgccgttcgattccgattcagatgatgagtcctcaccaagtcctagcggtacgctccagtcacaggccagcagatctactatctccagttcttttgggaatgaagaaactccatcgtccaaggaagccacggccgaaaccactagttccgaagaggagcaagaaccaggctttttgcccctctctggatcgtttgggccagggggaccatgtggcacctccccaatggatgggagagcactgcgcagatccagccacggtagtttcacaaggggttccttggaggacctgttaagcgttgatcctgaagcctaccagagttctgtgtggctgggtacggaggatggttgtgtgcatgtctatcagtcctccgacagcatccgcgaccgacgaaacagtatgaagctccagcacgccgcttctgtgacatgtatcctgtacctgaataatcaagtgttcgtcagccttgctaacggtgaactcgttgtgtaccagcgtgaggctggacacttttgggatccccagaattttaagagtgtgacgctaggcacgcagggctctcctattactaagatggtgtctgtgggtggccggctctggtgtggttgccaaaatcgcgtgctggttctctcccccgacacgctgcagctggagcacatgttctacgtgggccaggatagctcacgatgtgtggcctgcatggtggactcctcactgggtgtctgggttactttaaagggaagtgctcatgtgtgtttataccatccggatacttttgaacaactggccgaagttgatgttaccccccccgtgcaccgcatgctggcaggctccgacgccattatcagacaacacaaggcagcatgtcttcgtatcacagctctgctggtctgcgaggaacttctgtgggttggcaccagcgccggagttgtcctgacaatgcccactagcccaggaacggtgtcttgccctcgagccccgctcagccccactggtctcggacagggacatacgggccacgtccgtttcctggctgcggtccaactgcctgacggcttcaacttgctatgtccaacacctcctcctccccctgatactggacccgagaagctcccaagcctcgaacaccgggattctccctggcaccgcggcccagctccagcccgaccaaaaatgctggtgatatccggaggcgacggctatgaggactttagattgtcctcaggtggcggctcctcttctgagacagttggaagagatgacagtaccaatcacctgctgctttggagagtgtag

SEQ ID NO: 182194 - DNA, 6192 bp, Artificial Sequence
  derived and/or modified sequence
atggctgatggagccccccggccccagctgtacagatctgtgtccttcaagctgctggagcgctggagcggcggccctggcctgcgggaggaggacacagacaccccaggcctgcggcggcgggccagctgccggcccaccacagctgcccggggccagcccagccggcgggtgtccaagctggccagcggccccctggccgccccagcccagccccggcccctgcggagcctgagccccagcgtgcggcagctgagcagaagatttgatgccccccggctggatgatggcagcgctggcaccagagatggaggagtgctgcctgctgctgctgaggaggccgctgagggccctgcccggggggcctggcccagcgtgacagagatgaggaagctgtttggaggccctggcagcagaagacccagcgctgacagcgagagccctggcacccccagcccagatggagctgcctgggagcccccagcccgggagagccggcagccccccaccccaccacccaggacctgcttccccctggccggcctgcggagcgcccggcccctgactggacctgagacagagggccgcctgcggcggccccagcagcagcaggagcgggcccagaggcctgcagatggcctgcacagctggcacatcttcagccagccccaggccggggcccgggccagctgcagcagcagcagcattgctgccagctaccctgtgagccgcagcagagctgccagcagcagcgaggaggaggaggagggccccccccagctgcccggggcccagagccctgcctaccacggcggccacagcagcggcagtgatgatgacagagatggagagggcggccaccgctggggcggccggcccggcctgcggcccggcagcagcctgctggaccaggactgcaggccagacagtgatggcctgaacctgagctccatgaacagcgctggggtgtctggcagccctgagccccccaccagcccccgggccccccgggaggagggcctgcgggagtggggcagcggcagccccccctgtgtgcccggcccccaggagggcctgcggcccatgtctgattctgtgggcggggccttccgggtggccaaggtgtccttccccagctacctggccagccctgctggcagccggggcagcagccgctacagcagcacagagaccctgaaggatgatgacctgtggagcagccggggcagcggcggctggggcgtgtaccgcagccccagctttggagctggggagggcctgctgcggagccaggcccggacccgggccaagggccctgggggcaccagccgggccctgagagatggcggctttgagcctgagaagagccggcagaggaagagcctgagcaacccagacatcgccagcgagaccctgaccctgctgtccttcctgcggagtgacctgtctgagctgcgggtgaggaagccaggcggcagcagcggggaccggggcagcaaccccctggatggccgggacagccccagcgctgggggccctgtgggccagctggagcccatccccatcccagccccagccagccctggcacccggcccaccctgaaggacctgacagccaccctgcggcgggccaagagcttcacctgcagcgagaagcccatggcccggcggctgcccaggaccagcgccctgaagagcagcagcagcgagctgctgctgaccggccctggagctgaggaggaccccctgcccctcatcgtgcaggaccagtatgtgcaggaggcccggcaggtgtttgagaagatccagaggatgggcgcccagcaggatgatggcagtgatgcccctcctggcagcccagactgggccggagatgtgacccggggccagaggagccaggaggagctgagcggccctgagagcagcctgacagatgagggcatcggggctgaccctgagccccctgtggccgccttctgtggcctgggcaccaccggcatgtggaggcccctgagcagcagcagcgcccagaccaaccaccacggccctggaacagaggacagcctgggcggctgggccctggtgtccccagagaccccacccacccctggggccctgcggcggcggaggaaggtgcccccatctggcagcggcggcagcgagctgagcaatggagaggccggggaggcctaccgcagcctgagtgaccccatcccccagaggcaccgggccgccaccagcgaggagcccaccggcttctctgtggacagcaacctgctgggcagcctgagccccaagacaggcctgcctgccaccagcgccatggatgagggcctgaccagcggccacagcgactggagcgtgggcagcgaggagagcaagggctaccaggaggtgatccagagcatcgtgcagggccctggcaccctgggccgggtggtggatgacagaattgctgggaaggcccccaagaagaagagcctgagtgaccccagcagaagaggagagctggccggccctggctttgagggccctggaggagagcccatccgggaggtggagcccatgctgccccccagcagcagcgagcccatcctggtggagcagagagctgagcctgaggagcccggggccaccaggagccgggcccagagcgagcgggccctgcctgaggccctgcccccaccagccacagcccacaggaacttccacctggaccccaagctggccgacatcctgagccccaggctcatcagaagaggcagcaagaagaggcctgcccggagcagccaccaggagctgcggagagatgagggcagccaggaccagacaggcagcctgagccgggcccggcccagcagccgccacgtgagacatgcctctgtgcctgccaccttcatgcccatcgtggtgcctgagccccccacctctgtgggcccccctgtggccgtgcctgagcccatcggcttccccacccgggcccaccccaccctgcaggcccccagcctggaggatgtgaccaagcagtacatgctgaacctgcacagcggggaggtgcctgcccctgtgcctgtggacatgccctgcctgcccctggccgcccctccttctgctgaggccaagcccccagaggccgcccggccagcagatgagcccaccccagccagcaagtgctgcagcaagccccaggtggacatgaggaagcacgtggccatgaccctgctggacacagagcagagctatgtggagagcctgcggaccctgatgcagggctacatgcagcccctgaagcagcctgagaacagcgtgctgtgtgaccccagcctggtggatgagatctttgaccagatccctgagctgctggagcaccacgagcagttcctggagcaggtgcgccactgcatgcagacctggcacgcccagcagaaggtgggcgccctgctggtgcagagcttcagcaaggatgtgctggtgaacatctacagcgcctacatcgacaacttcctgaatgccaaggatgctgtgcgggtggccaaggaggcccggcctgccttcctgaagttcctggagcagagcatgagggagaacaaggagaagcaggccctgagtgacctgatgatcaagcctgtgcagaggatccccaggtatgagctgctggtgaaggacctgctgaagcacaccccagaggaccacccagaccaccccctgctgctggaggcccagaggaacatcaagcaggtggccgagcgcatcaacaagggcgtgcgctctgctgaggaggccgagagacatgcccgggtgctgcaggagattgaggcccacatcgagggcatggaggacctgcaggcccccctgcggcgcttcctgcggcaggagatggtgattgaggtgaaggccatcggcggcaagaaggacaggagcctcttcctgttcacagacctgattgtgtgcaccaccctgaagaggaagagcggcagcctgcggcgcagctccatgagcctgtacacagctgcctctgtgattgacacagccagcaagtacaagatgctgtggaagctgcccctggaggatgctgacatcatcaagggggccagccaggccaccaaccgggagaacatccagaaggccatcagccggctggatgaggacctgaccaccctgggccagatgagcaagctgtctgagagcctgggcttcccccaccagagcctggatgatgccctgcgggacctgtctgctgccatgcaccgggacctgtctgagaagcaggccctgtgctacgccctgtccttcccccccaccaagctggagctgtgtgccaccaggcctgagggcacagacagctacatctttgagttcccccacccagatgcccggctgggctttgagcaggcctttgatgaggccaagaggaagctggccagcagcaagagctgcctggaccctgagttcctgaaggccatccccatcatgaagaccaggagcggcatgcagttcagctgtgccgcccccaccctgaacagctgcccagagcccagccctgaggtgtgggtgtgcaacagtgatggctacgtgggccaggtgtgcctgctgagcctgcgggcagagccagatgtggaggcctgcatcgctgtgtgcagcgcccgcatcctgtgcattggagctgtgcccggcctgcagccccgctgccaccgggagcccccacccagcctgcggagccccccagagacagcccctgagcccgccggccctgagctggatgtggaggccgctgctgatgaggaggccgccaccctggccgagcccggcccccagccctgcctgcacatcagcattgctggcagcggcctggagatgaccccaggcctgggggagggggaccccaggcctgagctggtgccctttgacagcgacagtgatgatgagagcagccccagccccagcggcaccctgcagagccaggccagccgcagcaccatcagcagcagctttggaaatgaggagacccccagcagcaaggaggccacagctgagaccaccagcagcgaggaggagcaggagcccggcttcctgcccctgagcggcagctttggacctgggggcccctgtggcaccagccccatggatggccgggccctgcggcgcagcagccacggcagcttcacccggggcagcctggaggacctgctgtctgtggaccctgaggcctaccagagctctgtgtggctgggcacagaagatggctgtgtgcacgtgtaccagagcagtgacagcatccgggacagaagaaattccatgaagctgcagcacgccgcctctgtgacctgcatcctgtacctgaacaaccaggtgtttgtgtccctggccaacggggagctggtggtgtaccagcgggaggccggccacttctgggacccccagaacttcaagtctgtgaccctgggcacccagggcagccccatcaccaagatggtgtctgtgggcggccgcctgtggtgtggctgccagaacagagtgctggtgctgagcccagacaccctgcagctggagcacatgttctacgtgggccaggacagcagccgctgtgtggcctgcatggtggacagcagcctgggcgtgtgggtgaccctgaagggcagcgcccacgtgtgcctgtaccacccagacacctttgagcagctggccgaggtggatgtgaccccacctgtgcacaggatgctggccggcagtgatgccatcatccggcagcacaaggccgcctgcctgcgcatcacagccctgctggtgtgtgaggagctgctgtgggtgggcaccagcgctggggtggtgctgaccatgcccaccagccctggcaccgtgtcctgcccccgggcccccctgagccccaccggcctgggccagggccacacaggccacgtgcgcttcctggccgctgtgcagctgcctgatggcttcaacctgctgtgccccaccccacctcctcctccagacaccggccctgagaagctgcccagcctggagcaccgggacagcccctggcaccggggccctgccccagcccggcccaagatgctggtgatctctggaggagatggctatgaggacttccggctgagcagcggcggcggcagcagcagcgagaccgtgggcagagatgacagcaccaaccacctgctgctgtggagggtgtag

SEQ ID NO: 182195 - DNA, 6192 bp, Artificial Sequence
  derived and/or modified sequence
atggccgacggcgccccccggccccagctgtaccggagcgtgagcttcaaattgctggaacgctggtccggcgggcccggattacgggaggaagacacagacacacccggtctgcgccgtagagcttcatgccgacccacaactgccgctcgcggacagcctagtcgccgggtgagtaagctggcatctggaccgctggccgccccagctcaaccacgaccactcaggagcctgagcccttcagtgaggcaactcagtagaagatttgacgctccccggttagacgatgggtcggccggaactagggatggaggtgttctgccagcggccgcagaagaagccgcggaagggcccgccaggggtgcctggccatctgttactgagatgcgaaagttgttcggaggacctggcagtcgaaggccctctgccgacagcgagtcccctggcaccccatcccccgatggcgccgcgtgggaaccaccagcccgggaatcacgccaacctccgactccccccccacggacttgctttcccctagcaggcttgaggtccgcgaggccactgaccggcccagagaccgagggcaggttacggaggccgcagcagcaacaagagagagctcaaaggcctgcagatggcctgcattcttggcacatcttttctcagccacaagccggtgccagggcttcttgcagttcctcttctattgcagcatcgtacccagtctctaggagtcgcgccgcttcatcctctgaagaggaagaggaaggtcccccacagctgcctggagcccagtcccccgcctatcacggcggccacagcagtggaagcgacgacgacagagacggagagggtggccacaggtgggggggccgtcccggcctccgcccaggctcatccctcttggatcaagattgtaggcctgattccgatgggttgaacctctcatcaatgaatagcgccggggtatctggttcacccgaaccaccgacatctcctcgcgccccgagagaggaagggctgcgcgagtggggcagtggaagcccgccttgcgtgcccgggccacaggaggggctgcgtcctatgtcggactcagttgggggggccttcagggtcgctaaagtttctttcccttcttacttggcttctccggctggctctaggggctccagcagatactcaagcacagagaccttgaaggacgacgacctttggagcagccgggggtcaggtggttggggggtatatcggtccccctcttttggtgccggggagggtctcctacgtagccaggccagaacgagagctaaaggaccaggtggcactagtcgcgccctccgcgatggaggtttcgagccagagaagtccagacagcggaaatccctatcaaatccagacatcgcctcggagactttaaccctactcagctttcttcgttccgatttatctgagctacgggtaaggaagcctggcggatctagtggtgataggggcagcaatccgctagatggacgagacagccccagtgcagggggtccggtggggcaacttgagcctattcccattcctgcaccagcttcaccgggcactcgcccaactctcaaggatctaactgcaaccctgagaagggccaaaagtttcacatgtagtgaaaagcccatggccagaaggctgcccaggacctcagctctgaagagcagcagcagtgagcttcttctaaccgggcccggggcggaggaggatcctctgccccttattgttcaggaccagtacgtccaggaggccagacaggtgttcgagaagatccagagaatgggcgctcagcaggatgatggaagcgacgcaccaccgggctcaccagactgggctggcgatgtgaccagaggccagcggtcccaggaagaactcagtggtccagagagctcactcacagacgaaggaattggtgcagaccctgagccgcctgttgccgctttctgcggactgggcactactggaatgtggaggcccctctcttcatcgtcagcacagaccaaccaccacggacccggcactgaagatagcctcggcggttgggctctggtcagcccagagactccacctacccccggagcactgaggcgacggcggaaggtgcccccatctgggagtggagggtctgagcttagcaacggcgaggccggggaggcttacaggagtttgagcgatccaattcctcaacggcacagggcggccacaagtgaggaacccacaggtttctcagttgacagcaatctgctgggcagtttgtcaccgaaaacgggactgccagctacgagtgctatggatgaagggttaaccagtggccacagtgactggagcgttggctcagaggagtctaaaggataccaagaggtgattcaaagtatcgtacagggccctggcaccttagggagggtggtggacgataggatcgctggcaaggcccccaaaaaaaaatcactttctgatccctcacgaaggggggagctggccggcccaggctttgagggccccggtggcgaacctatccgagaagtggagcccatgttgccacccagttcttccgaacccattttggttgaacagagagctgagcctgaggagcccggagcaacacgctctagggctcaatcagaaagagcacttcccgaagctctcccgcctcccgccaccgcacatcggaattttcatctggacccaaaattagccgatattctgtctcctaggctgattcgacgcggctcaaagaaaagacccgccagatcaagccatcaggagctgaggcgggatgaaggttctcaggaccaaaccggctccctgagccgtgccagaccctcaagccgccacgttaggcacgcctccgtccctgctacattcatgcccatagtggtgcccgagccacctacttctgtgggccctccggtcgccgttccagagccaatagggttccccactcgggcccatccaacccttcaggcgccctcactcgaagatgtgacaaagcagtatatgctcaacttgcactccggcgaggtgccagcacccgtacctgtcgacatgccgtgtctcccgttggcggcccccccatcagctgaagccaaacctcccgaagccgctcgacccgctgatgagccaaccccagcatcaaaatgctgcagtaagccccaagtagatatgaggaagcacgtcgcaatgacattactcgatacagagcagagctacgtggaaagcctgcgaacattaatgcagggttacatgcagcctttgaagcagcctgagaactcagtgctctgtgatccttcactagtcgacgaaattttcgatcagatcccagagctgcttgagcatcacgagcaattcctggaacaggtccgccactgcatgcagacctggcacgctcaacagaaggtgggggccttgcttgtccaaagctttagcaaagatgtgctggtaaacatctatagtgcttatatagataacttccttaatgcaaaggacgccgtcagagtggctaaggaagcccgcccggctttcctgaagtttttggaacaatcaatgcgtgagaacaaggagaagcaggctctttccgatcttatgatcaagccagtgcaaagaatcccacggtatgagcttctggtgaaggacctgctgaaacacacgcctgaggaccatcctgaccaccccctcttactggaagcacaacggaacattaaacaggtcgcagagaggatcaataagggggtgcgatccgctgaggaggcggagagacacgcccgggtgcttcaggagatagaagctcatattgagggtatggaagatctccaggctccgctccgccggtttctgcgccaggaaatggtcatcgaagtcaaggcaataggtggaaaaaaggaccggagtctgttcctgtttacagacctgattgtgtgtacaacactgaaacggaaaagcggcagcctgcggagatcttcgatgtccctttacaccgctgcctctgtgattgacactgccagtaagtacaaaatgctctggaagctgccattggaggatgccgatatcataaaaggcgcctcccaggccaccaatagagaaaacattcagaaagcgatcagccggctggatgaggatttgactaccctggggcaaatgagtaagttgagcgagtcgctagggttcccgcaccagtccctcgacgacgctctgcgtgacctgtcagcagccatgcaccgggatctctcagaaaagcaagccctctgctacgccctttcattcccgcccaccaaactggaactctgtgctacccgaccagagggaacagactcgtacatattcgagtttccacatcccgatgcccgtcttggcttcgagcaagcctttgatgaggcgaaaagaaagttggcatcatcaaaatcatgcctggaccccgaatttctcaaggctatcccaatcatgaagacacgctcagggatgcagttcagctgtgcagctcccaccttaaattcttgtccagagccttctcctgaagtttgggtgtgcaattcagacggctacgtgggtcaggtgtgtctgctgtcacttcgagctgaacctgacgtcgaggcatgcatcgctgtttgttccgcacggattctctgcattggagcagttcccggactgcagccacggtgccatcgcgaacctccgccctccttaaggtccccacctgagactgcccctgagcccgccgggcctgagcttgacgtggaagcagctgcagacgaggaagcagcaaccctcgccgaaccaggtccgcaaccatgccttcatatcagcattgccgggagtgggttggagatgaccccaggtttgggggaaggtgatccccggcccgaactggttccttttgattcagactcagatgatgagagctctccatcgccttccggcactcttcaatctcaagcttcacgcagcacaatttcttcatcttttggtaatgaagaaaccccttcgtcgaaggaggccaccgccgagaccacatcgtccgaggaggagcaagagccagggttcctgcccctgtccggttccttcgggccaggcggcccctgtggaacatcaccaatggacggcagagctttacggagatctagccacggctcctttactcggggtagcttggaggacctgctgtctgtggatcctgaggcatatcagtcgagtgtatggctgggcaccgaagacggatgcgtgcatgtataccagtcttcagacagcattcgtgataggcgtaacagcatgaaattacagcacgccgcaagtgtaacatgcatcttgtacctcaacaatcaggtgttcgtctcgctggctaacggagagctggtagtttaccagagagaggccggacatttttgggaccctcagaactttaagtctgtgacattaggtactcaaggaagcccaattaccaaaatggtttctgttggtggtaggctctggtgcggatgccaaaaccgggtgctagtgctaagccctgacacactgcagctggagcatatgttctacgtggggcaagattcctctcgctgtgtggcttgcatggtagattccagcctgggggtttgggtcacactgaaggggtcggcgcacgtgtgtctgtatcaccccgatacctttgagcagttagcagaagtggatgtcacccctcccgtacacaggatgcttgcaggcagtgacgctattatccggcaacataaagctgcttgccttcgtataaccgccttgcttgtctgtgaggaactgctatgggtgggcacgagtgcaggagtagtcttgacgatgcccacgtccccggggacagtgtcatgcccccgcgctcccctgtctcctaccggcttgggccagggccatactgggcatgtgagatttttggccgccgtgcaactgcctgatgggtttaacctcttgtgccctaccccaccgcccccaccagatacaggtcctgaaaaactgccttcactggagcatagggattcgccttggcacagagggccggcgcccgctcgaccaaagatgctggtgatctctgggggcgatgggtatgaagatttccgactgtctagcggaggagggtcatcatctgagactgtgggcagggacgacagtacaaaccaccttctattgtggagggtgtag

SEQ ID NO: 182196 - DNA, 6192 bp, Artificial Sequence
  derived and/or modified sequence
atggctgatggcgcaccaagacctcagttgtaccgcagtgtgagcttcaaactgctcgagcgatggagcggaggccctggactgcgcgaagaagatactgatacccccggtttaaggcggcgagcgtcctgccggcctacaactgccgctcggggacagcccagcaggagagtgagtaagttagcatcgggtccactagcagcgcctgctcaacctcggccattgaggagcctcagcccaagcgttagacagttgtccagacggtttgatgctccaaggctggacgacggctctgcgggaaccagggacgggggagttctgcctgcagccgcagaagaggcggctgagggcccagccagaggagcatggccctccgtaaccgagatgcgtaaactgtttgggggacctggttccagaagaccaagcgcagactccgagagccccggtacaccatccccggacggtgctgcctgggagccccctgcccgagaatcccgccagccccctacacctcccccacggacttgttttcctctcgccggactacggtctgcgagacccctgaccggaccagagaccgagggtcgtcttcgcaggccacaacaacaacaagaacgagcacagaggccagctgacgggctgcattcatggcatattttctcccagccgcaagcgggagctcgcgctagctgctcatcatcttcgatcgcagcatcatatcccgtgtcaaggtctcgagcagcttcttcaagcgaagaggaggaggaaggtccccctcagctccctggggcacagagtccagcgtaccacggcggtcactccagcggatccgacgacgaccgagatggcgagggaggccaccggtggggtgggcgaccaggtcttagacctgggtcttctctgcttgaccaggattgccggcctgattccgacggcctgaacctgtccagcatgaactcagccggagtgtccggttcaccggaaccgcctacatccccaagggcaccacgggaagaagggctccgagaatggggctcaggctcgcctccatgcgtccctggccctcaggagggactccggccaatgagcgattcagtcgggggagcctttagagtggccaaagttagcttcccctcataccttgcatcacctgcaggttcacgtggctctagcaggtacagttccactgagactttaaaggatgatgacttgtggtctagccgcggatctggcggatggggcgtctaccgaagccccagcttcggcgcaggtgagggtttgctgagaagccaggcacgcacgagagctaagggaccagggggaacatccagggctctgcgagacggagggttcgagcccgagaagtctcggcagcgcaaaagcttatccaatccggatattgcctcagaaacgttaaccctactcagttttctgcgcagcgacctgagcgagctgcgggtgcgcaaacctggcggaagttctggcgataggggatcgaaccccttagatggccgagattcaccttccgcaggaggacccgtggggcagctcgagcctatcccgattccagcccctgcgagcccaggaaccaggcctacactcaaggatctgactgctaccctacgacgcgctaaaagctttacctgttctgagaaaccaatggccagacgactgcctcgaactagcgcactgaaatcatccagcagcgaactactgctgactggcccaggtgcagaggaagatccactcccgttgatcgtgcaagatcaatacgtgcaggaagctcggcaggtgttcgaaaagatccagagaatgggggcacaacaagacgatggatcagatgcccctccgggatctccagactgggccggagacgtcactcgaggccagcggtcccaggaggaactctccggcccagagtcttctttaacagacgagggcattggtgccgatccggaaccccctgttgctgcattctgtgggctgggcacgaccggtatgtggcgacccttgtcgagctccagtgcccagaccaaccaccatggccctgggacagaagattcactgggaggatgggctttggtctctcctgagacccccccaacgccgggtgccctgaggcggaggcggaaggttccaccttcaggatctgggggatctgaactctccaacggcgaagcaggcgaggcttatcggagcctgtctgatccgattccgcagcgacatagagcagccacttcggaggagcccaccggatttagtgtcgattcaaatctgcttgggtcactgagcccaaagaccggtctcccagccactagcgctatggacgaaggtctcacctcaggccattctgactggtcagttgggagtgaggagtcgaaaggctaccaggaggtgattcaaagtattgtgcagggcccaggaacactcggcagggtggttgatgatagaatcgctgggaaagcccctaagaagaaaagcctgtccgacccgagcagaaggggtgagcttgccggtcccggatttgaggggcctggtggggaacctataagggaagttgagcccatgctccccccttcttcatctgaaccaatcctcgttgaacagagggcagagccggaggagcctggtgctactcgaagtagagcacagagtgagagagctctgcctgaagctctccctcctcctgcgaccgcgcataggaactttcatttggatcctaaattggcggatatactttccccgcgactcatacgtaggggtagcaagaagagacccgctcgctcctcccaccaggagctccgcagagacgagggctcccaggaccagacggggagtctgtccagagccagaccatcctccagacacgtacggcatgcgagcgtgccagctacatttatgcccatcgtggtgccagaacccccaacttcggtcggcccacccgtggccgtcccagaaccaattggtttccccaccagagcccatcctactctgcaggcgccaagcttagaagacgtgaccaagcagtacatgctcaatttgcattctggtgaggtgccagcacctgtcccagtcgatatgccttgcttaccgttggccgctccacccagcgccgaagccaaacctcctgaagccgctcgtcctgcagatgagcccacacccgcttccaaatgctgttctaaaccacaggtcgacatgagaaagcacgtcgcaatgacactcctggacacagaacagtcctatgtggagagtctccggactctgatgcaggggtacatgcagccactcaagcagcccgaaaactcagtgctgtgcgatccgagccttgtcgacgagatctttgaccagatacctgagctgctggagcatcacgagcaatttctggaacaagtccgccattgtatgcaaacttggcatgcacaacagaaggttggagcattacttgttcagtcgttttcaaaggacgtcctcgtgaacatctacagcgcatacatcgacaactttcttaatgccaaggatgccgtccgcgtcgcaaaggaggcccgaccagcattcctgaaattcctggaacaatctatgagagagaataaagagaaacaggcactatctgatttaatgattaagcctgtgcagaggatacccaggtacgaactattggtcaaggatctgctcaaacacacacccgaggatcaccccgatcatccccttcttctggaggcgcagcgtaatataaaacaggttgctgagaggattaataagggcgtacgatcagccgaagaggcagaaaggcatgcccgagtgttgcaggagatcgaggcccatatcgaggggatggaggaccttcaggccccactccgaaggttcttgagacaagagatggtcatcgaagtgaaggctattggcggaaaaaaggacagaagcctgtttctgttcactgatctgattgtgtgcacaacattgaagcgcaagagtggttccctccgcagatccagcatgtccttgtatacagcagccagcgtgatcgacaccgcctcgaaatacaaaatgctgtggaaactgcctctggaggatgcagacattataaagggagcttcccaggcaacaaatagagagaacatccagaaagcaatctcaagattggacgaagacctcaccacattgggacaaatgtctaagctgagtgaatccctgggttttccacatcagtccctggacgatgcgttacgcgatctcagtgccgcaatgcaccgtgacctctctgaaaagcaagcactctgctatgccctctccttcccacccaccaagctggaattgtgcgcgaccagacccgaagggacagattcctacatttttgaatttccccacccagatgcacggttgggtttcgaacaggcttttgatgaggccaagaggaagctggcctcctcgaaatcttgtcttgaccccgagttcttgaaggcaatcccaattatgaaaacacgatccgggatgcagtttagctgcgctgccccaacacttaatagttgccccgagcctagtcctgaagtatgggtttgtaattcagatggctacgtcggccaagtgtgcctcctttccctcagggccgagccagacgtggaggcatgcatagccgtctgctcggcccgaatcctgtgcatcggggctgtgccgggtctccagcccaggtgtcaccgcgagcctccaccatcgctccgatccccaccagaaaccgctcccgaacccgctggccctgaactagacgtggaagcggctgcagatgaagaagccgctacactggcagagcctgggcctcagccctgtttgcacattagcatcgctgggagcggcttggaaatgacgccaggcctgggcgaaggcgatccaaggcccgaacttgtgccttttgactcagatagcgatgacgagtcgtccccctcccctagtggcacccttcaaagtcaggcctcaagatccactatcagtagctcttttggtaatgaagagaccccctcaagcaaagaggccacagcggaaactacctctagtgaagaggaacaggagcccggattcttgcccctgagcggcagcttcggtcctggtgggccatgtggaacttccccaatggacggacgggctcttcggagatcaagccatggcagtttcactcgaggcagcctggaggatctcctcagtgttgaccccgaggcttaccagagtagcgtctggctaggtactgaggacggctgcgtgcatgtctaccaatcatctgactcaattcgggatcgccgaaattccatgaagctgcagcatgcagccagtgtgacgtgtatactttatctcaacaaccaggtcttcgtctccctcgctaatggggagttggtggtataccaacgggaagccggacacttctgggacccccaaaactttaagtccgtgaccctggggacacagggttccccaataacaaagatggtctctgtgggaggcaggctttggtgcggctgccagaatcgggtactcgtgctctcccccgataccctgcagctcgagcatatgttctatgtgggtcaggattcaagtcggtgcgtggcctgtatggtggattcatctcttggggtctgggtcaccctcaaaggaagcgcccacgtctgcctctatcaccccgatacgttcgagcagctcgctgaggtggatgtgaccccccctgttcacaggatgcttgccggatctgacgccattattaggcaacacaaagctgcgtgtctaagaataacagccttgctggtctgcgaggaactcctatgggtcggtactagcgctggtgtcgtattgaccatgcctacctcccccggtacggtctcttgccccagggctcctctctcaccaacagggcttggacagggccacactggtcatgtgcgtttcttagctgccgtgcagctgcctgatggtttcaacctactttgcccaaccccaccccctcctcccgatacgggaccggaaaaacttccgagtctggaacatcgcgactccccctggcatcgaggcccagcaccagctcgtcctaaaatgctcgtgatcagtggtggcgatggttacgaggacttccgcctcagttccggaggtggttcaagctctgaaaccgtgggcagggatgacagtacgaatcatctactgttatggagggtgtag

SEQ ID NO: 182197 - DNA, 7853 bp, Artificial Sequence
  derived and/or modified sequence
gagcgagcagccaagggcgttgggcaggcggacgcagagtcgaggaaccaagcgctgggatcccgcccaggcggtgccgcggtgcccctggtcgctccagccgcggcgggggctgggcctgggggtcggcgctgaggcgggaggggccgcccgggatggagacgttgcggccggtggccacagaaacttgagccgcggcagagaaacctctgctccggtctctgcgtcctcttcccacactcccgtgcgctgctttcggcgtgggccgctgcgctcctagggagtgggggcgcagggggggttggccgcggctgcccgaggccagcccccccggagtgagttacgccactatggcggacggggcaccccggccccagctttaccgcagcgtctcgttcaagctgctggagcgctggagcggcggccccgggctgagggaggaggacacggacacccccggcttgaggcgacgcgcctcgtgccggccgaccacggctgcccggggccagccctctcggcgcgtgtccaagctggcgtctgggcccctggccgcccccgcgcagccgcgcccgctccgcagcctctcgccgtcggttcgccagctctcccggcgcttcgacgcgccgcgtctggacgacggctccgctgggacccgagacggaggcgtcttacccgcggccgcggaagaagcggccgagggcccagcgcgaggagcctggcccagcgtcaccgagatgcgcaagctcttcggcggtcctggctccaggaggcccagcgccgactctgaatccccaggaacgcccagccccgacggtgccgcgtgggagcctccggctcgggagtcgcggcagccaccgacgccaccccctcggacatgcttccccctggcgggtctgcgttcggcgcggcccctgaccgggccggagaccgaagggaggctgcgccggccgcagcagcaacaggagcgggcgcagcgtccagcggatggtttacattcttggcatatcttctcccaaccgcaggccggggcccgggcctcctgctcctcctcctccatcgccgcctcctatcctgtcagccgcagtcgtgctgccagctccagcgaggaggaagaggagggcccgccgcagctgcctggagcccagagtccggcctaccacggcggccactcctcgggcagtgacgacgaccgagacggtgagggcggccaccgctggggagggaggcccgggctcaggcctggaagctccctattggatcaggactgcaggcctgacagtgatgggttaaatctaagcagcatgaactcagcaggggtttctgggagccctgagcccccaacatctccaagagcccctagagaagaaggactccgggagtggggtagtggctctccgccctgcgtcccaggtccccaggagggacttcggcctatgtctgactctgtgggaggagctttccgtgtggccaaggtgagctttccctcgtacctggccagccccgcaggctcccgcggtagcagccgttattccagcacggagaccctcaaggacgacgacctatggtctagtaggggttctgggggctggggcgtgtaccgctcccctagctttggagctggggaagggctcctgcggtcccaggctcgaacccgtgccaaaggacctggaggcacctctagggcattgagggatggaggatttgagcctgaaaagagtcgacagcggaagtccctgtcaaatccagatatcgcctcagagaccctgacgcttctcagtttcctgcgctcagacctttcagagctgagggtccgaaaacctggtgggagctccggggaccgtggaagcaaccccctagatggcagagactcaccatccgcaggtggccctgtggggcaacttgaacccatacccatcccagccccagcatcacctggcacgcgccccacactcaaggacttgacagccactctgcggagagcaaagtcattcacctgctctgagaagcccatggcccgccgcctgccccgcaccagtgctctgaagtccagctcctccgagctcctgctcacaggccctggtgccgaggaggatccgctgcccctcatcgtccaggaccaatatgtgcaggaggcccgccaggtttttgagaagatccagcgcatgggtgcccaacaagatgatggaagcgatgccccccctggaagccctgactgggcaggggatgtgacccgagggcagcggtcccaggaggagctctcaggccctgagtccagtctgacagatgaaggcattggggcagaccctgagcctcctgttgcagcattttgcggcctgggtaccacagggatgtggcgacctctttcctcatcctcggcccagacgaaccaccatggccctgggactgaggacagtctgggcgggtgggccctggtgtcgcctgagacccctcccacaccaggtgccctccgccgacgacgcaaagtcccaccttcaggttctggtgggagcgaattgagcaatggggaggcaggggaggcctacaggtccctgagtgacccaattcctcagcgccaccgggctgccacctctgaagagcctactgggttctctgtggacagcaacctcctgggctcactgagccccaagacagggctccctgccacctcagccatggatgagggcttgaccagtggtcacagtgactggtctgtgggcagtgaagagagcaagggatatcaggaggttattcagagcatagttcaggggcctggcaccctggggcgtgtggtggacgacaggattgctggcaaagcccccaagaagaaatccctgagtgaccccagccgccgtggggagctggctgggcctggattcgagggccctggaggggagcccatccgagaagttgagcccatgctgcctccatccagcagcgagcccatccttgtagagcagcgggcagagccagaagaacctggtgccaccaggagccgggcacagtctgaaagggccctacctgaggctctgcctccccctgccactgcccaccgaaactttcaccttgaccccaagctggctgacattctgtccccgaggctaatccgccgaggctccaagaagcgcccagctcggagtagtcaccaggagcttcggagagacgagggcagtcaggaccagactggcagcctgtctcgggcccggccctcctccagacacgttcgccatgccagtgtgcccgccacatttatgcctattgtggtgcctgagccaccaacttctgttggtccccctgtggctgtgccagaacccataggcttccctacccgagcccatcccacgttgcaggcaccatcgctcgaggacgtcaccaagcagtacatgctgaacctgcactccggtgaggtccctgccccagtgccagtggacatgccctgcttgcctctggctgcaccgccctctgctgaggccaagccccctgaggcagctcggcctgcagatgagcctacccctgccagcaagtgctgcagcaagccacaggtggacatgcggaagcacgtggccatgaccctgctggacacagagcagtcgtatgtggagtcgctgcgcaccctgatgcagggctacatgcagccgctgaagcagccagagaactccgtgctctgtgacccttcactggtggacgagatcttcgaccagatccccgagctcctggagcaccacgagcaattcctggagcaggttcggcactgcatgcagacctggcatgcccagcagaaggtgggagccctgctcgtccagtcgttctccaaggatgtcctagtaaacatctattctgcctatatcgataacttcctcaatgcaaaggatgctgtgcgtgtggccaaggaggcgaggcctgcctttctcaagttcctagagcaaagcatgcgtgagaacaaggagaagcaggcgctgtctgacctcatgatcaagcctgtgcagcggatcccacgctacgagcttctggtgaaggacctcctgaagcatacacctgaggaccacccggaccatccactcctgctggaggcgcagcggaacatcaagcaggtggctgagcgcatcaacaagggtgtgcggagtgccgaggaggcggagcgccatgcccgtgtgctgcaggagatagaggctcacatcgagggcatggaggatctccaggcccctctgcggcggttcctgagacaggagatggtcattgaagtgaaggcgatcggtggcaagaaggaccggtctctcttcctgttcacggacctcatcgtctgcaccactctgaagcgaaagtcaggctccctgcggcgcagctccatgagcctgtacacggcagccagtgtcattgacacagccagcaagtacaagatgctgtggaagctgccgctggaagacgcagacatcatcaaaggggcatcccaagccaccaatcgggagaacatccagaaggccatcagccgccttgatgaggacctcaccaccctgggccaaatgagcaagctctctgagagccttggtttcccccaccagagcctggacgatgcactgcgggacctctcagctgccatgcaccgggacctgtcggagaagcaggcgctgtgctacgcgctttccttcccgccaaccaagctggagctgtgcgccactcggcccgagggcaccgactcctacatttttgagttccctcaccctgacgcccgccttggttttgaacaggccttcgatgaggccaagaggaagctggcatccagcaaaagctgtctagaccctgagttcctgaaggccatccccatcatgaaaacccgcagtggcatgcagttctcctgtgcggctcccaccctgaacagctgcccggagccctcgcctgaggtatgggtctgcaacagcgacggctacgtgggccaggtgtgcctgctgagcctgcgcgccgagccggacgtggaggcctgcatcgccgtctgttccgcccgcatcctctgcatcggggcggtgcccgggctgcagcctcgctgccaccgggagcctcctccgtcgctgaggagtcctccagagacggcaccggagcccgccgggccggagctggacgtcgaggccgctgcagacgaggaagccgcgacgctcgcggagccggggccgcagccctgccttcacatctccattgcaggctcgggcttggagatgacgccgggcctcggcgagggtgacccccgcccagagctggtgccctttgacagtgactctgacgatgagtcttcgcccagcccctcggggacgctgcagagccaggccagccggtccaccatctcctccagctttggcaatgaggagaccccgagttccaaggaggccacggcagagaccaccagctcagaggaggagcaggagccaggcttcctgccactgtctggctcctttgggcctggtggtccctgcggcaccagcccaatggatgggagagcccttcgccgctccagccacggctccttcacccggggcagccttgaggacctgctgagtgtcgaccctgaggcctaccagagctccgtgtggctgggcactgaggatggctgtgtccacgtgtaccagtcctccgacagcatccgtgaccgcaggaacagcatgaagctccagcatgcggcctctgtgacctgcatcttgtatctgaataaccaggtgtttgtgtctctggccaatggagagcttgtggtctaccaaagggaagcaggccatttctgggacccccagaacttcaaatcagtgaccttgggcacccaggggagccccatcaccaagatggtatctgtgggtgggcggctgtggtgtggctgccagaaccgagtccttgtcctgagccctgacacgctgcagctggagcacatgttttacgtgggtcaggattcaagccgctgcgtggcttgcatggtggactccagcctgggtgtgtgggtgacattgaaaggtagtgcccacgtgtgtctctaccatccagacacctttgagcagctggcagaagtagacgtcactcctcccgtgcacaggatgctggcaggctcggatgccatcatccggcagcacaaggctgcctgtctgcgaatcacagcgctgctggtgtgtgaggagctgctgtgggtgggcaccagtgctggtgtcgtcctcaccatgcccacttcgcccggtactgtcagctgcccacgggcaccactcagtcccacaggcctcggccagggacacaccggccacgtccgcttcttggctgcagtccagctgccagatggcttcaacctgctctgcccaaccccaccacctcccccagacacaggccccgagaagctgccatcactggagcaccgggactccccttggcaccgaggccccgcccctgccaggcctaaaatgctggttatcagtggaggtgatggctatgaggacttccgactcagcagtgggggcggcagcagcagtgagactgtgggtcgagacgacagcacaaaccacctcctcctgtggagggtgtgaccctgtctgccgtggcccaggactcgcccgcccacctgccttcagcctgcttgcctctccctagcccacacgcagactttgaccaggagtatccagccaggggcacacatgtgcctgcgtgggctctgccttgtcttcgcggaagcattcctgatggaacacccactggccagccaggccatggcttctcccgaccctctggctgccccggtgcttccagtcatgatcgggtgggggacatgtgggctgaccaggacctctgaccctggagcttctaccaaagacacagctgggtctggaccccacggggctggggagggccatgtgcaatatttggagggttttctggagggcagcaggaaggctggggaattccccatgtacagtatttatgtttctttttagatgtgtaccttcccaagcacttatttatgcagtgacctggtcacctggggtgggggtgatttgaggaaatgacatgaggaaaagaaacctattcctgccctggggaccaccctgggactctaaccaagccttcctggagggacccatgcgcccctgagccccattccattcatacagacacacacgtacgcacactgcatgtccaaggccctaaacattgcccgttgacataaactttccagggccccagcctgatggggctgccctcagtcctctagatcaagatgctgactattagggggcagtgattgccatctggggacctgtcaggctttgtcatttcccagtttgttggtggtgcctttagtggttccctaatttgggaacactgatggggccttggacagggctttctctcaggtaggagaaatgggcccatgatctcctcacagtcgcccccagtccttggccctgcttccctgtgtctcatgcactggcacatatggtcaccttggagggcagacctaggagcccctctgaccactgaatccgtctccacaccccttctgccaagggaagccccttcaggaaggaccccccaaagctgaggggctgaatgtagccttttcaacagagaaggctcccacttgagagcagcctctacctgaccccctggaccacagagagccactctgaccctcagccccctcgcttcttcagctaaaactccaaaggtttggtttcagatggggtttgttttgttctgtttggttttggttttgtttggggtgggtgggtcattgcggtcttagattatgtttctcttgctaccaaacagtcatgtattaactctctttggatgatgaagtttaaagagtcaataaatagaaacaccagatgactgca

SEQ ID NO: 182198 - DNA, 6192 bp, Artificial Sequence
  derived and/or modified sequence
atggccgacggcgcccccagaccccagctgtacagaagcgtgagcttcaagctgctggagagatggagcggcggccccggcctgagagaggaggacaccgacacccccggcctgagaagaagagccagctgcagacccaccaccgccgccagaggccagcccagcagaagagtgagcaagctggccagcggccccctggccgcccccgcccagcccagacccctgagaagcctgagccccagcgtgagacagctgagcagaagattcgacgcccccagactggacgacggcagcgccggcaccagagacggcggcgtgctgcccgccgccgccgaggaggccgccgagggccccgccagaggcgcctggcccagcgtgaccgagatgagaaagctgttcggcggccccggcagcagaagacccagcgccgacagcgagagccccggcacccccagccccgacggcgccgcctgggagccccccgccagagagagcagacagccccccacccccccccccagaacctgcttccccctggccggcctgagaagcgccagacccctgaccggccccgagaccgagggcagactgagaagaccccagcagcagcaggagagagcccagagacccgccgacggcctgcacagctggcacatcttcagccagccccaggccggcgccagagccagctgcagcagcagcagcatcgccgccagctaccccgtgagcagaagcagagccgccagcagcagcgaggaggaggaggagggccccccccagctgcccggcgcccagagccccgcctaccacggcggccacagcagcggcagcgacgacgacagagacggcgagggcggccacagatggggcggcagacccggcctgagacccggcagcagcctgctggaccaggactgcagacccgacagcgacggcctgaacctgagcagcatgaacagcgccggcgtgagcggcagccccgagccccccaccagccccagagcccccagagaggagggcctgagagagtggggcagcggcagccccccctgcgtgcccggcccccaggagggcctgagacccatgagcgacagcgtgggcggcgccttcagagtggccaaggtgagcttccccagctacctggccagccccgccggcagcagaggcagcagcagatacagcagcaccgagaccctgaaggacgacgacctgtggagcagcagaggcagcggcggctggggcgtgtacagaagccccagcttcggcgccggcgagggcctgctgagaagccaggccagaaccagagccaagggccccggcggcaccagcagagccctgagagacggcggcttcgagcccgagaagagcagacagagaaagagcctgagcaaccccgacatcgccagcgagaccctgaccctgctgagcttcctgagaagcgacctgagcgagctgagagtgagaaagcccggcggcagcagcggcgacagaggcagcaaccccctggacggcagagacagccccagcgccggcggccccgtgggccagctggagcccatccccatccccgcccccgccagccccggcaccagacccaccctgaaggacctgaccgccaccctgagaagagccaagagcttcacctgcagcgagaagcccatggccagaagactgcccagaaccagcgccctgaagagcagcagcagcgagctgctgctgaccggccccggcgccgaggaggaccccctgcccctgatcgtgcaggaccagtacgtgcaggaggccagacaggtgttcgagaagatccagagaatgggcgcccagcaggacgacggcagcgacgccccccccggcagccccgactgggccggcgacgtgaccagaggccagagaagccaggaggagctgagcggccccgagagcagcctgaccgacgagggcatcggcgccgaccccgagccccccgtggccgccttctgcggcctgggcaccaccggcatgtggagacccctgagcagcagcagcgcccagaccaaccaccacggccccggcaccgaggacagcctgggcggctgggccctggtgagccccgagaccccccccacccccggcgccctgagaagaagaagaaaggtgccccccagcggcagcggcggcagcgagctgagcaacggcgaggccggcgaggcctacagaagcctgagcgaccccatcccccagagacacagagccgccaccagcgaggagcccaccggcttcagcgtggacagcaacctgctgggcagcctgagccccaagaccggcctgcccgccaccagcgccatggacgagggcctgaccagcggccacagcgactggagcgtgggcagcgaggagagcaagggctaccaggaggtgatccagagcatcgtgcagggccccggcaccctgggcagagtggtggacgacagaatcgccggcaaggcccccaagaagaagagcctgagcgaccccagcagaagaggcgagctggccggccccggcttcgagggccccggcggcgagcccatcagagaggtggagcccatgctgccccccagcagcagcgagcccatcctggtggagcagagagccgagcccgaggagcccggcgccaccagaagcagagcccagagcgagagagccctgcccgaggccctgcccccccccgccaccgcccacagaaacttccacctggaccccaagctggccgacatcctgagccccagactgatcagaagaggcagcaagaagagacccgccagaagcagccaccaggagctgagaagagacgagggcagccaggaccagaccggcagcctgagcagagccagacccagcagcagacacgtgagacacgccagcgtgcccgccaccttcatgcccatcgtggtgcccgagccccccaccagcgtgggcccccccgtggccgtgcccgagcccatcggcttccccaccagagcccaccccaccctgcaggcccccagcctggaggacgtgaccaagcagtacatgctgaacctgcacagcggcgaggtgcccgcccccgtgcccgtggacatgccctgcctgcccctggccgccccccccagcgccgaggccaagccccccgaggccgccagacccgccgacgagcccacccccgccagcaagtgctgcagcaagccccaggtggacatgagaaagcacgtggccatgaccctgctggacaccgagcagagctacgtggagagcctgagaaccctgatgcagggctacatgcagcccctgaagcagcccgagaacagcgtgctgtgcgaccccagcctggtggacgagatcttcgaccagatccccgagctgctggagcaccacgagcagttcctggagcaggtgagacactgcatgcagacctggcacgcccagcagaaggtgggcgccctgctggtgcagagcttcagcaaggacgtgctggtgaacatctacagcgcctacatcgacaacttcctgaacgccaaggacgccgtgagagtggccaaggaggccagacccgccttcctgaagttcctggagcagagcatgagagagaacaaggagaagcaggccctgagcgacctgatgatcaagcccgtgcagagaatccccagatacgagctgctggtgaaggacctgctgaagcacacccccgaggaccaccccgaccaccccctgctgctggaggcccagagaaacatcaagcaggtggccgagagaatcaacaagggcgtgagaagcgccgaggaggccgagagacacgccagagtgctgcaggagatcgaggcccacatcgagggcatggaggacctgcaggcccccctgagaagattcctgagacaggagatggtgatcgaggtgaaggccatcggcggcaagaaggacagaagcctgttcctgttcaccgacctgatcgtgtgcaccaccctgaagagaaagagcggcagcctgagaagaagcagcatgagcctgtacaccgccgccagcgtgatcgacaccgccagcaagtacaagatgctgtggaagctgcccctggaggacgccgacatcatcaagggcgccagccaggccaccaacagagagaacatccagaaggccatcagcagactggacgaggacctgaccaccctgggccagatgagcaagctgagcgagagcctgggcttcccccaccagagcctggacgacgccctgagagacctgagcgccgccatgcacagagacctgagcgagaagcaggccctgtgctacgccctgagcttcccccccaccaagctggagctgtgcgccaccagacccgagggcaccgacagctacatcttcgagttcccccaccccgacgccagactgggcttcgagcaggccttcgacgaggccaagagaaagctggccagcagcaagagctgcctggaccccgagttcctgaaggccatccccatcatgaagaccagaagcggcatgcagttcagctgcgccgcccccaccctgaacagctgccccgagcccagccccgaggtgtgggtgtgcaacagcgacggctacgtgggccaggtgtgcctgctgagcctgagagccgagcccgacgtggaggcctgcatcgccgtgtgcagcgccagaatcctgtgcatcggcgccgtgcccggcctgcagcccagatgccacagagagcccccccccagcctgagaagcccccccgagaccgcccccgagcccgccggccccgagctggacgtggaggccgccgccgacgaggaggccgccaccctggccgagcccggcccccagccctgcctgcacatcagcatcgccggcagcggcctggagatgacccccggcctgggcgagggcgaccccagacccgagctggtgcccttcgacagcgacagcgacgacgagagcagccccagccccagcggcaccctgcagagccaggccagcagaagcaccatcagcagcagcttcggcaacgaggagacccccagcagcaaggaggccaccgccgagaccaccagcagcgaggaggagcaggagcccggcttcctgcccctgagcggcagcttcggccccggcggcccctgcggcaccagccccatggacggcagagccctgagaagaagcagccacggcagcttcaccagaggcagcctggaggacctgctgagcgtggaccccgaggcctaccagagcagcgtgtggctgggcaccgaggacggctgcgtgcacgtgtaccagagcagcgacagcatcagagacagaagaaacagcatgaagctgcagcacgccgccagcgtgacctgcatcctgtacctgaacaaccaggtgttcgtgagcctggccaacggcgagctggtggtgtaccagagagaggccggccacttctgggacccccagaacttcaagagcgtgaccctgggcacccagggcagccccatcaccaagatggtgagcgtgggcggcagactgtggtgcggctgccagaacagagtgctggtgctgagccccgacaccctgcagctggagcacatgttctacgtgggccaggacagcagcagatgcgtggcctgcatggtggacagcagcctgggcgtgtgggtgaccctgaagggcagcgcccacgtgtgcctgtaccaccccgacaccttcgagcagctggccgaggtggacgtgaccccccccgtgcacagaatgctggccggcagcgacgccatcatcagacagcacaaggccgcctgcctgagaatcaccgccctgctggtgtgcgaggagctgctgtgggtgggcaccagcgccggcgtggtgctgaccatgcccaccagccccggcaccgtgagctgccccagagcccccctgagccccaccggcctgggccagggccacaccggccacgtgagattcctggccgccgtgcagctgcccgacggcttcaacctgctgtgccccacccccccccccccccccgacaccggccccgagaagctgcccagcctggagcacagagacagcccctggcacagaggccccgcccccgccagacccaagatgctggtgatcagcggcggcgacggctacgaggacttcagactgagcagcggcggcggcagcagcagcgagaccgtgggcagagacgacagcaccaaccacctgctgctgtggagagtgtag

SEQ ID NO: 182199 - protein, 810 aa, Artificial Sequence
  derived and/or modified sequence
MSKKGRNKGEKPEALIVALQAANEDLRTKLTDIQIELHQEKSKVSKLEREKTQEAKRIRELEQRKHTVLVTELKAKLHEEKMKELQAVRENLIKQHEQEMSRTVKVRDGEIQRLKSALCALRDGSSDKVRTALTIEAREEARKLFDTERLKLLQEIADLKTAKKQVDEALSNMIQADKIKAGDLRSEHQSHQEAISKIKWESERDIRRLMDEIKAKDRIIFSLEKELETQTGYVQKLQLQKEALDEQLFLVKEAECNMSSPKREIPGRAGDGSEHCSSPDLRRNQKRIAELNATIRKLEDRNTLLGDERNELLKRVRETEKQCKPLLERNKCLAKRNDELMVSLQRMEEKLKAVTKENSEMREKITSHPPLKKLKSLNDLDQANEEQETEFLKLQVIEQQNIIDELTRDREKLIRRRKHRRSSKPIKRPVLDPFIGYDEDSMDSETSSMASFRTDRTPATPDDDLDESLAAEESELRFRQLTKEYQALQRAYALLQEQTGGIIDAEREAKAQEQLQAEVLRYKAKIEDLEATLAQKGQDSHWVEDKQLFIKRNQELLEKIEKQEAENHRLQQELQDARDQNELLEFRNLELEERERRSPPFNLQIHPFSDGVSALQIYCMKEGVKDVNIPDLIKQLDILGDNGNLRNEEQVAIIQASTVLSLAEKWIQQIEGAEAALHQKMMELESDMEQFCKIKGYLEEELDYRKQALDQAYMRIQELEATLYNALQQETVIKFGELLSEKQQEELRTAVEKLRRQMLRKSREYDCQILQERMELLQQAHQRIRDLEDKTDIQKRQIKDLEEKSNRKHG

SEQ ID NO: 182200 - DNA, 2433 bp, Artificial Sequence
  derived and/or modified sequence
atgagcaagaagggcagaaacaagggcgagaagcccgaggccctgatcgtggccctgcaggccgccaacgaggacctgagaaccaagctgaccgacatccagatcgagctgcaccaggagaagagcaaggtgagcaagctggagagagagaagacccaggaggccaagagaatcagagagctggagcagagaaagcacaccgtgctggtgaccgagctgaaggccaagctgcacgaggagaagatgaaggagctgcaggccgtgagagagaacctgatcaagcagcacgagcaggagatgagcagaaccgtgaaggtgagagacggcgagatccagagactgaagagcgccctgtgcgccctgagagacggcagcagcgacaaggtgagaaccgccctgaccatcgaggccagagaggaggccagaaagctgttcgacaccgagagactgaagctgctgcaggagatcgccgacctgaagaccgccaagaagcaggtggacgaggccctgagcaacatgatccaggccgacaagatcaaggccggcgacctgagaagcgagcaccagagccaccaggaggccatcagcaagatcaagtgggagagcgagagagacatcagaagactgatggacgagatcaaggccaaggacagaatcatcttcagcctggagaaggagctggagacccagaccggctacgtgcagaagctgcagctgcagaaggaggccctggacgagcagctgttcctggtgaaggaggccgagtgcaacatgagcagccccaagagagagatccccggcagagccggcgacggcagcgagcactgcagcagccccgacctgagaagaaaccagaagagaatcgccgagctgaacgccaccatcagaaagctggaggacagaaacaccctgctgggcgacgagagaaacgagctgctgaagagagtgagagagaccgagaagcagtgcaagcccctgctggagagaaacaagtgcctggccaagagaaacgacgagctgatggtgagcctgcagagaatggaggagaagctgaaggccgtgaccaaggagaacagcgagatgagagagaagatcaccagccacccccccctgaagaagctgaagagcctgaacgacctggaccaggccaacgaggagcaggagaccgagttcctgaagctgcaggtgatcgagcagcagaacatcatcgacgagctgaccagagacagagagaagctgatcagaagaagaaagcacagaagaagcagcaagcccatcaagagacccgtgctggaccccttcatcggctacgacgaggacagcatggacagcgagaccagcagcatggccagcttcagaaccgacagaacccccgccacccccgacgacgacctggacgagagcctggccgccgaggagagcgagctgagattcagacagctgaccaaggagtaccaggccctgcagagagcctacgccctgctgcaggagcagaccggcggcatcatcgacgccgagagagaggccaaggcccaggagcagctgcaggccgaggtgctgagatacaaggccaagatcgaggacctggaggccaccctggcccagaagggccaggacagccactgggtggaggacaagcagctgttcatcaagagaaaccaggagctgctggagaagatcgagaagcaggaggccgagaaccacagactgcagcaggagctgcaggacgccagagaccagaacgagctgctggagttcagaaacctggagctggaggagagagagagaagaagcccccccttcaacctgcagatccaccccttcagcgacggcgtgagcgccctgcagatctactgcatgaaggagggcgtgaaggacgtgaacatccccgacctgatcaagcagctggacatcctgggcgacaacggcaacctgagaaacgaggagcaggtggccatcatccaggccagcaccgtgctgagcctggccgagaagtggatccagcagatcgagggcgccgaggccgccctgcaccagaagatgatggagctggagagcgacatggagcagttctgcaagatcaagggctacctggaggaggagctggactacagaaagcaggccctggaccaggcctacatgagaatccaggagctggaggccaccctgtacaacgccctgcagcaggagaccgtgatcaagttcggcgagctgctgagcgagaagcagcaggaggagctgagaaccgccgtggagaagctgagaagacagatgctgagaaagagcagagagtacgactgccagatcctgcaggagagaatggagctgctgcagcaggcccaccagagaatcagagacctggaggacaagaccgacatccagaagagacagatcaaggacctggaggagaagagcaacagaaagcacggctag

SEQ ID NO: 182201 - DNA, 2433 bp, Artificial Sequence
  derived and/or modified sequence
atgtccaaaaaaggcaggaataaaggagaaaagcccgaagccctgatcgtcgcgctacaagctgccaatgaagaccttcgtacaaagcttactgacattcagatcgagcttcatcaagaaaaatcaaaagtgagcaagctggaaagagaaaaaacccaggaggctaagcgcattcgcgaacttgagcagagaaagcatacagtcctggttaccgaactcaaggccaagctgcatgaggagaaaatgaaagaacttcaagccgttcgcgagaacctgatcaaacaacatgagcaggagatgtcaaggacggttaaagtgcgtgatggcgagatccagagactcaagtcagccttgtgcgccctgagggatggatcatctgacaaggttcggactgcactgactattgaggccagagaggaagcccgcaaattattcgacacagagcggttaaagctcctgcaagagatcgccgacctaaaaacagccaagaaacaggtcgatgaagccctcagcaatatgattcaggcggacaaaattaaggctggtgacctccgatctgagcaccaatctcaccaggaggccatttctaagatcaagtgggagtccgaacgtgatattagacggctgatggacgagatcaaagccaaggatcgaatcatctttagtcttgaaaaggaactggagacccagacaggctacgttcaaaaacttcaacttcagaaggaagccctggacgaacagttgttcctcgtaaaagaagctgaatgcaatatgtcctcgccgaagagggagatcccagggagagctggtgatggcagtgagcattgtagttctcctgaccttcgacgcaaccaaaagcgaattgcggagttaaatgccaccatccgcaagttggaagatcggaacaccctgctgggagacgaacggaacgagctgttgaagagggtccgcgagactgagaaacagtgcaagcctcttcttgagcgtaacaagtgtttagccaagagaaacgacgaactcatggtgagtttgcaaagaatggaagagaagctgaaagctgtcacgaaggagaacagtgaaatgcgtgagaagattacatctcatcctccactaaaaaaactgaaatcactaaacgacctggatcaggctaacgaggagcaggaaaccgaattcttgaaactccaggttatcgaacagcagaatattatcgacgaactgacgcgggacagagagaaattaattagaagacgaaagcacagaaggagttctaagcctattaaacgtccggttctggatccctttattggctacgacgaagatagcatggatagcgaaacctcatccatggcgtcatttcgaactgacaggacaccagccacaccagacgatgacctggacgagagccttgccgccgaggagagcgaactgaggttccgacaactgacaaaggaatatcaggcgctgcaacgggcctacgccctgctgcaggaacagacagggggaataatcgacgccgaacgcgaagctaaggctcaggaacaactgcaggctgaggtgctcagatataaagccaaaatagaagacctggaagcgactttggcgcaaaagggacaggactcccactgggtagaagacaaacagttgttcatcaagcggaaccaggagctcctcgagaagattgagaagcaagaagcagaaaaccatcgacttcaacaggagctgcaggatgcacgcgatcagaacgaactactggaatttcggaatctggagttggaggaaagagaacgtcggtctcctcctttcaatctgcagatccatcccttcagcgatggcgtgtctgccctacagatctattgcatgaaagagggagtgaaggatgtgaacatacccgacctgattaaacagcttgacatccttggagataatggtaatctccgaaacgaagagcaagtagctattattcaggccagtactgtgctgtccctggccgagaagtggattcaacagattgagggtgccgaggccgcgctgcatcagaaaatgatggagctggagagcgacatggaacagttctgtaagattaagggctatctagaggaagagctggactatcgtaaacaagctctggatcaagcttacatgcggattcaggaactggaagccacattgtataacgccttgcagcaggagacggtgattaaattcggggagctgctgtccgagaagcagcaagaagagctcagaacagccgtcgagaagctgcgccgtcagatgctgagaaaatcccgagagtatgattgccagatcctgcaggagcgcatggagctcctgcagcaagcacatcaaagaatccgtgacctggaagacaaaacagacattcagaaacggcagatcaaagacctagaggagaaaagcaatcggaaacatggatag

SEQ ID NO: 182202 - DNA, 6001 bp, Artificial Sequence
  derived and/or modified sequence
gaggaggagccagaggaggtgtctgctgcaagttcctggctgcttccgagctcaccccatcctccgagagggaggaggcccaactggtgatgctgctgctgctgctgctgccgccgccgccgcctctattgctgatactctagtggggctggaagggtggttcctattcgcaccatcgccaaccagagacagagggaaaaaaaaaaccggcagccactgctgatgttgggttcggaggctgcatccgactcggtcacaaggaaaatggattcagtttgcatctctccctcctttaaacagcttctccgggtctcagcatgggcttccagggcagcgattgaggagaccttaccaaggagcaccacacagtagatgctgagacatcgtactccaggataagaaacagtaacatggcagcacctgcttgaaagaaattaaaaaccaacagactccatttagaaaggaacaatgtccaagaaagggcgaaataagggcgagaagcccgaggcactcattgttgcccttcaagctgccaatgaagacctcaggaccaagctcacagacattcagatagagctgcatcaagagaagtccaaggtatcaaagcttgaaagagagaagactcaagaagcgaagaggattcgtgagctggagcagcgcaagcacacggtgctggtgacagaactcaaagccaagctccatgaggagaagatgaaggagctgcaggctgtgagggagaaccttatcaagcagcacgagcaggaaatgtcaaggacggtgaaggtacgtgatggagagatccagaggctcaagtctgctctctgtgctctccgcgacggcagcagtgacaaagtaaggacagcgctcaccattgaggcccgggaggaggcccggaaactgtttgacacagagcgccttaagctcttacaggaaattgcggacctgaaaacggccaagaagcaggtggacgaggctctgagcaatatgatccaagcagataaaatcaaggctggggaccttcggagtgagcatcagtcccaccaagaagccatctcgaagatcaagtgggagtcggagcgggatattcggaggctgatggatgaaatcaaagccaaggacaggatcatcttttccctggaaaaggaactggagacccagacaggctatgtacagaaactccaacttcagaaggaggctttggacgaacaactctttctggtcaaggaggctgagtgcaacatgagcagcccaaaacgagaaattccaggaagggcaggtgatggttccgaacactgcagcagtcctgatttgcgaagaaatcaaaagagaatagctgaattgaatgccactataagaaaattagaagacaggaataccttgcttggagatgaacgaaatgaactgttaaaacgtgtgcgggaaaccgaaaagcaatgtaaacctctcctggaaaggaacaagtgcctcgccaagagaaacgatgaactgatggtgtccttgcagcgcatggaagaaaaactaaaagccgttaccaaggaaaattcagaaatgagagaaaaaataacatcccatccacccctgaagaaattaaaatctctgaatgacctcgaccaagctaatgaagaacaagaaacagagtttctaaaacttcaggtcattgagcaacagaacattattgatgagctcacaagggaccgagaaaagctcatccgtagaagaaagcatagaagaagttccaagccaattaagaggcctgttttggacccgtttattggctatgatgaggactctatggattcagagacatcatccatggcctcatttagaacagacagaacaccagctactcctgatgatgacttggatgaaagtttagcagctgaagaatctgaactaagatttcgacaattaacaaaagaatatcaggccctccaaagagcatatgccctcctacaggagcagacgggaggcatcatcgacgctgaacgagaagccaaggctcaagaacagctccaagcagaggtgctaaggtataaagccaaaattgaagacctggaagcgactctggctcagaaagggcaggattcacactgggtagaagataaacaacttttcattaagagaaaccaggagcttttagaaaagatagaaaaacaggaggcagaaaatcaccggttacaacaagaactacaggacgccagagaccagaatgagctgctggagtttcgaaacctagagctagaagagagagagagacgatcccctccatttaatctccaaattcacccattctcagatggtgtgagtgctctacagatctactgtatgaaagaaggtgttaaggatgtgaacatccctgatctcataaagcagcttgatatcttgggtgataatgggaatttaagaaatgaagaacaagtggccataattcaggccagcactgtgctgtccctggcagagaagtggatccagcagattgaaggagctgaggctgccctacaccagaaaatgatggaattggaaagtgacatggaacagttctgcaaaataaaaggctatctggaggaagaactagactacagaaaacaagctcttgaccaagcatatatgagaatccaggaactagaagctactttgtacaatgctctacagcaagaaactgttatcaagtttggtgaattattaagtgaaaaacagcaagaggagctgaggacggcagtagaaaagttacggcggcaaatgctgaggaagagcagagagtatgactgtcagattcttcaggagagaatggagctcttacagcaagcccatcagagaattcgtgacttagaagataaaacagacatccagaaaagacaaataaaagacttagaagaaaagagtaaccgaaaacatggataagatcccaggaagacaagtgcttctaaaccttcaaagatggcaaaattgtttacaccagtgagagggagatcaaaagctaagaactaccctgtagccaggactacaactgtgtattttaaagccattattcaaggtttcttacttgacagttcctacacaaccctgttgaaaatctacaatatatgctgcatttaatgaaacatgtatatgtcaaatcagaagagaagaactataaacatatattgtgtaaagaaaaagttcagcaatggaactagtttctgcagatcaagcaaagatgtgtcttgggcatggaaccaaagttacaatgaaatattcaacccctgctgtgcaggggggtcattttaatgtaacaccacaccccatggaaacactagtcctgataataaacatcattttaaaagatcaaaacaaacaaacaaaaaaaacaagggtgggtggggagtgaagcacgaggaatacctatgaagagctatttacaataaaatgtttcatttgaaaagtctggtttcttactacagggatttgcttttctgtctttatgattgttttaaactcaggaacagagacatccgcatcgtaaatgggaagaaaaacactctctgttttgtttttctgcaaaaggtggagcttgtggaattcattccacagacgacagatgagaagtggatcacagtgaccacaacaaaactggtaacgaagtcaaaggacccgagcgaatgtgacatgtgaaataaaagcagattcgatgcttccttgtcctactctcacatctgcattcctctatcaacaatggactgatctcattcatattgaaaactaagaagatgatactgtaaatcacatgctccctgacttagttctgtttagaacgccaacatctatagggaacatgggccagagagcatctctgaatctttcatttccaaaatactgtttttcaaatggctgcttaaaattgcctgcaaatgaatatgctatatgatttgggcaaaaacacagcagaatcaatgagtaaatttctaccaagagtcgggtttgccacagagatgtgaatattaaactaaactattattttttaaagaatcctcacatgcctagagcattctgacctcttcttgtttagagtgataacattttttcccagacagatgacagcaacaagatagctctacttttttatatggaaataacattatgttactgacaaggtcattttctaccagagacaattagaggactggtacttttcctaagttgtgtattactgagtcttggagtcatctctgagagcaaatgtatgttcctgaaaagctaattttacacctcatttactgtagataacagaacaacctcaatttttcaaatttttgaagttttatttatggggctagaattcccatgcatagagaatatgtgtagggagccagaaactctttctatgaaatgctatacaaatctttccatatgtgggttcactatcatccttcagttttagcactggcatttgcaaagccagaacaataactgaagaatgtacaataaaaactagaatgctggggtcccactttttgttcttacatttactgctgacccaggtatctttggcccagtcacttaacctctctgtgcctcagtttcctcatctgcaaaatggggttaaaatgctttttcataaagttttatttgcaattttagaacaagaggtgcttaaagtagcacaatgtgctttgtaattattacaagtgctgtattatttgactttcttgtgttgttgacaaaaagattccctcatgtaataaaatagtgcttcagtttggttaaatttaagcactatagcactgaagcttgcttatcaagctacttgggacattattagcaataaaaattgagagattcaaaaccaggatctttaataatctataggaaatagatcatctcatgctattgaacaagatagaagagtgtgtcatttctatgataagcatctcccagctctcttgattgcatatgcatgccatcatacagaaccccacttttaccacaggagagccagtcattaaacaaaggcttggagcaaactgacagtatcacataattagcttgattatcttttattctggaggaaagccaggtggtatgccctactgggaagatacaaaacagactatcctgctgtattcttttttttttttttttttgagatggagtcttgctctgttgcccatgctggagtgcattggcacaatctcggctcatggcaagctccacctcctggattcaagtgattctcctgcctcaacctccctagtagctgggattacaggtgcacaccaccacacctggctaatttttgtatttttagtagagacagggtttcactatgctggtcaggctggtctcgaactcctgacctcaagtgatctgcctgcctcagcctcccaaagtgctaggattacaggtgtaagccactgtgcccggcctcctgctggattctttattcaactaggtaggttccagattaaatatgagccatatgctcattaggcaagaaatgtgaaagagggtgcctctacagtgttggtgacccaacactagccaacttgagtcagaaaatatggaagaggataaattactctcacatatctaagacttttccatttttcttcactttctgttgcagggcccatatgagtaaatctatattccgtctgctccaacacacaccttccttctcttaattttgctttcccacccaccaagaaatttgtaagtcaaaatttatttccatgagtaactatttctaaatgattgaaaatttttgaaaaagtggtatggtttatatacctaatctgcttatctgctataagtcatatgagaacaacagctaggatgattgtccaagcagctttagatgtgtttagggccaggcaaaaggtttgcttgttttttctttttgcttaagatctgggagattagcaaatttctcaagactatagactgaactgtaatttttaccaactcttgctcatgagcctcaaaatgaatatatccttgaataaagtataaatatttcaataga

SEQ ID NO: 182203 - DNA, 2433 bp, Artificial Sequence
  derived and/or modified sequence
atgagcaagaagggcaggaacaagggggagaagccagaggccctgattgtggccctgcaggccgccaatgaagacctgcggaccaagctgacagacatccagatcgagctgcaccaggagaagagcaaggtgtccaagctggagcgggagaagacccaggaggccaagaggatccgggagctggagcagaggaagcacacagtgctggtgacagagctgaaggccaagctgcacgaggagaagatgaaggagctgcaggccgtgcgggagaacctgatcaagcagcacgagcaggagatgagcaggacagtgaaggtgagagatggagagatccagaggctgaagagcgccctgtgtgccctgagagatggcagcagtgacaaggtgaggacagccctgaccatcgaggcccgggaggaggccaggaagctgtttgacacagagcggctgaagctgctgcaggagattgctgacctgaagacagccaagaagcaggtggatgaggccctgagcaacatgatccaggccgacaagatcaaggccggggacctgcggtctgagcaccagagccaccaggaggccatcagcaagatcaagtgggagagcgagcgggacatccggcggctgatggatgagatcaaggccaaggaccgcatcatcttcagcctggagaaggagctggagacccagacaggctacgtgcagaagctgcagctgcagaaggaggccctggatgagcagctgttcctggtgaaggaggccgagtgcaacatgagcagccccaagcgggagatccctggccgggctggagatggcagcgagcactgcagcagcccagacctgcggaggaaccagaagagaattgctgagctgaatgccaccatcaggaagctggaggacaggaacaccctgctgggagatgaaagaaatgagctgctgaagagggtgcgggagacagagaagcagtgcaagcccctgctggagaggaacaagtgcctggccaagagaaatgatgagctgatggtgtccctgcagaggatggaggagaagctgaaggctgtgaccaaggaaaattctgagatgagggagaagatcaccagccacccccccctgaagaagctgaagagcctgaatgacctggaccaggccaatgaggagcaggagacagagttcctgaagctgcaggtgattgagcagcagaacatcattgatgagctgacccgggaccgggagaagctgatcagaagaaggaagcaccggcgcagcagcaagcccatcaagaggcctgtgctggaccccttcatcggctatgatgaagattccatggacagcgagaccagctccatggccagcttcagaacagacaggaccccagccaccccagatgatgacctggatgagagcctggccgctgaggagagcgagctgcgcttccggcagctgaccaaggagtaccaggccctgcagagggcctatgccctgctgcaggagcagacaggaggcatcattgatgctgagcgggaggccaaggcccaggagcagctgcaggccgaggtgctgcgctacaaggccaagattgaggacctggaggccaccctggcccagaagggccaggacagccactgggtggaggacaagcagctgttcatcaagaggaaccaggagctgctggagaagattgagaagcaggaggccgagaaccaccggctgcagcaggagctgcaggatgcccgggaccagaatgagctgctggagttcaggaacctggagctggaggagcgggagcggcgcagcccccccttcaacctgcagatccaccccttcagtgatggagtgtctgccctgcagatctactgcatgaaggagggcgtgaaggatgtgaacatcccagacctgatcaagcagctggacatcctgggggacaatggaaacctgagaaatgaggagcaggtggccatcatccaggccagcacagtgctgagcctggccgagaagtggatccagcagatcgagggcgctgaggccgccctgcaccagaagatgatggagctggagagtgacatggagcagttctgcaagatcaagggctacctggaggaggagctggactacaggaagcaggccctggaccaggcctacatgaggatccaggagctggaggccaccctgtacaatgccctgcagcaggagaccgtcatcaagtttggagagctgctgtctgagaagcagcaggaggagctgaggacagctgtggagaagctgcggcggcagatgctgaggaagagccgggagtatgactgccagatcctgcaggagaggatggagctgctgcagcaggcccaccagaggatccgggacctggaggacaagacagacatccagaagaggcagatcaaggacctggaggagaagagcaacaggaagcatggatag

SEQ ID NO: 182204 - DNA, 2433 bp, Artificial Sequence
  derived and/or modified sequence
atgagcaagaagggccggaacaagggcgagaagcccgaggccctgattgtcgcactacaggccgcgaatgaggaccttagaaccaagttgactgatatacagatagaacttcaccaggagaagtccaaggtgagtaagctggaaagagaaaagactcaggaggccaagcgcattcgcgagctcgagcagagaaaacataccgttttagtgaccgagctgaaggccaaattacacgaggagaaaatgaaagagctccaggccgtgcgagagaacctcatcaagcagcacgagcaagaaatgtctcgcaccgtgaaggttcgggacggtgaaattcagcggcttaaatctgcgctgtgtgctctccgtgatggaagctccgataaggtgcgaactgccctgaccatagaggccagagaggaggccaggaagttgttcgatactgagagattgaagctgctgcaggagatagccgacttaaaaactgccaagaaacaggtggacgaagccttgtcaaatatgatccaggccgacaaaattaaagccggtgatctccgctctgagcaccagtcacaccaggaggccatctctaaaattaagtgggagtccgaacgagacatccgtaggctgatggacgagattaaggccaaggaccgcattatctttagcctcgaaaaagagcttgaaacacagacaggatacgtgcagaaattgcagcttcagaaagaggctcttgacgagcagctgttcctggtgaaggaggccgaatgtaatatgtccagccccaaaagagagatccccggcagagccggggacggatctgagcactgctcaagtccggatctaagacgaaatcaaaagcgcatcgcggaactcaatgccactatacgaaagctagaagatcgaaacaccctgttgggcgatgaacgaaacgaactcctgaaaagagttcgagagaccgagaagcagtgcaaaccgctgcttgaaagaaacaaatgccttgctaagcgaaacgatgaattgatggtgtctctccagaggatggaagaaaaattgaaggcagtgaccaaagaaaacagcgaaatgcgcgaaaagattacctctcatcccccactgaagaaactgaagtctctgaatgacctagatcaagctaatgaggagcaagagacagagttcctgaagctgcaggtcattgagcaacagaatattatcgacgaattaaccagggacagagagaagctgattcggagaagaaagcatagacgcagctccaagcctatcaaaaggccggtgctcgatcccttcatcggatacgacgaagactctatggacagtgaaacaagctcaatggctagctttcgcaccgacaggactcccgcaacgcctgatgatgacctggatgagagcctggcggcagaggagtcagaattgagattccgccagctgacaaaagagtatcaggcactgcagagggcctacgccttgcttcaggaacagacgggaggcattatcgacgcagaaagggaggctaaagcacaggagcaactgcaagcggaggtactcaggtataaagccaaaattgaggacctagaggcaacacttgctcaaaagggtcaggactcccattgggtagaagacaaacagctcttcattaagagaaaccaggaactgttggagaaaatcgagaaacaggaagctgagaatcatcggctgcaacaggagttacaggacgcccgggaccagaatgagctcctagaatttaggaacttggagctcgaagagcgggaacgacgatctccacccttcaacctgcagatacatccattcagcgacggagtgtctgctctgcagatctactgcatgaaagagggtgtaaaggacgtgaatattcccgatctgataaagcagctagacatactcggggataatggtaatctaaggaatgaggaacaggtggcaattatccaggcatccaccgtactaagcctcgctgagaagtggatccaacagattgagggggccgaggccgctttacatcaaaaaatgatggagctggagtctgacatggagcaattttgcaagatcaaaggatacctggaggaagagctcgactaccgcaagcaggcactggatcaggcctacatgcggatccaggagctggaggccaccttatataacgctctgcagcaggaaacggtcattaaattcggcgagttacttagtgagaagcagcaggaggagctgagaaccgccgtggaaaagttgagacgccagatgcttagaaagtccagggaatacgattgccaaatacttcaggaacggatggaacttctgcagcaggcccatcagcgcatcagggacctggaagacaaaacggatattcagaagagacagataaaagacctggaagagaagtcgaacaggaagcacggctag

SEQ ID NO: 182205 - DNA, 2433 bp, Artificial Sequence
  derived and/or modified sequence
atgtctaagaaagggagaaacaagggcgagaagcctgaagcactgattgtggcactccaggccgctaacgaagatttgagaaccaaactcactgatatccagattgaactgcatcaagagaagtctaaggtgtcaaagctggagcgtgaaaagacacaggaggccaaaaggattagggaactggagcagcgcaagcacacagtactggttacagagctgaaggcaaagcttcatgaggagaagatgaaggaactgcaagcggtccgggaaaatctcattaagcagcacgagcaggagatgtcccgaaccgtgaaagttagggacggcgagatccagaggctgaaatctgctctttgtgccctgcgggatggcagctccgataaagtcaggacagctctcacaatcgaggctagggaggaggctaggaaactgttcgatacagaacggttgaaactcctgcaggaaatagctgacctcaagactgcaaaaaaacaggtggatgaagccctgagtaatatgatccaggctgataaaatcaaagcaggggatctccgcagtgagcaccagagccatcaggaggccatctcaaagattaagtgggaaagcgaacgtgatataagaaggctcatggatgagatcaaagctaaggacagaattatcttcagtctggagaaagagctggaaactcagaccggctacgtccaaaagcttcagctgcagaaggaggcccttgacgagcaattgttccttgtaaaggaggcagagtgtaatatgagtagcccaaagagagagatccctgggagagctggagacggctctgaacattgttcgtctcccgatctgcgtagaaaccagaagcgtatcgcagagctgaatgcgaccattcgtaaactggaagatcgcaacaccctgctgggcgatgaaaggaatgaattgctgaaacgtgtcagggaaaccgaaaagcagtgcaaacctctgctggagaggaataaatgtctcgccaagcgcaacgatgagctcatggtttccctgcagcgaatggaagaaaagcttaaagccgtcacaaaggaaaatagcgagatgcgtgagaaaatcacgagtcacccacccctcaagaaattaaagagtctgaacgacctcgaccaggctaatgaggagcaagaaacagagttcctgaaattacaggttatcgagcagcagaacattatcgacgagctgacacgcgatcgcgagaagctgattcggcgacgcaagcatcggcgatcctctaaacctataaagaggcccgtactggaccccttcatcggctacgacgaagactcaatggattccgaaaccagttccatggcttcattccggaccgacaggacgccggcaacccccgacgatgatctggatgagtcactcgctgccgaggaaagcgagctgaggtttaggcagctgacgaaggagtaccaggctctgcagcgcgcttatgcactgttgcaagagcagaccggcggtatcattgatgcggaaagagaggcgaaggcccaagaacagttgcaggctgaggttcttagatacaaggccaaaatcgaggacctcgaagcaaccctggctcaaaaagggcaggattcccactgggtagaggacaaacagctgttcatcaaacgaaatcaagagcttttagagaagattgaaaagcaggaagcggagaatcacagattacagcaggaactccaggacgctcgggaccaaaatgaactgcttgagttccggaacctggagttagaggaacgggagcggagatctcctccatttaaccttcagatccaccccttttcagatggggtgtctgccctgcagatctactgcatgaaggagggagtcaaggacgttaacattcctgatctgattaagcagctggacatccttggggataacggaaatttgcgtaacgaggaacaggtcgcaatcattcaggcatccaccgtcctctccctggctgaaaagtggatccaacaaatcgaaggggctgaagccgcacttcatcagaagatgatggagctggagtccgacatggagcagttctgtaaaatcaaaggctacctggaggaggagcttgactacaggaagcaggcactggaccaagcttatatgcgcattcaagagctggaggccactctgtacaatgccttacagcaagagacagtcatcaagttcggcgagctgctgagcgaaaaacagcaggaggaattgcgcactgctgtcgagaagcttagaagacagatgctgagaaaatcaagagaatacgactgtcagatcctgcaggaaaggatggagctcttgcagcaagcccatcagcggatccgcgatcttgaggacaaaaccgacatccagaagagacagatcaaggatcttgaggaaaagagcaacaggaaacacggctag

SEQ ID NO: 182206 - protein, 651 aa, Artificial Sequence
  derived and/or modified sequence
MKDYDELLKYYELHETIGTGGFAKVKLACHILTGEMVAIKIMDKNTLGSDLPRIKTEIEALKNLRHQHICQLYHVLETANKIFMVLEYCPGGELFDYIISQDRLSEEETRVVFRQIVSAVAYVHSQGYAHRDLKPENLLFDEYHKLKLIDFGLCAKPKGNKDYHLQTCCGSLAYAAPELIQGKSYLGSEADVWSMGILLYVLMCGFLPFDDDNVMALYKKIMRGKYDVPKWLSPSSILLLQQMLQVDPKKRISMKNLLNHPWIMQDYNYPVEWQSKNPFIHLDDDCVTELSVHHRNNRQTMEDLISLWQYDHLTATYLLLLAKKARGKPVRLRLSSFSCGQASATPFTDIKSNNWSLEDVTASDKNYVAGLIDYDWCEDDLSTGAATPRTSQFTKYWTESNGVESKSLTPALCRTPANKLKNKENVYTPKSAVKNEEYFMFPEPKTPVNKNQHKREILTTPNRYTTPSKARNQCLKETPIKIPVNSTGTDKLMTGVISPERRCRSVELDLNQAHMEETPKRKGAKVFGSLERGLDKVITVLTRSKRKGSARDGPRRLKLHYNVTTTRLVNPDQLLNEIMSILPKKHVDFVQKGYTLKCQTQSDFGKVTMQFELEVCQLQKPDVVGIRRQRLKGDAWVYKRLVEDILSSCKV

SEQ ID NO: 182207 - protein, 457 aa, Artificial Sequence
  derived and/or modified sequence
MGILLYVLMCGFLPFDDDNVMALYKKIMRGKYDVPKWLSPSSILLLQQMLQVDPKKRISMKNLLNHPWIMQDYNYPVEWQSKNPFIHLDDDCVTELSVHHRNNRQTMEDLISLWQYDHLTATYLLLLAKKARGKPVRLRLSSFSCGQASATPFTDIKSNNWSLEDVTASDKNYVAGLIDYDWCEDDLSTGAATPRTSQFTKYWTESNGVESKSLTPALCRTPANKLKNKENVYTPKSAVKNEEYFMFPEPKTPVNKNQHKREILTTPNRYTTPSKARNQCLKETPIKIPVNSTGTDKLMTGVISPERRCRSVELDLNQAHMEETPKRKGAKVFGSLERGLDKVITVLTRSKRKGSARDGPRRLKLHYNVTTTRLVNPDQLLNEIMSILPKKHVDFVQKGYTLKCQTQSDFGKVTMQFELEVCQLQKPDVVGIRRQRLKGDAWVYKRLVEDILSSCKV

SEQ ID NO: 182208 - DNA, 1956 bp, Artificial Sequence
  derived and/or modified sequence
atgaaggactatgatgaactgctgaagtattacgaattacacgagaccattggaactggcggtttcgcaaaggtaaaattggcttgccacatcctgacaggtgagatggtcgcgatcaaaatcatggataaaaataccctgggatctgacttgcctcgaatcaagaccgagattgaggcgttaaagaacctccgccaccagcatatatgtcagctgtaccacgtgctcgagactgccaataaaatcttcatggtgctggaatactgtccaggcggtgaattgtttgactatatcatcagtcaggaccgactaagcgaagaggagaccagagtggtgtttcggcagattgtgagtgcagttgcctatgttcactcccaagggtacgcccatcgcgacttaaaaccagagaatctgctttttgacgagtatcataagctcaaactgatagactttggtctgtgcgccaaacctaaaggcaacaaggattaccacttgcaaacatgttgcgggtcactcgcatatgccgccccagagctgatacagggtaagtcttaccttggtagtgaggcagacgtttggagcatggggatcctgctctatgtgctaatgtgtggcttcctcccctttgatgacgataacgtcatggcgttgtacaagaagataatgcgcggaaaatacgacgtcccgaaatggcttagcccctcaagcatactcctgcttcaacagatgcttcaggtggacccgaagaaacgaatctcaatgaaaaacctcctgaatcacccatggatcatgcaagattacaattatccggtggaatggcagagtaagaatccatttatccatctggacgatgattgtgtaactgaactgtccgtacaccacaggaacaatcgccagaccatggaggatctcatttccctttggcagtacgaccacctgacagccacctacctgctattattagcgaagaaagcccgggggaagccagtcagactgagactctcctctttctcctgtgggcaagctagtgcaacgccctttaccgacatcaaatccaataattggagcctggaagatgttactgcgagcgataagaactacgtcgccgggctgatagactacgactggtgcgaagatgacctctccaccggcgctgccacgccacggaccagccaattcactaaatattggacagagtccaacggcgttgaaagcaaatctctcacccccgccctgtgcagaacccccgcaaacaagttgaaaaacaaggaaaatgtgtacacacctaagtctgccgtcaaaaatgaagaatatttcatgtttccagagcccaagacgcctgtgaataaaaaccagcataaaagagagatcttaacaacaccgaaccggtatactactccatcaaaagccagaaaccagtgcctgaaggagacgccaatcaaaattccggtgaactcaactgggactgacaagttgatgaccggggtgatctctccagagcggcgctgccgtagcgtggaactggatcttaaccaggcccatatggaggagactcctaagcgcaagggtgcaaaagtgttcggttctttggaaagaggcctagataaggtgattaccgtgctcaccaggtccaaacgaaaaggatccgcccgcgacggcccccggaggcttaagttacactacaacgtaacgactacaaggttggtgaaccctgaccaattgctgaatgaaatcatgtcaatactgccaaaaaagcatgtagattttgtccagaagggatacaccctgaagtgccagacacagtcagacttcgggaaggtaaccatgcagttcgagctcgaggtgtgccagctgcaaaagccagacgtggtcggtatacgaagacagcgcttaaagggtgatgcctgggtgtataagagactggtcgaggacattctctcttcatgtaaagtgtag

SEQ ID NO: 182209 - DNA, 1374 bp, Artificial Sequence
  derived and/or modified sequence
atgggcattctcctctacgttctaatgtgtggatttttaccttttgacgatgacaacgttatggcactatataagaaaattatgagagggaagtatgacgtgcctaaatggttgagcccctctagcattcttctcttgcagcagatgctgcaagtggacccgaagaagcggattagtatgaagaacctgctgaatcacccatggatcatgcaggattataattatcccgtggaatggcagtctaaaaacccctttattcacctcgatgacgactgtgtgacagagcttagcgtgcaccaccgcaacaataggcaaaccatggaggacctcatatctctgtggcaatatgaccatctgactgccacctacttgttgctgcttgccaaaaaggcacgcggtaagcctgtccgactgcggttatcaagtttttcttgtgggcaggcgtctgcgactccgttcaccgatattaagagtaataactggagcttggaagatgtgaccgctagcgataagaactacgtggccggtttaattgactacgattggtgtgaggatgatctgagcacgggggcggcgacaccccgcactagccagtttacgaagtattggacagagagcaacggagtagaatcaaagtctctgaccccagccctttgccgaacaccagccaacaaactgaagaataaggagaacgtttacactcctaagtctgccgttaaaaatgaagaatactttatgtttccggagcccaagactcctgttaataaaaaccagcataagcgggagatcctcaccacacccaatcgatataccacgccttctaaggccaggaaccagtgcctcaaggagactccgattaaaatccccgtgaattccactggtaccgacaaactgatgactggcgtgatttctcccgagagaagatgtagaagcgtggagctggatctgaaccaagcccacatggaggaaacccccaagcgtaaaggagccaaagtctttggctcactggagagaggattggacaaggtgatcaccgtcctgacaagaagcaagcgaaaggggagtgcgcgggacggacccagacgcttgaaattgcactacaatgttacaaccaccagactggtcaaccctgatcagttgttgaacgagatcatgagtatactgccgaagaaacatgttgattttgtccagaagggctacactctaaagtgtcagacacagagtgacttcgggaaagtgacaatgcagtttgaacttgaagtgtgtcaactccaaaagccagatgtggtcggcatacggaggcagcggctgaaaggtgacgcctgggtatacaagcgtctcgtggaagacatcctcagcagctgtaaggtgtag

SEQ ID NO: 182210 - DNA, 1956 bp, Artificial Sequence
  derived and/or modified sequence
atgaaggactatgatgagctgctgaagtactatgagctgcacgagaccatcggcactggaggctttgccaaggtgaagctggcctgccacatcctgactggagagatggtggccatcaagatcatggacaagaacaccctgggcagtgacctgccccgcatcaagacagaaattgaggccctgaagaacctgcggcaccagcacatctgccagctgtaccacgtgctggagacagccaacaagatcttcatggtgctggagtactgccctggaggagagctgtttgactacatcatcagccaggaccggctgtctgaggaggagaccagggtggtgttccggcagatcgtgtctgctgtggcctacgtgcacagccagggctacgcccaccgggacctgaagccagagaacctgctgtttgatgagtaccacaagctgaagctgattgactttggcctgtgtgccaagcccaagggcaacaaggactaccacctgcagacctgctgcggcagcctggcctatgctgcccctgagctgatccagggcaagagctacctgggcagcgaggctgatgtgtggagcatgggcatcctgctgtatgtgctgatgtgtggcttcctgccctttgatgatgacaacgtgatggccctgtacaagaagatcatgaggggcaagtatgatgtgcccaagtggctgagccccagcagcatcctgctgctgcagcagatgctgcaggtggaccccaagaagaggatctccatgaagaacctgctgaaccacccctggatcatgcaggactacaactaccctgtggagtggcagagcaagaaccccttcatccacctggatgatgactgtgtgacagagctgtctgtgcaccacaggaacaaccggcagaccatggaggacctgatcagcctgtggcagtatgaccacctgacagccacctacctgctgctgctggccaagaaggcccggggcaagcctgtgcggctgcggctgagcagcttcagctgtggccaggccagcgccacccccttcacagacatcaagagcaacaactggagcctggaggatgtgacagccagtgacaagaactacgtggccggcctgattgattatgactggtgtgaagatgacctgagcactggagctgccacccccaggaccagccagttcaccaagtactggacagagagcaatggagtggagagcaagagcctgaccccagccctgtgcaggaccccagccaacaagctgaagaacaaggaaaatgtgtacacccccaagtctgctgtgaagaatgaggagtacttcatgtttcctgagcccaagacccctgtgaacaagaaccagcacaagcgggagatcctgaccacccccaaccgctacaccacccccagcaaggccaggaaccagtgcctgaaggagacccccatcaagatccctgtgaacagcactggaacagacaagctgatgactggagtcatcagccctgagcggcgctgccgctctgtggagctggacctgaaccaggcccacatggaggagacccccaagaggaagggggccaaggtgtttggcagcctggagcggggcctggacaaggtgatcaccgtgctgaccaggagcaagaggaaaggaagtgccagagatggcccccggcggctgaagctgcactacaacgtgaccaccacccggctggtgaacccagaccagctgctgaatgagatcatgagcatcctgcccaagaagcacgtggactttgtgcagaagggctacaccctgaagtgccagacccagagcgactttgggaaggtgaccatgcagtttgagctggaggtgtgccagctgcagaagccagatgtggtgggcatccggcggcagaggctgaagggagatgcctgggtgtacaagaggctggtggaggacatcctgagcagctgcaaggtgtag

SEQ ID NO: 182211 - DNA, 1374 bp, Artificial Sequence
  derived and/or modified sequence
atgggcatcctgctgtatgtgctgatgtgtggcttcctgccctttgatgatgacaacgtgatggccctgtacaagaagatcatgaggggcaagtatgatgtgcccaagtggctgagccccagcagcatcctgctgctgcagcagatgctgcaggtggaccccaagaagaggatctccatgaagaacctgctgaaccacccctggatcatgcaggactacaactaccctgtggagtggcagagcaagaaccccttcatccacctggatgatgactgtgtgacagagctgtctgtgcaccacaggaacaaccggcagaccatggaggacctgatcagcctgtggcagtatgaccacctgacagccacctacctgctgctgctggccaagaaggcccggggcaagcctgtgcggctgcggctgagcagcttcagctgtggccaggccagcgccacccccttcacagacatcaagagcaacaactggagcctggaggatgtgacagccagtgacaagaactacgtggccggcctgattgattatgactggtgtgaagatgacctgagcactggagctgccacccccaggaccagccagttcaccaagtactggacagagagcaatggagtggagagcaagagcctgaccccagccctgtgcaggaccccagccaacaagctgaagaacaaggaaaatgtgtacacccccaagtctgctgtgaagaatgaggagtacttcatgtttcctgagcccaagacccctgtgaacaagaaccagcacaagcgggagatcctgaccacccccaaccgctacaccacccccagcaaggccaggaaccagtgcctgaaggagacccccatcaagatccctgtgaacagcactggaacagacaagctgatgactggagtcatcagccctgagcggcgctgccgctctgtggagctggacctgaaccaggcccacatggaggagacccccaagaggaagggggccaaggtgtttggcagcctggagcggggcctggacaaggtgatcaccgtgctgaccaggagcaagaggaaaggaagtgccagagatggcccccggcggctgaagctgcactacaacgtgaccaccacccggctggtgaacccagaccagctgctgaatgagatcatgagcatcctgcccaagaagcacgtggactttgtgcagaagggctacaccctgaagtgccagacccagagcgactttgggaaggtgaccatgcagtttgagctggaggtgtgccagctgcagaagccagatgtggtgggcatccggcggcagaggctgaagggagatgcctgggtgtacaagaggctggtggaggacatcctgagcagctgcaaggtgtag

SEQ ID NO: 182212 - DNA, 2309 bp, Artificial Sequence
  derived and/or modified sequence
gagatttgattcccttggcgggcggaagcggccacaacccggcgatcgaaaagattcttaggaacgccgtaccagccgcgtctctcaggacagcaggcccctgtccttctgtcgggcgccgctcagccgtgccctccgcccctcaggttctttttctaattccaaataaacttgcaagaggactatgaaagattatgatgaacttctcaaatattatgaattacatgaaactattgggacaggtggctttgcaaaggtcaaacttgcctgccatatccttactggagagatggtagctataaaaatcatggataaaaacacactagggagtgatttgccccggatcaaaacggagattgaggccttgaagaacctgagacatcagcatatatgtcaactctaccatgtgctagagacagccaacaaaatattcatggttcttgagtactgccctggaggagagctgtttgactatataatttcccaggatcgcctgtcagaagaggagacccgggttgtcttccgtcagatagtatctgctgttgcttatgtgcacagccagggctatgctcacagggacctcaagccagaaaatttgctgtttgatgaatatcataaattaaagctgattgactttggtctctgtgcaaaacccaagggtaacaaggattaccatctacagacatgctgtgggagtctggcttatgcagcacctgagttaatacaaggcaaatcatatcttggatcagaggcagatgtttggagcatgggcatactgttatatgttcttatgtgtggatttctaccatttgatgatgataatgtaatggctttatacaagaagattatgagaggaaaatatgatgttcccaagtggctctctcccagtagcattctgcttcttcaacaaatgctgcaggtggacccaaagaaacggatttctatgaaaaatctattgaaccatccctggatcatgcaagattacaactatcctgttgagtggcaaagcaagaatccttttattcacctcgatgatgattgcgtaacagaactttctgtacatcacagaaacaacaggcaaacaatggaggatttaatttcactgtggcagtatgatcacctcacggctacctatcttctgcttctagccaagaaggctcggggaaaaccagttcgtttaaggctttcttctttctcctgtggacaagccagtgctaccccattcacagacatcaagtcaaataattggagtctggaagatgtgaccgcaagtgataaaaattatgtggcgggattaatagactatgattggtgtgaagatgatttatcaacaggtgctgctactccccgaacatcacagtttaccaagtactggacagaatcaaatggggtggaatctaaatcattaactccagccttatgcagaacacctgcaaataaattaaagaacaaagaaaatgtatatactcctaagtctgctgtaaagaatgaagagtactttatgtttcctgagccaaagactccagttaataagaaccagcataagagagaaatactcactacgccaaatcgttacactacaccctcaaaagctagaaaccagtgcctgaaagaaactccaattaaaataccagtaaattcaacaggaacagacaagttaatgacaggtgtcattagccctgagaggcggtgccgctcagtggaattggatctcaaccaagcacatatggaggagactccaaaaagaaagggagccaaagtgtttgggagccttgaaagggggttggataaggttatcactgtgctcaccaggagcaaaaggaagggttctgccagagacgggcccagaagactaaagcttcactataacgtgactacaactagattagtgaatccagatcaactgttgaatgaaataatgtctattcttccaaagaagcatgttgactttgtacaaaagggttatacactgaagtgtcaaacacagtcagattttgggaaagtgacaatgcaatttgaattagaagtgtgccagcttcaaaaacccgatgtggtgggtatcaggaggcagcggcttaagggcgatgcctgggtttacaaaagattagtggaagacatcctatctagctgcaaggtataattgatggattcttccatcctgccggatgagtgtgggtgtgatacagcctacataaagactgttatgatcgctttgattttaaagttcattggaactaccaacttgtttctaaagagctatcttaagaccaatatctctttgtttttaaacaaaagatattattttgtgt

SEQ ID NO: 182213 - DNA, 1956 bp, Artificial Sequence
  derived and/or modified sequence
atgaaggactacgacgagctgctgaagtactacgagctgcacgagaccattgggaccggaggcttcgccaaagttaaactggcgtgccatatccttactggcgagatggtcgctatcaagataatggacaaaaacactctaggctccgacctgccaagaatcaaaaccgagattgaagctttgaaaaatctgcgccatcagcacatctgccagctgtaccatgttctggaaaccgcaaacaaaatatttatggtgctcgaatactgtccagggggagagctgttcgactacattatctcacaggatcggctgagcgaggaggagacaagggttgtgtttcgccaaattgtctccgccgttgcttacgttcacagccagggttacgcccatagggacctaaaacccgagaacctgctattcgacgaataccacaaattaaaattaatcgatttcgggctctgcgctaaacccaagggtaacaaggactaccacctacagacctgttgtggttcacttgcatacgctgcccccgagctgatccagggaaagtcatacctcggcagcgaggccgatgtgtggtctatggggatcctgctgtacgtcttgatgtgtggctttctgccttttgacgacgacaatgtcatggccctttataaaaaaattatgaggggcaagtatgacgtccccaagtggttgtcaccaagctccatcctgctgctgcagcagatgcttcaggtcgacccgaaaaaaaggataagcatgaagaatctgctcaatcatccttggattatgcaagactacaattaccctgtggaatggcagagcaaaaatccctttattcatctggacgacgactgtgtgaccgagctgtctgttcaccaccggaataaccggcagaccatggaagatctgatatcgctttggcagtatgatcacttgactgccacgtacttgcttcttcttgccaagaaagctagggggaaacccgtacgactgcggttgagctcattctcgtgtggccaggcttccgcgactccattcactgatatcaagagcaacaattggagcctggaagacgtcacagcatccgataagaactatgtggcagggctgatcgactacgattggtgtgaagacgatttatctacaggtgccgcaacgcctcgaacctcccagttcacgaaatactggacagagtcaaatggcgtcgaaagtaaaagcttaacgccagctctgtgtcggaccccagcaaataagctaaaaaataaggagaatgtatacacacctaaatcagctgttaagaacgaagagtattttatgttccccgagccaaaaactcctgtgaataagaatcaacacaagcgggaaatccttacaactccgaaccgttacactaccccgagtaaggcccgtaatcaatgtctgaaagaaacacccatcaagatacctgtcaatagtactggcacggacaaactgatgacgggcgttatctcacctgagcgcagatgccgtagtgtggaactggacctgaaccaggcgcacatggaggagactcccaaacgcaagggcgcaaaggtcttcggctcactggaaagaggcctggataaggtgattacggttctgacccggtccaaacgcaaaggaagcgctcgagatggtccccgccgcttaaagctgcactacaacgtaacaacaacaagactggttaaccctgaccaactcttaaatgagattatgtcaattctcccaaaaaaacacgtggacttcgtccaaaagggatatacactcaaatgccagacccagtcagattttggaaaggtgactatgcaattcgagctggaggtgtgtcagctccagaaaccagacgtggtgggaatcaggcgccagcggttgaagggcgacgcttgggtctataagcgattggtggaggatatcttgagctcatgtaaagtttag

SEQ ID NO: 182214 - DNA, 1374 bp, Artificial Sequence
  derived and/or modified sequence
atgggcatcctgctgtacgtgctgatgtgcggcttcctgcccttcgacgacgacaacgtgatggctctctataagaaaattatgcgcggaaaatatgacgtgcctaaatggctgagcccctctagcattctgctgctgcagcaaatgttacaggtggaccctaaaaaacggatcagtatgaagaatttgctcaaccatccctggatcatgcaagattataattatcccgtggagtggcagagcaagaacccttttattcacctggacgatgattgtgtcaccgagctttcagtacaccataggaataacagacagacaatggaggacctaatcagcctgtggcagtacgaccatctgacagctacgtacttgctgctgctggcgaaaaaagcccggggcaagccggtacggctgaggctttcttcatttagttgcggccaagcctctgccacccctttcacagatatcaagtcaaataactggtcgctcgaagacgtgacagcgagtgacaagaactacgtggccggtctcatagattacgactggtgtgaggacgaccttagcacaggagctgcaactccaaggaccagtcagttcacaaagtattggaccgagtccaatggagtggaatccaagtcactaacacccgctctgtgtcgtacgccagcgaataagttaaagaacaaagaaaatgtctacactcccaaaagtgccgtaaaaaatgaggagtattttatgtttcctgaacctaagaccccagttaataaaaatcagcacaaaagagagatcctgactacgcccaaccgctacaccaccccgagtaaggccaggaatcagtgcttgaaggagactccaattaagatcccggtgaactccactgggaccgataagctcatgaccggagtgatttcccccgaacggcggtgtcgttccgtggaactggacctcaaccaggctcatatggaggaaacacccaagcgtaagggggcaaaggtttttggatccctggagagggggctggataaggtaattaccgtgctgactcggtccaagcgcaaggggagtgcgagggatggtccccggcgcttgaaactgcactacaacgttaccaccactaggctggtcaaccccgatcagctgctcaatgagataatgagtatccttccgaagaagcacgttgatttcgtacagaagggctacacactgaagtgtcagacgcaatccgatttcggtaaagtaaccatgcagttcgagttggaggtgtgccagttgcaaaaaccagatgtcgtcggaattaggcggcagaggttgaaaggtgacgcctgggtgtataagcggctggtggaggacattctgtcctcctgtaaggtctag

SEQ ID NO: 182215 - DNA, 1956 bp, Artificial Sequence
  derived and/or modified sequence
atgaaggattacgacgagttgttgaagtattacgaacttcatgagactatcggcactggcggattcgccaaagtgaaactggcctgtcacatcttgactggcgagatggtggctatcaagatcatggataaaaacactcttggcagtgatctgccaaggattaagactgaaatcgaggccctgaagaatttgcggcaccaacatatttgccagttgtatcacgtccttgaaaccgctaacaaaatatttatggttttggagtactgtccaggcggtgaactgttcgattacatcatcagccaggaccgactcagtgaagaggaaacccgcgtggtcttccgccagatcgtcagcgcagtggcttatgttcatagccagggatacgcccaccgcgacttgaaaccagaaaacctccttttcgatgaataccacaaacttaagctgatcgacttcggcctgtgcgctaaacccaaagggaataaggattaccatcttcagacttgttgcggatccctggcctacgctgccccagagctgatccagggaaaatcatatctgggtagcgaagccgatgtgtggagcatgggcatcttgctctatgtgctgatgtgtggctttctgccctttgatgacgataacgtgatggccctgtataaaaagatcatgcgcggtaagtatgacgtcccaaagtggctgtctccctcctctattctgttactccaacaaatgcttcaagtggaccccaagaagcgcatatcgatgaagaatcttcttaaccacccctggattatgcaggattacaattatcctgtcgagtggcagtctaaaaatccttttattcaccttgatgatgattgcgtgaccgaattgtcagtgcatcataggaataacagacagacgatggaagacctgattagcctctggcagtacgatcacctcaccgccacatatctgctgctcctcgctaaaaaagccagaggcaagccagtgcgcctgcggctgtcatccttcagttgcggccaggcttccgccacaccttttacagacataaagtcaaataattggtccctggaggacgttacagccagcgacaaaaactacgtcgccggactaatcgattacgactggtgtgaagatgatttgagtacaggcgctgccactcccaggacatctcagttcaccaagtattggaccgagagtaacggagtcgagagtaagtcgcttactcccgcactgtgtcgaactccagccaacaagcttaaaaataaagagaacgtgtatacacctaaaagcgccgtcaaaaatgaggagtacttcatgtttcccgaaccaaagactccagtgaacaagaaccagcataagcgcgaaatacttaccacccctaacagatatactaccccatctaaagctcgtaatcaatgtctcaaagaaactccaattaaaataccagttaacagcaccggaacagataagctgatgactggagttatctccccagagcggaggtgcagatctgtggaacttgatctcaaccaggctcacatggaggagacccccaagcggaagggcgcaaaagtctttggctccctggagcgtggtttggacaaggttatcaccgtactgactcgaagtaagagaaaaggcagcgccagagacggacccagacgtcttaaactgcactataatgtaaccaccaccaggcttgtcaacccggaccagttgctgaatgagattatgagcattctacccaaaaagcatgtggacttcgttcagaagggatataccttgaaatgtcagactcagagtgatttcggtaaggtaactatgcagtttgagctggaggtgtgtcagttgcaaaaacccgacgtggtcgggataagaaggcagagattgaaaggcgatgcctgggtgtacaagaggctcgtggaggatatactgagctcctgcaaagtgtag

SEQ ID NO: 182216 - DNA, 1374 bp, Artificial Sequence
  derived and/or modified sequence
atgggcatcctcctgtacgtcctaatgtgcggcttcctgcccttcgatgacgacaacgttatggctctgtacaaaaaaatcatgcgcggaaaatatgacgtgccaaaatggctgagcccttcttccattctgcttctgcagcaaatgctgcaggttgatccaaagaagagaatctcaatgaaaaatctgttgaaccatccttggattatgcaggattataattaccctgtggaatggcaatctaaaaaccctttcattcacctggacgatgattgtgtgaccgaactgtctgtgcaccaccgtaataataggcagaccatggaggacctaatttcgttgtggcagtatgaccatctgaccgctacttaccttcttctactggccaaaaaagctagaggaaagcccgtgcggctacgactatcaagctttagctgcgggcaagccagtgccactccctttaccgatatcaagtctaacaattggagccttgaagacgtgaccgcctcagacaaaaattacgtggctgggctgatcgactatgattggtgtgaagacgaccttagtacaggcgctgccacccccaggacctctcaattcaccaagtactggacagaaagcaacggcgtagagtctaagtctcttaccccagccttatgtagaactcccgctaataagctcaaaaacaaagagaacgtttacacacccaagtctgccgttaagaacgaagagtatttcatgtttccagagcccaaaacgccggtaaacaaaaatcagcataaacgagagattctgactacacctaaccgatacacaacccccagcaaggctcgcaaccagtgcctgaaggagactcccatcaagataccagtcaacagcacaggaaccgacaagttgatgaccggggtgattagcccagagcgcagatgcagatccgtcgagttggatcttaaccaggctcatatggaagaaacgccgaagcgtaaaggcgctaaagtattcggctctctagaacgcggactcgataaggtgattacagttctgactcgttctaaaagaaaaggatctgcacgcgacggcccacgacgcttgaagctccattataatgtgaccacaaccagactggtcaaccccgatcagttgttaaatgaaattatgagtatcctcccaaaaaagcatgtggactttgtccaaaagggttatacgctcaagtgtcaaacccagtcagactttgggaaagtgaccatgcaattcgagcttgaggtctgtcagctccagaagccggacgtggtcgggattcgcagacagcgactgaaaggcgatgcctgggtctataagcgcctagttgaggatatcttatcttcatgcaaggtgtag

SEQ ID NO: 182217 - DNA, 1956 bp, Artificial Sequence
  derived and/or modified sequence
atgaaggactacgacgagctgctgaagtactacgagctgcacgagaccatcggcaccggcggcttcgccaaggtgaagctggcctgccacatcctgaccggcgagatggtggccatcaagatcatggacaagaacaccctgggcagcgacctgcccagaatcaagaccgagatcgaggccctgaagaacctgagacaccagcacatctgccagctgtaccacgtgctggagaccgccaacaagatcttcatggtgctggagtactgccccggcggcgagctgttcgactacatcatcagccaggacagactgagcgaggaggagaccagagtggtgttcagacagatcgtgagcgccgtggcctacgtgcacagccagggctacgcccacagagacctgaagcccgagaacctgctgttcgacgagtaccacaagctgaagctgatcgacttcggcctgtgcgccaagcccaagggcaacaaggactaccacctgcagacctgctgcggcagcctggcctacgccgcccccgagctgatccagggcaagagctacctgggcagcgaggccgacgtgtggagcatgggcatcctgctgtacgtgctgatgtgcggcttcctgcccttcgacgacgacaacgtgatggccctgtacaagaagatcatgagaggcaagtacgacgtgcccaagtggctgagccccagcagcatcctgctgctgcagcagatgctgcaggtggaccccaagaagagaatcagcatgaagaacctgctgaaccacccctggatcatgcaggactacaactaccccgtggagtggcagagcaagaaccccttcatccacctggacgacgactgcgtgaccgagctgagcgtgcaccacagaaacaacagacagaccatggaggacctgatcagcctgtggcagtacgaccacctgaccgccacctacctgctgctgctggccaagaaggccagaggcaagcccgtgagactgagactgagcagcttcagctgcggccaggccagcgccacccccttcaccgacatcaagagcaacaactggagcctggaggacgtgaccgccagcgacaagaactacgtggccggcctgatcgactacgactggtgcgaggacgacctgagcaccggcgccgccacccccagaaccagccagttcaccaagtactggaccgagagcaacggcgtggagagcaagagcctgacccccgccctgtgcagaacccccgccaacaagctgaagaacaaggagaacgtgtacacccccaagagcgccgtgaagaacgaggagtacttcatgttccccgagcccaagacccccgtgaacaagaaccagcacaagagagagatcctgaccacccccaacagatacaccacccccagcaaggccagaaaccagtgcctgaaggagacccccatcaagatccccgtgaacagcaccggcaccgacaagctgatgaccggcgtgatcagccccgagagaagatgcagaagcgtggagctggacctgaaccaggcccacatggaggagacccccaagagaaagggcgccaaggtgttcggcagcctggagagaggcctggacaaggtgatcaccgtgctgaccagaagcaagagaaagggcagcgccagagacggccccagaagactgaagctgcactacaacgtgaccaccaccagactggtgaaccccgaccagctgctgaacgagatcatgagcatcctgcccaagaagcacgtggacttcgtgcagaagggctacaccctgaagtgccagacccagagcgacttcggcaaggtgaccatgcagttcgagctggaggtgtgccagctgcagaagcccgacgtggtgggcatcagaagacagagactgaagggcgacgcctgggtgtacaagagactggtggaggacatcctgagcagctgcaaggtgtag

SEQ ID NO: 182218 - DNA, 1374 bp, Artificial Sequence
  derived and/or modified sequence
atgggcatcctgctgtacgtgctgatgtgcggcttcctgcccttcgacgacgacaacgtgatggccctgtacaagaagatcatgagaggcaagtacgacgtgcccaagtggctgagccccagcagcatcctgctgctgcagcagatgctgcaggtggaccccaagaagagaatcagcatgaagaacctgctgaaccacccctggatcatgcaggactacaactaccccgtggagtggcagagcaagaaccccttcatccacctggacgacgactgcgtgaccgagctgagcgtgcaccacagaaacaacagacagaccatggaggacctgatcagcctgtggcagtacgaccacctgaccgccacctacctgctgctgctggccaagaaggccagaggcaagcccgtgagactgagactgagcagcttcagctgcggccaggccagcgccacccccttcaccgacatcaagagcaacaactggagcctggaggacgtgaccgccagcgacaagaactacgtggccggcctgatcgactacgactggtgcgaggacgacctgagcaccggcgccgccacccccagaaccagccagttcaccaagtactggaccgagagcaacggcgtggagagcaagagcctgacccccgccctgtgcagaacccccgccaacaagctgaagaacaaggagaacgtgtacacccccaagagcgccgtgaagaacgaggagtacttcatgttccccgagcccaagacccccgtgaacaagaaccagcacaagagagagatcctgaccacccccaacagatacaccacccccagcaaggccagaaaccagtgcctgaaggagacccccatcaagatccccgtgaacagcaccggcaccgacaagctgatgaccggcgtgatcagccccgagagaagatgcagaagcgtggagctggacctgaaccaggcccacatggaggagacccccaagagaaagggcgccaaggtgttcggcagcctggagagaggcctggacaaggtgatcaccgtgctgaccagaagcaagagaaagggcagcgccagagacggccccagaagactgaagctgcactacaacgtgaccaccaccagactggtgaaccccgaccagctgctgaacgagatcatgagcatcctgcccaagaagcacgtggacttcgtgcagaagggctacaccctgaagtgccagacccagagcgacttcggcaaggtgaccatgcagttcgagctggaggtgtgccagctgcagaagcccgacgtggtgggcatcagaagacagagactgaagggcgacgcctgggtgtacaagagactggtggaggacatcctgagcagctgcaaggtgtag

SEQ ID NO: 182219 - protein, 1214 aa, Artificial Sequence
  derived and/or modified sequence
MKQPIMADGPRCKRRKQANPRRKNVVNYDNVVDTGSETDEEDKLHIAEDDGIANPLDQETSPASVPNHESSPHVSQALLPREEEEDEIREGGVEHPWHNNEILQASVDGPEEMKEDYDTMGPEATIQTAINNGTVKNANCTSDFEEYFAKRKLEERDGHAVSIEEYLQRSDTAIIYPEAPEELSRLGTPEANGQEENDLPPGTPDAFAQLLTCPYCDRGYKRLTSLKEHIKYRHEKNEENFSCPLCSYTFAYRTQLERHMVTHKPGTDQHQMLTQGAGNRKFKCTECGKAFKYKHHLKEHLRIHSGEKPYECPNCKKRFSHSGSYSSHISSKKCIGLISVNGRMRNNIKTGSSPNSVSSSPTNSAITQLRNKLENGKPLSMSEQTGLLKIKTEPLDFNDYKVLMATHGFSGTSPFMNGGLGATSPLGVHPSAQSPMQHLGVGMEAPLLGFPTMNSNLSEVQKVLQIVDNTVSRQKMDCKAEEISKLKGYHMKDPCSQPEEQGVTSPNIPPVGLPVVSHNGATKSIIDYTLEKVNEAKACLQSLTTDSRRQISNIKKEKLRTLIDLVTDDKMIENHNISTPFSCQFCKESFPGPIPLHQHERYLCKMNEEIKAVLQPHENIVPNKAGVFVDNKALLLSSVLSEKGMTSPINPYKDHMSVLKAYYAMNMEPNSDELLKISIAVGLPQEFVKEWFEQRKVYQYSNSRSPSLERSSKPLAPNSNPPTKDSLLPRSPVKPMDSITSPSIAELHNSVTNCDPPLRLTKPSHFTNIKPVEKLDHSRSNTPSPLNLSSTSSKNSHSSSYTPNSFSSEELQAEPLDLSLPKQMKEPKSIIATKNKTKASSISLDHNSVSSSSENSDEPLNLTFIKKEFSNSNNLDNKSTNPVFSMNPFSAKPLYTALPPQSAFPPATFMPPVQTSIPGLRPYPGLDQMSFLPHMAYTYPTGAATFADMQQRRKYQRKQGFQGELLDGAQDYMSGLDDMTDSDSCLSRKKIKKTESGMYACDLCDKTFQKSSSLLRHKYEHTGKRPHQCQICKKAFKHKHHLIEHSRLHSGEKPYQCDKCGKRFSHSGSYSQHMNHRYSYCKREAEEREAAEREAREKGHLEPTELLMNRAYLQSITPQGYSDSEERESMPRDGESEKEHEKEGEDGYGKLGRQDGDEEFEEEEEESENKSMDTDPETIRDEEETGDHSMDDSSEDGKMETKSDHEEDNMEDGM

SEQ ID NO: 182220 - protein, 424 aa, Artificial Sequence
  derived and/or modified sequence
MADGPRCKRRKQANPRRKNVVNYDNVVDTGSETDEEDKLHIAEDDGIANPLDQETSPASVPNHESSPHVSQALLPREEEEDEIREGGVEHPWHNNEILQASVDGPEEMKEDYDTMGPEATIQTAINNGTVKNANCTSDFEEYFAKRKLEERDGHAVSIEEYLQRSDTAIIYPEAPEELSRLGTPEANGQEENDLPPGTPDAFAQLLTCPYCDRGYKRLTSLKEHIKYRHEKNEENFSCPLCSYTFAYRTQLERHMVTHKPGTDQHQMLTQGAGNRKFKCTECGKAFKYKHHLKEHLRIHSGEKPYECPNCKKRFSHSGSYSSHISSKKCIGLISVNGRMRNNIKTGSSPNSVSSSPTNSAITQLRNKLENGKPLSMSEQTGLLKSGRAQWLTPLIPALLEAEVGRSRGQKIETLLANMVEPRLY

SEQ ID NO: 182221 - protein, 439 aa, Artificial Sequence
  derived and/or modified sequence
MKQPIMADGPRCKRRKQANPRRKNVVNYDNVVDTGSETDEEDKLHIAEDDGIANPLDQETSPASVPNHESSPHVSQALLPREEEEDEIREGGVEHPWHNNEILQASVDGPEEMKEDYDTMGPEATIQTAINNGTVKNANCTSDFEEYFAKRKLEERDGHAVSIEEYLQRSDTAIIYPEAPEELSRLGTPEANGQEENDLPPGTPDAFAQLLTCPYCDRGYKRLTSLKEHIKYRHEKNEENFSCPLCSYTFAYRTQLERHMVTHKPGTDQHQMLTQGAGNRKFKCTECGKAFKYKHHLKEHLRIHSGEKPYECPNCKKRFSHSGSYSSHISSKKCIGLISVNGRMRNNIKTGSSPNSVSSSPTNSAITQLRNKLENGKPLSMSEQTGLLKIKTEPLDFNDYKVLMATHGFSGTSPFMNGGLGATSPLGVHPSAQSPMQHL

SEQ ID NO: 182222 - protein, 135 aa, Artificial Sequence
  derived and/or modified sequence
MKQPIMADGPRCKRRKQANPRRKNVVNYDNVVDTGSETDEEDKLHIAEDDGIANPLDQETSPASVPNHESSPHVSQALLPREEEEDEIREGGVEHPWHNNEILQASVDGPEEMKEDYDTMGPEATIQTAINNGTG

SEQ ID NO: 182223 - protein, 702 aa, Artificial Sequence
  derived and/or modified sequence
MKQPIMADGPRCKRRKQANPRRKNVVNYDNVVDTGSETDEEDKLHIAEDDGIANPLDQETSPASVPNHESSPHVSQALLPREEEEDEIREGGVEHPWHNNEILQASVDGPEEMKEDYDTMGPEATIQTAINNGTVKNANCTSDFEEYFAKRKLEERDGHAVSIEEYLQRSDTAIIYPEAPEELSRLGTPEANGQEENDLPPGTPDAFAQLLTCPYCDRGYKRLTSLKEHIKYRHEKNEENFSCPLCSYTFAYRTQLERHMVTHKPGTDQHQMLTQGAGNRKFKCTECGKAFKYKHHLKEHLRIHSGEKPYECPNCKKRFSHSGSYSSHISSKKCIGLISVNGRMRNNIKTGSSPNSVSSSPTNSAITQLRNKLENGKPLSMSEQTGLLKIKTEPLDFNDYKVLMATHGFSGTSPFMNGGLGATSPLGVHPSAQSPMQHLGVGMEAPLLGFPTMNSNLSEVQKVLQIVDNTVSRQKMDCKAEEISKLKGYHMKDPCSQPEEQGVTSPNIPPVGLPVVSHNGATKSIIDYTLEKVNEAKACLQSLTTDSRRQISNIKKEKLRTLIDLVTDDKMIENHNISTPFSCQFCKESFPGPIPLHQHERYLCKMNEEIKAVLQPHENIVPNKAGVFVDNKALLLSSVLSEKGMTSPINPYKDHMSVLKAYYAMNMEPNSDELLKISIAVGLPQEFVKEWFEQRKVYQYSN

SEQ ID NO: 182224 - protein, 91 aa, Artificial Sequence
  derived and/or modified sequence
MKQPIMADGPRCKRRKQANPRRKNVVNYDNVVDTGSETDEEDKLHIAEDDGIANPLDQETSPASVPNHESSPHVSQALLPREEEEDEIREG

SEQ ID NO: 182225 - protein, 63 aa, Artificial Sequence
  derived and/or modified sequence
MKQPIMADGPRCKRRKQANPRRKNVVNYDNVVDTGSETDEEDKLHIAEDDGIANPLDQETSPA

SEQ ID NO: 182226 - DNA, 9243 bp, Artificial Sequence
  derived and/or modified sequence
atttcatttcttccactaaagcgtttgcggagacttcaaggtataatctatcccagatcctttcccagagagaaacttggcgatcacgttttcacatgatgctcacgctcagggcgcttcaattatccctccccacaaagataggtggcgcgtgtttcagggtctctcgtctctctcctacagaaaagaaaaagaaaaaaatgtcattagaagaggcgtaacacgtcagtccgtccccaggtttgtgtttcctggagtggccgaaagagatcagttctaacctgctctgcaggaataacggtcctgcctcccgacactcttggcgaggtttttgtacagtttgctccgggagctgtttcttcgcttccacctttttctcccccacacttcgcggcttcttcatgctttttcttctcaccatttctggccaaaactacaaacaagacttcgcagatcgagcctgcgtgctgccgaagcagggcgccgagtccatgcgaactgccatctgatccgctcttatcaatgaagcagccgatcatggcggatggcccccggtgcaagaggcgcaaacaagccaatcccaggaggaaaaacgtggtgaactatgacaatgtagtggacacaggttctgaaacagatgaggaagacaagcttcatattgctgaggatgacggtattgccaaccctctggaccaggagacgagtccagctagtgtgcccaaccatgagtcctccccacacgtgagccaagctctgttgccaagagaggaagaggaagatgaaataagggagggtggagtggaacacccctggcacaacaacgagattctacaagcctctgtagatggtccagaagaaatgaaggaagactatgacactatggggccagaagccacgatccagaccgcaattaacaatggtacagtgaagaatgcaaattgcacatcagattttgaggaatactttgccaaaagaaaactggaggaacgcgatggtcatgcagtcagcatcgaggagtaccttcagcgcagtgacacagccattatttacccagaagcccctgaggagctgtctcgccttggcacgccagaggccaatgggcaagaagaaaatgacctgccacctggaactccagatgcttttgcccaactgctgacctgcccctactgcgaccggggctacaagcgcttgacatcactgaaggagcacatcaagtaccgccacgagaagaatgaagagaacttttcctgccctctctgtagctacacgtttgcctaccgcacccagctcgagcggcatatggtgacacacaagccagggacagatcagcaccaaatgctaacccaaggagcaggtaatcgcaagttcaaatgcacagagtgtggcaaggccttcaaatataaacaccatctgaaagaacacctgcgaattcacagtggtgaaaaaccttacgagtgcccaaactgcaagaaacgtttctcccattctggttcctacagttcgcacatcagcagcaagaaatgtattggtttaatctctgtaaatggccgaatgagaaacaatatcaagacgggttcttcccctaattctgtttcttcttctcctactaattcagccattacccagttaagaaacaagttggagaatggaaaaccacttagtatgtctgaacagacaggcttacttaaaattaaaacagaaccactagacttcaatgactataaagttcttatggctacacacgggtttagtggcactagtccctttatgaatggtgggcttggagccaccagccctttaggagttcatccatctgctcagagtccaatgcagcacttaggtgtagggatggaagcccctttacttgggtttcccaccatgaatagtaatttaagtgaggtacaaaaggttctacagattgtggacaatactgtttccaggcaaaaaatggactgcaaggctgaagaaatttcaaagttgaaaggttatcacatgaaggatccatgctctcaacctgaggaacaaggagttacttctcctaatattccgcctgtcggtcttccggtagtgagtcataatggtgccactaaaagtattattgactatacgttggaaaaagtcaatgaagccaaagcttgcctccagagcttgactactgactcaaggagacagatcagtaatataaagaaagagaagctacgtactttaatagatttggtcactgatgacaaaatgattgagaaccacaacatatccactccattttcatgccagttctgtaaagaaagttttcctggccccatccctttgcatcagcatgaacgttacctttgtaagatgaatgaagagatcaaggcggtcctgcagcctcatgaaaacatagtccccaacaaagccggagtttttgttgataataaagccctcctcttgtcatctgtactttctgagaaaggaatgacaagccccatcaacccatacaaggaccacatgtctgtactcaaagcatactatgctatgaacatggagcccaactccgatgaactgctgaaaatttccattgctgtgggccttcctcaggaatttgtgaaggaatggtttgaacaacgaaaagtctaccagtactcaaattccaggtccccatccctggaaagaagctccaagccgttagctcccaacagtaaccctcccacaaaagactctttattacccaggtctcctgtaaaacctatggactccataacatcaccatctatagcagaactccacaacagtgttacgaattgtgatcctcctctcaggctaacaaaaccttcccattttaccaatattaaaccagttgaaaaattggaccactccaggagtaatactccttctcccttaaatctttcctccacatcttctaaaaactcccacagtagttcatacactccaaacagcttctcttctgaggagctccaggctgagcctttagacttgtcattaccaaaacaaatgaaagaacccaaaagtattatagccacaaagaacaaaacaaaagctagtagcatcagtttagatcataacagtgtttcttcctcatctgaaaactcagatgagcctctgaacttgacttttatcaagaaggaattttcaaattcaaataatctggacaacaaaagcactaacccagtgttcagcatgaacccatttagtgccaaacctttatacacagctcttccacctcaaagcgcatttccccctgctactttcatgccaccagtccagaccagtattcctgggctacgaccatacccaggactggatcagatgagcttcctaccacatatggcctacacctacccaactggagcagctacttttgctgatatgcagcaaaggagaaagtaccagcggaaacaaggatttcagggagaattgcttgatggagcacaagactacatgtcaggcctagatgatatgacagactccgactcctgtctgtctcgcaaaaagatcaagaagacagagagtggcatgtatgcatgtgacttatgtgacaagacattccagaaaagcagttcccttctgcgacataaatacgaacacacaggaaaaagaccacatcagtgtcagatttgtaagaaagcgtttaaacacaagcaccaccttatcgagcactcaaggcttcactcgggcgagaagccctatcagtgtgataaatgtggcaagcgcttctcacactcgggctcgtactcgcagcacatgaatcacaggtattcctactgcaagcgggaggcggaggagcgggaagcggcggagcgcgaggcgcgcgagaaagggcacttggaacccaccgagctgctgatgaaccgggcttacttgcagagcattacccctcaggggtactctgactcggaggagagggagagtatgccgagggatggcgagagcgagaaggagcacgagaaagaaggcgaggatggctacgggaagctgggcagacaggatggcgacgaggagttcgaggaggaagaggaagaaagtgaaaataaaagtatggatacggatcccgaaacgatacgagatgaagaagagactggagatcactccatggacgatagttcggaggatgggaaaatggaaaccaaatcagaccacgaggaagacaatatggaagatggcatgtaataaactactgcattttaagcttcctatttttttttccagtagtattgttacctgcttgaaaacactgctgtgttaagctgttcatgcacgtgcctgacgcttccaggaagctgtagagagggacagaaggggcggttcagccaagacagatgtagacggagttggagctgggtattgttaaaaactgcattatgcaaaaattttgtacagtgttaaggcctaaaaactgtgtggttcagagactaattcctgtgtttaatagcatttatactttaagcacaactagaaaattgtaagaattgcactctacttatgtatcactacaaactttaaaaaactatgtctaatttatattaatacattttaaaaaggtgcccgcactaccatacatcagtatttttattattattattgttattcctttttaatttaatgtgctcgcactacaatgcatcagtattatgattcctctgtactttcctttcgctattcatcaatttcccattttttttttcagcttaagtaaccacacaattttaggcctcaatttttttttttttctgtgaaggaacttgaagtgatgcatgtgtgaatttaagataccgaagtcttaaagtgacctggacgtgaaggaaaaagtaagatgagaaataaagaaagcctttgtaaggtggttttaaaagccttatatgcaaaccttttaatctgtgtttctgcaagtgccatccttgtacagtgttaagagggtaacatgggttacctttgcaccagcttcagtgttaagctcaccctgttctttgaagcacccatgtcagtattagaagaataggcagcagttccttagtttacatatgtttgtgcaattattttctgtacttttttgttcattaattttgtcagtattacaccaaactgtttttgcaacaaaaaaattttttttgcattcatttaattttaggtcaaataacattttatttatgtggctcattttatatttcctaattttatttatttcatactgtagtgtacagtattatagttcttcaatatatagatatattttagtaaaaaaggaacatgacgttgatcatttgggcaaattttacgtaaagagaagagcatttattgtgttttggaacattaattgtgagatgggatttttcaattttattattttatttttgtttttttccaattactggaaattccaaatttgggaacttttgatacgatcttgtgaaaacactgtattttcgactgaaaattccactttcttcatcttgttttttagctaaaaagagggactgttaaatacaatgtatgataccatgacaaaaatctttcctgaattgtctttgtaaaagtattattgaattttcaatttgtaatttcttttgaaaatgaccatgctcgaataaaaatgtagccaaactaagaatgtagttaatgagttctgtacttttagagagttttccttcaatgaccattaacatgtaacatgctttatgcttataataatgctaattatgtttttttcatataattttagtttagcaataattttgactggtaccaataactgttttttaaaattccatacctatgtacagcaattttacagcttttctcaactgatcctgattccagattgtgtatttttatgtgaggttatattattcaaatttagtctatttactttacagacatttctacttttgcattacgagtatttagagattatgtgttaaaaattcacttctctgtccaaggggtctttgtgatttattcaaaaaaaagtctaatttcaaaaagacagctattattcagtgttatttataatatgtaaccttttttaaaggattgggatagtttatctcactttttgaaatgcagacagtagtttaccgtttatctgaaactagaaggcgtgggtgggagaggaaaagctaaaagcaaatgctaacaaaaataaccgtgattttctaagacagtttttcagtttttacaagatgaccctaatattcagaatatgaatgtattcgtaggttttacataatgacttttatcaagaaactagattctgcttcttaaatctaattgccaagtgaagaataacagaaaaaacagattaccttatcaaatttacagctcttgaatatacagaactataatatagtagctgtccatgtattttttctactttagaatcaaagaagaaaagcatcattttgctattaaatttgctaaaattttgagtatgatatttccagttggcaagaacaacatatttatatttattccttagccataataccactttcctaaatttcacaaaagtcattctttgcaacttgaaactcaatagaaagtgtgtatgtgtgtgtgtgtatatatatatatatatacacacacacacatacacagaaaggatgtaatgaagatacagtaatagttgagcagacctttttagaaaaacatgtttttagctctatcttcaaactttctggcagagggggtggggggggcagggggaggagtggcatcaaaatgctatgcctcctgttatccacagcctagagtttttatatttggaaagtttagaaaattctatcctcgtttctccttctttgaatggcacaaataaatacactacataaatttttctggtttgaaaggctctaggcgataactttattaattcaacctgaaaatatcaagccattaaattttgtccgggtagaataaatccctgtggcctcttttaaagcaatgtaggtctctgttgcccatggggcatatctgtgtcccaatccacaagagataggaccaacaaacaatgaatgtgcaacctaactctttctccttggaaagaagaaagtgtgcacgaagtagaggagggtgggcagaccctgccttgcccctcctgttacccccttctctgtcatttgttcctaactccatttcataggcaggctcagaatacctgagtctgaaaatatcaggataacacttgtgaattgtgacaatcactacaatgtcccatatctgaggagttttttttaatgctatttatccgctggacacgattgcacattagggctgcataatcctctaactctagggaaaaataaaaacttttgatttgtcttaagattcttctccaaggtcgcaaacaagaaattcccctccacaaccaagagatgtgcattttagtaacatcagatgtgttcttctgttttatcaactacttactcttcccacacgcttagttctaaatctaacctttcccccctcgaatagggggcaggggaggatgaggaaacactggaacaactgaacacccctgcccattttctccaagagccttttgtattctagcatatctgtgcaatcttttcttttttcttcacatgacactgtaagcttaggcctgaaataactgggaagagagatgcgtatcagaatttctccgcaagagctaaacaaaacatacatcttccttagcatgaattggactgggggcggagtgggagggcttggaggaaaggggaaagaagggactatatttgaataaatatgaataaatgtattagatacttttcacaatcagataacttttaaaaaggtcattttttatctttctaataatgtaagccttaataaaagcaaatcttagtcacaaatttgaggagactgcccaataataagtttacatgtatttgaactgaaaaattgttaaccatgcttttgctccaagatgtgtgaggccattcaggggctgtagggccctggatatacacacaaacaagtgtgtgtatatctggagccccacacattgtaataaacacagctgcatttatttgactatgtgatcccatgtacatgtaaaaacattcaaacaaacacactcagcggatttatttattgtgcaatggggcaattattcaaataaacatgctcaatgcaattatttgaatctcacattgcatgttcatcaatcatagcactaaaaaaagagggggaaaaaacaccaaagaattcacatggggaaaaaatatatatatgaaaaccaccttattatagattttatagggcagctgaggttatggctcccttcttaactgtaactcaactattctgtattcaatgacatttgtttctaatgattaattggttcactcacttgatcatataatagcaaactttataaacctgtattgtgtagagatgtgaaatctctatatttcaagagcagaagagttctttctagacaccttacatcaagggacactggtccaattattatcgcttatataagcactcctataaattctgaaaaattttatacatgcaacaaaacattcctacatttgaagacattaagaaaaatcacaggtgactcatctgatcattctatatattaataaatattatgacatatatgtgaacacatcacaaatcatattggtgtaccaagaggcaatttatgcctctcttaagtatgtactgacataacctaatatactaaaatgggaaggggcttttagtcactgaaatatgcatcgtgtaacaaagatgaagaaaatacatggcttgtgcccatcataaaaaaagattcagactgaaggcttagctttggttttttcaattaaattgttaaactgtgcacagtgatttttttttagaacttgagacatttgtgatgttggctgtttaaatctttgttaccttcgctgtgaattgaaattgtacatatttagtaaatcatgcagacaaaacaaactttttagacaatatttttattggagagttttcttttcctgtatccatgttaaaaaaaaaaaagacctcctttcccaaaataaaaatgtcaatactaaatttaaagaagtataaaggaatgattgcttcctttagagcaaaatatttaaataaacatggagataattggcaacatgttctttttgggctagtaggctgtgtccaattttttgggtctgatgtttcagagggcctctgtttcagggttgaagatgatatattaatctcggaattaaacaaatgctattaaataac

SEQ ID NO: 182227 - DNA, 3645 bp, Artificial Sequence
  derived and/or modified sequence
atgaagcagcccatcatggccgacggccccagatgcaagagaagaaagcaggccaaccccagaagaaagaacgtggtgaactacgacaacgtggtggacaccggcagcgagaccgacgaggaggacaagctgcacatcgccgaggacgacggcatcgccaaccccctggaccaggagaccagccccgccagcgtgcccaaccacgagagcagcccccacgtgagccaggccctgctgcccagagaggaggaggaggacgagatcagagagggcggcgtggagcacccctggcacaacaacgagatcctgcaggccagcgtggacggccccgaggagatgaaggaggactacgacaccatgggccccgaggccaccatccagaccgccatcaacaacggcaccgtgaagaacgccaactgcaccagcgacttcgaggagtacttcgccaagagaaagctggaggagagagacggccacgccgtgagcatcgaggagtacctgcagagaagcgacaccgccatcatctaccccgaggcccccgaggagctgagcagactgggcacccccgaggccaacggccaggaggagaacgacctgccccccggcacccccgacgccttcgcccagctgctgacctgcccctactgcgacagaggctacaagagactgaccagcctgaaggagcacatcaagtacagacacgagaagaacgaggagaacttcagctgccccctgtgcagctacaccttcgcctacagaacccagctggagagacacatggtgacccacaagcccggcaccgaccagcaccagatgctgacccagggcgccggcaacagaaagttcaagtgcaccgagtgcggcaaggccttcaagtacaagcaccacctgaaggagcacctgagaatccacagcggcgagaagccctacgagtgccccaactgcaagaagagattcagccacagcggcagctacagcagccacatcagcagcaagaagtgcatcggcctgatcagcgtgaacggcagaatgagaaacaacatcaagaccggcagcagccccaacagcgtgagcagcagccccaccaacagcgccatcacccagctgagaaacaagctggagaacggcaagcccctgagcatgagcgagcagaccggcctgctgaagatcaagaccgagcccctggacttcaacgactacaaggtgctgatggccacccacggcttcagcggcaccagccccttcatgaacggcggcctgggcgccaccagccccctgggcgtgcaccccagcgcccagagccccatgcagcacctgggcgtgggcatggaggcccccctgctgggcttccccaccatgaacagcaacctgagcgaggtgcagaaggtgctgcagatcgtggacaacaccgtgagcagacagaagatggactgcaaggccgaggagatcagcaagctgaagggctaccacatgaaggacccctgcagccagcccgaggagcagggcgtgaccagccccaacatcccccccgtgggcctgcccgtggtgagccacaacggcgccaccaagagcatcatcgactacaccctggagaaggtgaacgaggccaaggcctgcctgcagagcctgaccaccgacagcagaagacagatcagcaacatcaagaaggagaagctgagaaccctgatcgacctggtgaccgacgacaagatgatcgagaaccacaacatcagcacccccttcagctgccagttctgcaaggagagcttccccggccccatccccctgcaccagcacgagagatacctgtgcaagatgaacgaggagatcaaggccgtgctgcagccccacgagaacatcgtgcccaacaaggccggcgtgttcgtggacaacaaggccctgctgctgagcagcgtgctgagcgagaagggcatgaccagccccatcaacccctacaaggaccacatgagcgtgctgaaggcctactacgccatgaacatggagcccaacagcgacgagctgctgaagatcagcatcgccgtgggcctgccccaggagttcgtgaaggagtggttcgagcagagaaaggtgtaccagtacagcaacagcagaagccccagcctggagagaagcagcaagcccctggcccccaacagcaacccccccaccaaggacagcctgctgcccagaagccccgtgaagcccatggacagcatcaccagccccagcatcgccgagctgcacaacagcgtgaccaactgcgacccccccctgagactgaccaagcccagccacttcaccaacatcaagcccgtggagaagctggaccacagcagaagcaacacccccagccccctgaacctgagcagcaccagcagcaagaacagccacagcagcagctacacccccaacagcttcagcagcgaggagctgcaggccgagcccctggacctgagcctgcccaagcagatgaaggagcccaagagcatcatcgccaccaagaacaagaccaaggccagcagcatcagcctggaccacaacagcgtgagcagcagcagcgagaacagcgacgagcccctgaacctgaccttcatcaagaaggagttcagcaacagcaacaacctggacaacaagagcaccaaccccgtgttcagcatgaaccccttcagcgccaagcccctgtacaccgccctgcccccccagagcgccttcccccccgccaccttcatgccccccgtgcagaccagcatccccggcctgagaccctaccccggcctggaccagatgagcttcctgccccacatggcctacacctaccccaccggcgccgccaccttcgccgacatgcagcagagaagaaagtaccagagaaagcagggcttccagggcgagctgctggacggcgcccaggactacatgagcggcctggacgacatgaccgacagcgacagctgcctgagcagaaagaagatcaagaagaccgagagcggcatgtacgcctgcgacctgtgcgacaagaccttccagaagagcagcagcctgctgagacacaagtacgagcacaccggcaagagaccccaccagtgccagatctgcaagaaggccttcaagcacaagcaccacctgatcgagcacagcagactgcacagcggcgagaagccctaccagtgcgacaagtgcggcaagagattcagccacagcggcagctacagccagcacatgaaccacagatacagctactgcaagagagaggccgaggagagagaggccgccgagagagaggccagagagaagggccacctggagcccaccgagctgctgatgaacagagcctacctgcagagcatcaccccccagggctacagcgacagcgaggagagagagagcatgcccagagacggcgagagcgagaaggagcacgagaaggagggcgaggacggctacggcaagctgggcagacaggacggcgacgaggagttcgaggaggaggaggaggagagcgagaacaagagcatggacaccgaccccgagaccatcagagacgaggaggagaccggcgaccacagcatggacgacagcagcgaggacggcaagatggagaccaagagcgaccacgaggaggacaacatggaggacggcatgtag

SEQ ID NO: 182228 - DNA, 1275 bp, Artificial Sequence
  derived and/or modified sequence
atggccgacggccccagatgcaagagaagaaagcaggccaaccccagaagaaagaacgtggtgaactacgacaacgtggtggacaccggcagcgagaccgacgaggaggacaagctgcacatcgccgaggacgacggcatcgccaaccccctggaccaggagaccagccccgccagcgtgcccaaccacgagagcagcccccacgtgagccaggccctgctgcccagagaggaggaggaggacgagatcagagagggcggcgtggagcacccctggcacaacaacgagatcctgcaggccagcgtggacggccccgaggagatgaaggaggactacgacaccatgggccccgaggccaccatccagaccgccatcaacaacggcaccgtgaagaacgccaactgcaccagcgacttcgaggagtacttcgccaagagaaagctggaggagagagacggccacgccgtgagcatcgaggagtacctgcagagaagcgacaccgccatcatctaccccgaggcccccgaggagctgagcagactgggcacccccgaggccaacggccaggaggagaacgacctgccccccggcacccccgacgccttcgcccagctgctgacctgcccctactgcgacagaggctacaagagactgaccagcctgaaggagcacatcaagtacagacacgagaagaacgaggagaacttcagctgccccctgtgcagctacaccttcgcctacagaacccagctggagagacacatggtgacccacaagcccggcaccgaccagcaccagatgctgacccagggcgccggcaacagaaagttcaagtgcaccgagtgcggcaaggccttcaagtacaagcaccacctgaaggagcacctgagaatccacagcggcgagaagccctacgagtgccccaactgcaagaagagattcagccacagcggcagctacagcagccacatcagcagcaagaagtgcatcggcctgatcagcgtgaacggcagaatgagaaacaacatcaagaccggcagcagccccaacagcgtgagcagcagccccaccaacagcgccatcacccagctgagaaacaagctggagaacggcaagcccctgagcatgagcgagcagaccggcctgctgaagagcggcagagcccagtggctgacccccctgatccccgccctgctggaggccgaggtgggcagaagcagaggccagaagatcgagaccctgctggccaacatggtggagcccagactgtactag

SEQ ID NO: 182229 - DNA, 1320 bp, Artificial Sequence
  derived and/or modified sequence
atgaagcagcccatcatggccgacggccccagatgcaagagaagaaagcaggccaaccccagaagaaagaacgtggtgaactacgacaacgtggtggacaccggcagcgagaccgacgaggaggacaagctgcacatcgccgaggacgacggcatcgccaaccccctggaccaggagaccagccccgccagcgtgcccaaccacgagagcagcccccacgtgagccaggccctgctgcccagagaggaggaggaggacgagatcagagagggcggcgtggagcacccctggcacaacaacgagatcctgcaggccagcgtggacggccccgaggagatgaaggaggactacgacaccatgggccccgaggccaccatccagaccgccatcaacaacggcaccgtgaagaacgccaactgcaccagcgacttcgaggagtacttcgccaagagaaagctggaggagagagacggccacgccgtgagcatcgaggagtacctgcagagaagcgacaccgccatcatctaccccgaggcccccgaggagctgagcagactgggcacccccgaggccaacggccaggaggagaacgacctgccccccggcacccccgacgccttcgcccagctgctgacctgcccctactgcgacagaggctacaagagactgaccagcctgaaggagcacatcaagtacagacacgagaagaacgaggagaacttcagctgccccctgtgcagctacaccttcgcctacagaacccagctggagagacacatggtgacccacaagcccggcaccgaccagcaccagatgctgacccagggcgccggcaacagaaagttcaagtgcaccgagtgcggcaaggccttcaagtacaagcaccacctgaaggagcacctgagaatccacagcggcgagaagccctacgagtgccccaactgcaagaagagattcagccacagcggcagctacagcagccacatcagcagcaagaagtgcatcggcctgatcagcgtgaacggcagaatgagaaacaacatcaagaccggcagcagccccaacagcgtgagcagcagccccaccaacagcgccatcacccagctgagaaacaagctggagaacggcaagcccctgagcatgagcgagcagaccggcctgctgaagatcaagaccgagcccctggacttcaacgactacaaggtgctgatggccacccacggcttcagcggcaccagccccttcatgaacggcggcctgggcgccaccagccccctgggcgtgcaccccagcgcccagagccccatgcagcacctgtag

SEQ ID NO: 182230 - DNA, 408 bp, Artificial Sequence
  derived and/or modified sequence
atgaagcagcccatcatggccgacggccccagatgcaagagaagaaagcaggccaaccccagaagaaagaacgtggtgaactacgacaacgtggtggacaccggcagcgagaccgacgaggaggacaagctgcacatcgccgaggacgacggcatcgccaaccccctggaccaggagaccagccccgccagcgtgcccaaccacgagagcagcccccacgtgagccaggccctgctgcccagagaggaggaggaggacgagatcagagagggcggcgtggagcacccctggcacaacaacgagatcctgcaggccagcgtggacggccccgaggagatgaaggaggactacgacaccatgggccccgaggccaccatccagaccgccatcaacaacggcaccggctag

SEQ ID NO: 182231 - DNA, 2109 bp, Artificial Sequence
  derived and/or modified sequence
atgaagcagcccatcatggccgacggccccagatgcaagagaagaaagcaggccaaccccagaagaaagaacgtggtgaactacgacaacgtggtggacaccggcagcgagaccgacgaggaggacaagctgcacatcgccgaggacgacggcatcgccaaccccctggaccaggagaccagccccgccagcgtgcccaaccacgagagcagcccccacgtgagccaggccctgctgcccagagaggaggaggaggacgagatcagagagggcggcgtggagcacccctggcacaacaacgagatcctgcaggccagcgtggacggccccgaggagatgaaggaggactacgacaccatgggccccgaggccaccatccagaccgccatcaacaacggcaccgtgaagaacgccaactgcaccagcgacttcgaggagtacttcgccaagagaaagctggaggagagagacggccacgccgtgagcatcgaggagtacctgcagagaagcgacaccgccatcatctaccccgaggcccccgaggagctgagcagactgggcacccccgaggccaacggccaggaggagaacgacctgccccccggcacccccgacgccttcgcccagctgctgacctgcccctactgcgacagaggctacaagagactgaccagcctgaaggagcacatcaagtacagacacgagaagaacgaggagaacttcagctgccccctgtgcagctacaccttcgcctacagaacccagctggagagacacatggtgacccacaagcccggcaccgaccagcaccagatgctgacccagggcgccggcaacagaaagttcaagtgcaccgagtgcggcaaggccttcaagtacaagcaccacctgaaggagcacctgagaatccacagcggcgagaagccctacgagtgccccaactgcaagaagagattcagccacagcggcagctacagcagccacatcagcagcaagaagtgcatcggcctgatcagcgtgaacggcagaatgagaaacaacatcaagaccggcagcagccccaacagcgtgagcagcagccccaccaacagcgccatcacccagctgagaaacaagctggagaacggcaagcccctgagcatgagcgagcagaccggcctgctgaagatcaagaccgagcccctggacttcaacgactacaaggtgctgatggccacccacggcttcagcggcaccagccccttcatgaacggcggcctgggcgccaccagccccctgggcgtgcaccccagcgcccagagccccatgcagcacctgggcgtgggcatggaggcccccctgctgggcttccccaccatgaacagcaacctgagcgaggtgcagaaggtgctgcagatcgtggacaacaccgtgagcagacagaagatggactgcaaggccgaggagatcagcaagctgaagggctaccacatgaaggacccctgcagccagcccgaggagcagggcgtgaccagccccaacatcccccccgtgggcctgcccgtggtgagccacaacggcgccaccaagagcatcatcgactacaccctggagaaggtgaacgaggccaaggcctgcctgcagagcctgaccaccgacagcagaagacagatcagcaacatcaagaaggagaagctgagaaccctgatcgacctggtgaccgacgacaagatgatcgagaaccacaacatcagcacccccttcagctgccagttctgcaaggagagcttccccggccccatccccctgcaccagcacgagagatacctgtgcaagatgaacgaggagatcaaggccgtgctgcagccccacgagaacatcgtgcccaacaaggccggcgtgttcgtggacaacaaggccctgctgctgagcagcgtgctgagcgagaagggcatgaccagccccatcaacccctacaaggaccacatgagcgtgctgaaggcctactacgccatgaacatggagcccaacagcgacgagctgctgaagatcagcatcgccgtgggcctgccccaggagttcgtgaaggagtggttcgagcagagaaaggtgtaccagtacagcaactag

SEQ ID NO: 182232 - DNA, 192 bp, Artificial Sequence
  derived and/or modified sequence
atgaagcagcccatcatggccgacggccccagatgcaagagaagaaagcaggccaaccccagaagaaagaacgtggtgaactacgacaacgtggtggacaccggcagcgagaccgacgaggaggacaagctgcacatcgccgaggacgacggcatcgccaaccccctggaccaggagaccagccccgcctag

SEQ ID NO: 182233 - DNA, 3645 bp, Artificial Sequence
  derived and/or modified sequence
atgaaacaacccattatggcggatggaccccggtgtaaaaggcggaagcaagcaaatcctaggaggaagaatgtcgtcaactatgacaacgttgtcgataccggctccgaaacagacgaggaagacaaacttcacatcgcagaagacgacgggatcgcaaatccgttagatcaagagacatcacctgccagcgtccccaatcatgagagcagccctcacgtctctcaggcattgttgcctcgtgaagaagaggaggatgaaataagggagggtggtgtggagcatccttggcacaacaacgagatcctccaggcttctgtggatggacccgaagaaatgaaggaggattatgataccatgggacccgaggctacgatacaaaccgccatcaataatgggaccgtcaagaacgcaaattgtacaagcgactttgaagagtacttcgccaaaagaaagctggaagagcgagacggacacgccgtgagtatcgaagaatacctgcagaggtccgacaccgccatcatctacccagaagcccctgaggagctttccagattgggtactccagaggcaaacggccaggaggaaaacgatttgcctcccgggacgcctgacgcctttgcacagttgctcacctgcccctactgcgatcgcggttacaaacgactcacttcgctgaaagagcacatcaagtaccgacatgaaaagaatgaagaaaacttctcctgtcctttgtgttcatatacatttgcgtaccgcacacagctggagcgacacatggtgacgcacaaacccggaaccgaccaacaccagatgttaacccaaggtgccggtaatagaaaatttaaatgcactgaatgcggtaaggccttcaagtacaagcaccatctgaaagagcatctgagaatccatagcggggaaaaaccgtatgagtgtcccaattgcaaaaaacgctttagccactctgggtcatacagcagccatatatccagcaagaaatgcattggactgataagcgtgaatggacgaatgagaaataatataaaaacgggatcttcacctaacagcgttagcagttccccaactaacagcgccatcactcagttaagaaataagctagaaaatggtaagccactgagcatgtctgaacaaacgggacttctcaaaatcaagactgagccattggatttcaatgattacaaagttctgatggctacccatggatttagtgggacctctccctttatgaacggcggcttgggagcgacctccccccttggcgtgcacccgtccgcccagtcgccaatgcagcacctcggcgtggggatggaagctccgttgctaggcttcccaaccatgaacagcaacctctcggaggtccaaaaggttctccagatcgtggataataccgtttcccgccaaaagatggactgtaaagccgaggagattagtaaactgaaaggttaccatatgaaagacccttgttctcagccagaagagcagggggtgacctcccctaacatccccccggtggggctccctgtcgtgtcacacaacggcgccaccaaatcgatcatcgactatactctcgaaaaggttaatgaggcgaaagcgtgtcttcagagcctcacaacggactcacggcgccagatatctaacattaagaaggagaagttgaggacactgatagatctggtgaccgatgacaaaatgattgaaaaccataacattagcacaccgtttagctgtcagttttgtaaagaaagtttccctggccctatccctctccaccaacacgaacgatatctgtgtaaaatgaacgaagagatcaaggccgtgttgcagcctcatgagaacattgtgccgaacaaggcaggggtgtttgtggataataaggctcttctcctgtcttccgtgctatctgagaaagggatgacctctcctatcaatccctacaaagatcatatgagtgtcctcaaagcctactacgctatgaacatggaaccaaattctgatgagctcttaaagatttcgatcgctgtggggttgcctcaagaattcgtcaaggaatggttcgagcagcgcaaagtgtaccagtactcgaatagcaggtcccccagtctagagaggagcagtaaaccgctcgctcccaacagcaaccctcctaccaaagattccctgctcccacgcagccccgttaaacctatggactctattaccagtccctcaattgccgaactgcacaacagcgtaaccaactgcgaccctcctctgaggttaacaaaaccatcacatttcactaatatcaaacctgtcgagaaactggaccacagtaggagtaacacaccctccccgttgaacttgtcaagtacttcatctaaaaacagccactccagttcttacacacccaattcatttagtagcgaagaattacaggctgagcctttagatttaagtctgccgaagcaaatgaaggagcccaagagcatcatcgcaacaaaaaacaagaccaaagcaagcagtatttctctcgaccataacagcgtgtctagcagctccgaaaactctgacgaacctcttaaccttactttcattaaaaaggagttcagtaactccaataaccttgataacaaaagcaccaaccccgtcttcagcatgaatcccttttcagccaaacctctgtatactgcgctgcccccacaaagtgccttcccccccgcgacgtttatgccccccgtccagacttccataccgggtctccgcccctacccgggcctagatcagatgtcattcctgcctcatatggcatacacttatccaacaggagctgccacatttgcagacatgcagcagcgcaggaagtaccagcggaagcaagggtttcagggcgaacttctggatggcgcgcaggactacatgtctggcctcgatgacatgaccgacagcgacagttgcctgagccgaaaaaagatcaagaaaaccgagtctggaatgtacgcatgcgacctctgcgacaagacttttcaaaagagttcctcactgctgagacacaagtatgaacatacaggcaaacgcccacatcagtgccagatttgtaagaaggctttcaagcataaacaccatctcatcgagcattctagactccactctggcgaaaagccctatcagtgcgataagtgcgggaaaaggttttcccactcgggcagttactcgcagcacatgaatcataggtactcctattgtaaaagagaagcagaggagcgggaagccgccgagcgggaggccagggagaagggtcatttggagcctaccgaactactgatgaatcgggcttatctgcagtcaatcactccccaggggtattctgactctgaggagcgagaatccatgccgcgcgatggcgagtccgaaaaggaacatgagaaagagggcgaggacgggtacggcaagctgggacgccaggatggcgacgaagagtttgaggaagaggaggaggagagcgaaaataaaagcatggataccgatcccgaaacaatcagagatgaagaggaaacaggcgaccacagcatggacgactcttcggaagacgggaaaatggagaccaaaagcgatcacgaagaggacaatatggaggatggcatgtag

SEQ ID NO: 182234 - DNA, 1275 bp, Artificial Sequence
  derived and/or modified sequence
atggctgatggtcctagatgcaagagaagaaagcaggccaatccccgcaggaaaaatgtagtgaactacgataacgtggtcgacacaggctctgaaacagatgaagaagataagttgcacattgccgaagacgacggcatcgccaatcctttagatcaggagacgtctccggctagtgtcccaaatcacgaaagctctccgcacgtgagtcaggctcttctaccccgggaggaagaggaagacgagattcgggagggaggagtggaacatccttggcacaacaacgagattctgcaagcatcagttgacggcccggaggaaatgaaggaggactacgatactatgggccctgaagctacaattcagaccgcaattaacaacgggaccgtcaagaatgcaaattgcacatccgatttcgaggagtacttcgccaagcgaaagttggaggaacgcgacgggcatgcggtgtcgattgaggaatatctgcaacggagcgatactgctataatctatccagaagctccggaggaactcagccgactggggacacccgaggccaacggccaggaggagaacgacttaccgccaggaactcccgacgcctttgctcaactgctgacttgtccctattgcgatagaggatacaaacgcctcacctccttgaaggaacatatcaaatatcggcatgaaaagaatgaagagaatttttcttgtcctctgtgttcctacactttcgcctatcgaacccagcttgaacgccacatggtgacacacaaaccgggaactgaccaacatcagatgctcacacagggggctggaaaccgcaagtttaaatgcaccgaatgtggaaaagcctttaagtacaaacaccaccttaaggaacacctgcgcattcacagtggcgagaaaccatacgaatgcccgaattgtaagaagcggttctctcacagcggcagttatagtagtcacatctcgagcaagaagtgtatcggccttatcagcgtaaatggtcgcatgcgcaacaatattaagacaggcagcagtccaaattccgtgtcatcatctccaaccaactcagccattacccagttacgtaacaaattagagaacgggaaacccctgagcatgagcgagcagaccggactgctgaagtccgggcgtgcacagtggctgaccccactaattcccgctctgttagaggccgaagtagggcgctcccgcggtcagaaaatagagacccttctggcaaacatggttgaacctcgcctgtattag

SEQ ID NO: 182235 - DNA, 1320 bp, Artificial Sequence
  derived and/or modified sequence
atgaaacaaccaatcatggccgatggcccccgctgcaagcgaagaaagcaagcaaatcctcgtcgaaagaacgtcgtcaactacgataacgtcgttgataccggaagcgagaccgacgaagaggataaactccacatagccgaagacgacggaattgccaacccactggaccaggaaacatctcccgctagcgtcccaaaccacgaaagctccccccacgtgagtcaggccctcctccccagggaggaggaggaggacgaaatcagagagggcggggttgaacacccatggcacaacaatgaaattcttcaagcctcagtcgatggacctgaagagatgaaggaagattacgacaccatggggcctgaagccaccatacagaccgccatcaataacggcacggtgaagaacgcgaactgcacttccgattttgaagagtattttgccaagcgtaaattggaggaaagggacggccacgcagtatctatagaggagtacctgcagagatccgacactgcaatcatttacccggaggctcccgaggagctctcacgcttgggaacccctgaggcaaacggccaggaggagaatgaccttcctccgggcactccagatgccttcgctcagctgttaacttgtccctactgtgaccgtggctacaagcgattgacgtccctaaaggaacacattaaatacagacacgagaagaatgaggagaacttttcttgcccattatgctcctacacattcgcatatagaacccagctcgaacggcacatggtgactcataagccagggacggatcaacaccagatgcttacgcagggggcagggaatagaaagttcaagtgtaccgagtgtggtaaagctttcaagtacaagcatcatctgaaggagcatttgcggatccactcaggggaaaaaccctatgagtgtccaaattgcaaaaagcgattcagtcattccggttcctattcctcccatatttcgtctaagaagtgtatagggttaatatctgtaaacggacgtatgagaaacaacatcaagacggggtcgtctccaaattcagtgtcttcgtccccgacaaattctgccattacgcagctaagaaataagctggaaaacggaaagccactgtcgatgagcgagcagactgggctgctgaagattaagactgaacccttagatttcaatgattacaaggtactgatggccacccacggattttccggcacatcacctttcatgaacggtggtctgggagccacaagccccctaggagttcacccaagcgcacagtcacccatgcaacacttgtag

SEQ ID NO: 182236 - DNA, 408 bp, Artificial Sequence
  derived and/or modified sequence
atgaagcagcctattatggctgatggtcccagatgcaagcgccgaaaacaagctaacccacggcgcaaaaacgtggtgaattatgacaacgtagtagacaccggcagtgagacagatgaagaggataagctccacattgcagaagacgacggcatcgccaaccctctcgaccaagagacatcgccagcctctgtccctaaccatgagagtagccctcatgtgtcccaggccctgctccctcgcgaggaggaagaggatgagatacgcgagggcggtgtagagcacccctggcacaataacgaaattctgcaggcgtctgtggatggtccagaagagatgaaggaggactatgacacgatgggtcccgaggctactattcagactgcaatcaacaatggaactggatag

SEQ ID NO: 182237 - DNA, 3645 bp, Artificial Sequence
  derived and/or modified sequence
atgaagcaacccattatggctgacggaccacgttgtaagcggagaaagcaggctaatcctcgccggaaaaacgtggtgaactacgacaatgtggtagatactggctctgaaacagatgaggaggacaaattgcatattgctgaggacgatgggattgctaatccgctggaccaggagacctcacctgcctccgtgccaaatcatgagtcctcaccacacgtgtctcaggcactattgcctcgggaggaggaggaggacgagattagagagggaggtgtggagcatccatggcataataatgagatccttcaggctagtgttgatggtccggaggaaatgaaagaagactatgacaccatggggccggaggctacaattcagaccgccatcaataacggtaccgtcaaaaacgcaaactgtacgtctgatttcgaggagtattttgccaagcgaaagttagaggagagagacggccatgccgtctcaatcgaggagtatctgcaacgcagcgatactgccattatctatccggaagcaccagaggagctgtcacgtctaggtacaccagaggctaatgggcaagaggagaacgacctgccccctgggacacccgacgcatttgctcagttgctgacatgcccatactgtgaccggggctataagcgcctgactagcctgaaagagcatatcaagtatagacacgagaaaaacgaagagaacttttcgtgcccgctgtgctcatacacctttgcctatcgcacgcaactcgaaaggcacatggtgactcacaagccaggcacagatcagcatcaaatgctgacccagggcgctggcaacagaaagtttaaatgcacagaatgtggtaaggctttcaaatataagcatcacttgaaagaacatctgcggatccattcgggtgagaaaccctacgaatgtcctaattgtaagaagcggttcagccatagcggtagttattccagccatatatcctcaaaaaagtgcatcggcctcatttccgtaaacggtcgcatgaggaataatatcaagaccgggagttcccctaactccgtatcgtctagccccacgaactccgctattacccagctgagaaacaaactggagaatggtaaacccctgtctatgagtgagcagacgggcctgctaaagatcaagacagagccgctcgatttcaatgactacaaagtactcatggccactcacgggttctcagggacctccccttttatgaacggcggtttgggagccacaagcccccttggggtacacccgagcgcccagtcaccaatgcagcacctcggagtgggaatggaagcacctcttctaggcttcccaactatgaatagtaatctctcggaagtgcagaaggtgctgcagattgtagacaatactgtttcacgtcagaaaatggactgtaaggctgaagaaatctccaagctcaagggttaccacatgaaggacccctgctcccagccagaggaacaaggcgtcacttccccaaacattccacctgttggattaccagtggtctctcataacggcgccacaaagtcgatcattgactacactctcgaaaaggttaacgaggcaaaagcctgcctgcagagtcttacaacagacagccggaggcagattagtaacatcaagaaggagaaattgaggaccctgatcgaccttgtgacagatgacaagatgatagagaatcacaacatcagtaccccgttttcctgtcagttttgtaaggaaagttttccgggcccaattcctctccatcagcatgagcggtatttatgcaagatgaatgaagagattaaggccgtgctgcagccccacgagaatatcgtaccaaataaggctggggttttcgttgacaacaaggctctacttctgtctagcgttcttagcgaaaagggcatgactagtccaatcaacccatacaaagatcatatgagcgtgctgaaggcctactacgcaatgaatatggaacctaatagtgacgagctactcaagataagcatagcggtgggcctgcctcaggaatttgtaaaggaatggtttgagcagagaaaggtctatcagtatagcaactccaggtccccgagcctggagcgaagttctaagcctcttgcccctaacagcaatccaccaactaaagatagtctcctgcctcggagccctgtcaaaccgatggacagcattaccagccctagtatcgctgagctgcataactctgttacaaactgcgacccaccactcaggttaaccaagccatctcactttactaacatcaagccagttgaaaaacttgaccactcaagatctaataccccaagcccccttaacctgtccagtacatcgtctaagaactcacactcgtcctcatacacgcccaattcattcagcagcgaagaattgcaggccgaacctttggatctcagtctacctaagcaaatgaaagagcctaagagcatcatagccaccaagaataaaacaaaggcttctagcatctcactcgaccataattccgtatcgagcagttccgagaacagcgatgaaccgctgaacctcacctttattaagaaggaattcagcaattctaacaacttggacaacaagagtactaatcccgtgttctctatgaacccctttagcgccaaacccctgtatacagccctccctccgcagagcgctttcccaccagctacttttatgccgcccgtgcaaacatcaatccctgggctgcgaccgtatcccggcctggaccaaatgtcgttcctcccccatatggcctacacctaccctaccggcgccgccactttcgccgacatgcagcagcgtcgcaaataccagcgaaagcaaggatttcaaggagagctgcttgacggggcccaggactacatgagcggtctggacgacatgacagatagtgattcttgcctgtccaggaaaaaaatcaagaaaacggagtccggcatgtacgcatgtgatctgtgcgacaagacttttcagaaatctagctcactccttagacataaatacgagcacaccggaaagcgccctcatcagtgccagatttgcaaaaaagctttcaaacacaaacatcacctgatagagcattcaaggcttcactccggtgagaaaccctaccagtgcgacaaatgtggcaagcggttctctcacagcgggagctacagccagcatatgaaccacaggtactcctactgcaaacgggaggctgaagagcgcgaagctgctgagagagaagccagggaaaagggccatctcgaacccacagagcttctcatgaacagggcttacctgcagagcatcacccctcagggttactctgactcagaggagagggagtcaatgcccagggacggtgagtctgagaaggagcacgaaaaggaaggggaggatggatacggcaaacttggccggcaagacggggatgaggagttcgaagaagaggaggaagagtccgaaaataaaagtatggacaccgatccggagactattcgcgatgaggaagagacaggtgaccattccatggatgactcatccgaggacgggaaaatggagacaaaatctgatcacgaggaagacaacatggaggacggcatgtag

SEQ ID NO: 182238 - DNA, 2109 bp, Artificial Sequence
  derived and/or modified sequence
atgaaacagccgattatggcggacggtccaagatgcaagcggcgaaaacaagctaaccctcgtcggaaaaacgtagttaattacgacaatgtcgtggatacaggaagtgagaccgacgaggaagataaactgcacattgcagaagacgatggtatcgctaacccactggatcaggagacctcccccgcctcagtcccgaatcacgagagcagtccccacgtatctcaggccctgctgccccgtgaggaggaagaggatgaaatcagagagggaggcgtagaacacccctggcacaataacgaaatattgcaggcatccgtggacgggcccgaagagatgaaggaagactatgacaccatgggccccgaagccaccatccagacagcaatcaataatggtaccgtcaaaaacgctaattgcactagcgactttgaagagtactttgctaaacggaaacttgaggagcgtgatggtcatgccgtctccatcgaagaatacttacagagatctgataccgctattatctacccggaagctcccgaagagctgtcccgtctcggaacaccggaggcaaatggccaagaagagaacgacctgccgcccggtacccctgacgcctttgctcagctgctgacatgcccttattgtgaccgcggatataaaagactgacaagcctgaaagagcatatcaaatatcgacatgaaaagaatgaggaaaatttcagttgccctctgtgttcttacacattcgcttataggacgcagcttgaacggcatatggtcacacacaaacccggaacagaccagcatcagatgctaacccaaggcgccggaaatcgaaaatttaagtgcacagagtgcggtaaagcatttaaatacaaacatcatctgaaagaacacctcagaattcacagtggggagaaaccatacgagtgtcccaattgcaagaaacggttctcacacagcggctcctatagctctcacatctcatctaaaaagtgtatcggactcatttccgtgaatggacggatgagaaataacattaaaaccggaagttcacctaattctgtgagctcctccccaaccaattccgccattacacaactgcgaaacaaattggaaaatggtaaaccactcagtatgtctgaacaaaccggtctcctgaagatcaaaactgagcctctcgattttaatgattacaaagtgctgatggccacacacggcttctccgggactagcccattcatgaacggtgggctgggagctacctcacccctaggtgtccacccttcagctcagagcccaatgcaacatttgggggttgggatggaggcccctctcctgggattccccactatgaacagcaacctgtctgaggtgcagaaggtgcttcagatcgtcgataataccgtcagcaggcagaaaatggattgtaaagcggaggagattagcaagctgaaaggataccacatgaaagatccctgttctcagcctgaggaacaaggggttactagcccaaatattccccctgtgggcctccctgtcgtctcccacaatggggccaccaagagcatcatcgactataccctcgagaaggtgaatgaagccaaggcgtgcctgcagagcctgactacagattcacgaagacaaatcagcaacattaagaaagagaaattgagaacacttatcgatttggtcacagatgataagatgatcgaaaaccacaatattagcacccccttctcatgccaattctgtaaggagagcttccccgggcccatcccacttcaccagcacgaaaggtatttgtgtaaaatgaatgaagaaatcaaagccgtgcttcaaccccatgagaacatcgttccgaataaagccggggtatttgtggataacaaagccctgttactgagtagcgttctttcagaaaagggaatgacatctccaatcaacccttacaaagatcacatgtcagtgctcaaggcctactacgctatgaacatggaaccaaatagtgatgagcttctgaaaatttctattgccgtcgggcttccccaggagtttgtgaaagaatggttcgaacagcgaaaagtctatcagtatagtaactag

SEQ ID NO: 182239 - DNA, 192 bp, Artificial Sequence
  derived and/or modified sequence
atgaaacaacccatcatggctgacggccctaggtgcaagagaaggaaacaggcaaacccacgcagaaaaaacgtagtgaactacgacaacgtcgtggacacaggtagcgagacagacgaggaggataagcttcacatcgcagaggacgatggaatcgcgaaccctctagatcaggagacttctccagcttag

SEQ ID NO: 182240 - DNA, 3645 bp, Artificial Sequence
  derived and/or modified sequence
atgaagcaacctataatggccgacggacctagatgtaagaggcgtaaacaggcaaacccaagacgcaagaatgtggtcaactacgataacgtggtggacaccggcagcgaaactgacgaggaggataagctccatattgccgaggatgatgggatcgctaaccccctggaccaggaaacaagtccagcctccgttccgaatcacgaaagctccccccacgtgtctcaggcgctcctcccacgggaggaagaagaggacgagatacgcgaggggggggtcgaacacccctggcacaacaatgagatcctgcaggcaagcgtcgatggtcccgaggagatgaaagaggactacgacacgatgggcccggaagccacaatccagacggccatcaataatggaacagttaaaaacgccaattgtacgtccgacttcgaagaatatttcgcaaagagaaagctggaggagcgagacggccacgcggtgtccatcgaggaatacctgcagcgcagtgatactgcgattatttaccctgaggctcctgaggagttaagccgtctggggacgccagaggctaatggacaggaggagaatgatctaccaccaggtactcccgacgcttttgcccagctgctgacctgtccgtattgcgaccgcggctataagcggctgaccagtctgaaggagcatatcaagtatcgtcacgaaaagaatgaggagaatttctcttgccccttgtgtagctacacttttgcctaccgcacacagcttgagcggcatatggtcacgcacaaacccggaacagaccagcaccagatgctcacgcagggagccggtaacaggaaatttaagtgtacggagtgcggaaaagccttcaagtataaacaccacttgaaggagcatttacgtattcacagcggcgagaagccgtacgagtgccctaactgcaagaaacggtttagccacagcggtagttatagctcccatattagttccaaaaaatgtataggccttatctcagtgaacggtagaatgcgcaataacattaaaaccgggtccagtccgaactcagtcagcagtagccctaccaatagtgcgattacccagttgcgcaacaaactagaaaacggcaagccactttctatgtcagagcaaaccgggttactgaagattaaaacagagcccttggattttaatgactataaggtcctgatggccactcatggatttagtggcactagcccgttcatgaacggtggattgggtgccacaagccctctgggtgtccacccatccgcacagtcacccatgcaacatttgggggtaggtatggaagcaccgctgttaggatttcctactatgaacagcaatttaagcgaggtccagaaggtcctccagatagtggacaatacagtgtctcgccagaagatggactgcaaggcagaagagatttccaagttgaaaggataccatatgaaagacccatgcagccagccagaagaacagggagtcacctccccgaacattccacccgttggcttacctgtagtatcccacaacggcgccaccaagtccatcatcgactacacattagagaaggttaacgaggcaaaggcttgtctgcaaagcctcaccaccgacagtcggcgacagatatcgaacataaaaaaagagaagctgaggaccttgatcgacctggtaacagacgataaaatgattgaaaaccacaacatttctacccccttctcatgtcaattttgtaaggagtcatttcccgggcccattccactgcatcagcatgagcggtacctgtgcaagatgaacgaggagattaaagcagtgttgcagccccacgagaacattgtgcctaataaggctggagtcttcgttgacaataaggcgttgctgctgagctccgtactcagtgagaagggcatgaccagtcccatcaacccctacaaagatcacatgagcgtgttaaaggcatactacgccatgaatatggagccgaactctgatgagcttcttaagatttcgattgcagtcgggttaccacaggagtttgtcaaggagtggttcgaacagagaaaggtttaccagtacagtaactcccgaagcccgtcactggaacggtcaagcaagcccctggcccctaacagtaaccctcctacgaaagattcgttgttgccacgctcacccgtaaagcccatggattctatcacttcaccatccattgcggaactgcacaatagcgtcacaaactgcgatccaccccttcggttaacaaagcccagccacttcaccaacataaagccggtggagaagcttgaccacagcaggtcaaacacgccatcccctctgaaccttagctccactagctccaagaactcccactcatccagttacactccaaattcctttagctcagaagaacttcaggccgaacccctagatctgtctctgccaaagcaaatgaaagagcctaaatctataattgctacaaagaataaaactaaggcaagctccatcagcctggaccacaactcagtgtcctcttcatccgaaaattcagatgagcccctgaaccttaccttcatcaagaaggaattctctaacagcaacaacctggacaacaagtctaccaatcccgtattctccatgaatccgttttctgcaaaacccctgtatactgccctgccccctcaaagtgcttttccccccgcaacctttatgcctcccgtccagaccagcatccccgggcttagaccttacccaggtttagaccagatgtcttttcttccccacatggcttatacctatcctactggtgccgctacctttgccgatatgcagcagaggaggaagtatcagcgtaagcagggcttccagggtgagctcctggacggtgctcaggactatatgtctgggttggatgacatgacggacagcgactcctgtctgtctcgcaaaaaaattaaaaaaactgagagcgggatgtacgcgtgcgacctttgtgataagacattccaaaaaagttccagcttgctgcggcacaagtacgaacacaccggcaaaaggccacatcagtgccagatctgtaaaaaggcattcaaacataagcaccacttgatagagcattccagactgcacagcggcgagaagccatatcagtgtgacaagtgcggcaagagattcagtcactccgggtcatactcccagcacatgaatcaccgctacagctactgtaagagagaagccgaagaacgggaagcggccgaacgtgaagcccgcgaaaagggccacctggagcctaccgaattattgatgaaccgtgcctatctgcagtccattacccctcaggggtatagcgactctgaggagcgtgaaagcatgcctagagacggtgagtcagagaaagagcacgagaaagagggggaggatgggtacggcaaactagggcggcaagacggagacgaggagtttgaggaggaggaggaggagtcagagaataaatcaatggatactgatcctgagaccatccgagacgaggaggaaaccggagatcacagtatggatgactcctctgaggacggaaaaatggaaactaaatcagaccacgaagaagacaatatggaagatggcatgtag

SEQ ID NO: 182241 - DNA, 3645 bp, Artificial Sequence
  derived and/or modified sequence
atgaagcagcccatcatggctgatggcccccgctgcaagaggaggaagcaggccaaccccaggaggaagaatgtggtgaactatgacaacgtggtggacaccggcagcgagacagatgaggaggacaagctgcacatcgccgaggatgatggcatcgccaaccccctggaccaggagaccagccctgcctctgtgcccaaccacgagagcagcccccacgtgtcccaggccctgctgccccgggaggaggaggaggatgagatccgggagggcggcgtggagcacccctggcacaacaatgagatcctgcaggcctctgtggatggccctgaggagatgaaggaggactatgacaccatgggccctgaggccaccatccagacagccatcaacaacggcaccgtgaagaatgccaactgcaccagtgactttgaggagtactttgccaagaggaagctggaggagagagatggccatgctgtgtccattgaggagtacctgcagaggagtgacacagccatcatctacccagaggcccctgaggagctgagccggctgggcaccccagaggccaacggccaggaggagaatgacctgcccccaggcaccccagatgcctttgcccagctgctgacctgcccctactgtgaccggggctacaagaggctgaccagcctgaaggagcacatcaagtacagacatgagaagaatgaggagaacttcagctgccccctgtgcagctacacctttgcctaccgcacccagctggagcggcacatggtgacccacaagccaggcacagaccagcaccagatgctgacccagggcgccggcaacaggaagttcaagtgcacagaatgtgggaaggccttcaagtacaagcaccacctgaaggagcacctgcgcatccacagcggggagaagccctatgaatgtcccaactgcaagaagcgcttcagccacagcggcagctacagcagccacatcagcagcaagaagtgcatcggcctcatctctgtgaatggaaggatgaggaacaacatcaagacaggcagcagccccaacagcgtgagcagcagccccaccaacagcgccatcacccagctgaggaacaagctggagaatggcaagcccctgtccatgtctgagcagacaggcctgctgaagatcaagacagagcccctggacttcaatgactacaaggtgctgatggccacccacggcttcagcggcaccagccccttcatgaatggaggcctgggcgccaccagccccctgggcgtgcaccccagcgcccagagccccatgcagcacctgggcgtgggcatggaggcccccctgctgggcttccccaccatgaacagcaacctgtctgaggtgcagaaggtgctgcagatcgtggacaacacagtgtcccggcagaagatggactgcaaggccgaggagatcagcaagctgaagggctaccacatgaaggacccctgcagccagcctgaggagcagggcgtgaccagccccaacatcccccctgtgggcctgcctgtggtgagccacaatggagccaccaagagcatcatcgactacaccctggagaaggtgaatgaggccaaggcctgcctgcagagcctgaccacagacagccggcggcagatcagcaacatcaagaaggagaagctgcggaccctgattgacctggtgacagatgacaagatgattgagaaccacaacatcagcacccccttcagctgccagttctgcaaggagagcttccctggccccatccccctgcaccagcacgagcgctacctgtgcaagatgaatgaggagatcaaggctgtgctgcagccccatgagaacatcgtgcccaacaaggccggcgtgtttgtggacaacaaggccctgctgctgagctctgtgctgtctgagaagggcatgaccagccccatcaacccctacaaggaccacatgtctgtgctgaaggcctactatgccatgaacatggagcccaacagtgatgagctgctgaagatcagcattgctgtgggcctgccccaggagtttgtgaaggagtggtttgagcagaggaaggtgtaccagtacagcaacagccgcagccccagcctggagaggagcagcaagcccctggcccccaacagcaacccccccaccaaggacagcctgctgcccaggagccctgtgaagcccatggacagcatcaccagccccagcattgctgagctgcacaacagcgtgaccaactgtgacccccccctgcggctgaccaagcccagccacttcaccaacatcaagcctgtggagaagctggaccacagccgcagcaacacccccagccccctgaacctgagcagcaccagcagcaagaacagccacagcagcagctacacccccaacagcttcagcagcgaggagctgcaggccgagcccctggacctgagcctgcccaagcagatgaaggagcccaagagcatcatcgccaccaagaacaagaccaaggccagcagcatcagcctggaccacaacagcgtgagcagcagcagcgagaacagtgatgagcccctgaacctgaccttcatcaagaaggagttcagcaacagcaacaacctggacaacaagagcaccaaccctgtgttctccatgaaccccttcagcgccaagcccctgtacacagccctgcccccccagagcgccttccccccagccaccttcatgcctcctgtgcagaccagcatccctggcctgcggccctacccaggcctggaccagatgtccttcctgccccacatggcctacacctaccccactggagctgccacctttgctgacatgcagcagaggaggaagtaccagaggaagcagggcttccagggcgagctgctggatggagcccaggactacatgagcggcctggatgacatgacagacagcgacagctgcctgagcaggaagaagatcaagaagacagagagcggcatgtatgcctgtgacctgtgtgacaagaccttccagaagagcagcagcctgctgcggcacaagtatgagcacacaggcaagaggccccaccagtgccagatctgcaagaaggccttcaagcacaagcaccacctgattgagcacagccggctgcacagcggggagaagccctaccagtgtgacaagtgtgggaagcgcttcagccacagcggcagctacagccagcacatgaaccaccgctacagctactgcaagcgggaggccgaggagcgggaggccgctgagcgggaggcccgggagaagggccacctggagcccacagagctgctgatgaacagagcctacctgcagagcatcaccccccagggctacagcgacagcgaggagcgggagagcatgcccagagatggagagagcgagaaggagcacgagaaggagggagaagatggctacggcaagctgggccggcaggatggagatgaggagtttgaggaggaggaggaggagagcgagaacaagtccatggacacagatcctgagaccatcagagatgaggaggagactggagaccacagcatggatgacagcagtgaagatggcaagatggagaccaagagtgaccacgaggaggacaacatggaggatggcatgtag

SEQ ID NO: 182242 - DNA, 1275 bp, Artificial Sequence
  derived and/or modified sequence
atggctgatggcccccgctgcaagaggaggaagcaggccaaccccaggaggaagaatgtggtgaactatgacaacgtggtggacaccggcagcgagacagatgaggaggacaagctgcacatcgcagaagatgatggcatcgccaaccccctggaccaggagaccagccctgcctctgtgcccaaccacgagagcagcccccacgtgtcccaggccctgctgccccgggaggaggaggaggatgagatccgggagggcggcgtggagcacccctggcacaacaatgagatcctgcaggcctctgtggatggccctgaggagatgaaggaggactatgacaccatgggccctgaggccaccatccagacagccatcaacaatggaacagtgaagaatgccaactgcaccagtgactttgaggagtactttgccaagaggaagctggaggagagagatggccatgctgtgtccattgaggagtacctgcagaggagtgacacagccatcatctacccagaggcccctgaggagctgagccggctgggcaccccagaggccaacggccaggaggagaatgacctgcccccaggcaccccagatgcctttgcccagctgctgacctgcccctactgtgaccggggctacaagaggctgaccagcctgaaggagcacatcaagtacagacatgagaagaatgaggagaacttcagctgccccctgtgcagctacacctttgcctaccgcacccagctggagcggcacatggtgacccacaagccaggcacagaccagcaccagatgctgacccagggcgccggcaacaggaagttcaagtgcacagaatgtgggaaggccttcaagtacaagcaccacctgaaggagcacctgcgcatccacagcggggagaagccctatgagtgccccaactgcaagaagcgcttcagccacagcggcagctacagcagccacatcagcagcaagaagtgcatcggcctcatctctgtgaatggccgcatgaggaacaacatcaagacaggcagcagccccaacagcgtgagcagcagccccaccaacagcgccatcacccagctgaggaacaagctggagaatggcaagcccctgtccatgtctgagcagacaggcctgctgaagagcggccgggcccagtggctgacccccctcatcccagccctgctggaggccgaggtgggccgcagccggggccagaagattgagaccctgctggccaacatggtggagccccggctgtactag

SEQ ID NO: 182243 - DNA, 1320 bp, Artificial Sequence
  derived and/or modified sequence
atgaagcagcccatcatggctgatggcccccgctgcaagaggaggaagcaggccaaccccaggaggaagaatgtggtgaactatgacaacgtggtggacaccggcagcgagacagatgaggaggacaagctgcacatcgccgaggatgatggcatcgccaaccccctggaccaggagaccagccctgcctctgtgcccaaccacgagagcagcccccacgtgtcccaggccctgctgccccgggaggaggaggaggatgagatccgggagggcggcgtggagcacccctggcacaacaatgagatcctgcaggcctctgtggatggccctgaggagatgaaggaggactatgacaccatgggccctgaggccaccatccagacagccatcaacaacggcaccgtgaagaatgccaactgcaccagtgactttgaggagtactttgccaagaggaagctggaggagagagatggccatgctgtgtccattgaggagtacctgcagaggagtgacacagccatcatctacccagaggcccctgaggagctgagccggctgggcaccccagaggccaacggccaggaggagaatgacctgcccccaggcaccccagatgcctttgcccagctgctgacctgcccctactgtgaccggggctacaagaggctgaccagcctgaaggagcacatcaagtacagacatgagaagaatgaggagaacttcagctgccccctgtgcagctacacctttgcctaccgcacccagctggagcggcacatggtgacccacaagccaggcacagaccagcaccagatgctgacccagggcgccggcaacaggaagttcaagtgcacagaatgtgggaaggccttcaagtacaagcaccacctgaaggagcacctgcgcatccacagcggggagaagccctatgaatgtcccaactgcaagaagcgcttcagccacagcggcagctacagcagccacatcagcagcaagaagtgcatcggcctcatctctgtgaatggaaggatgaggaacaacatcaagacaggcagcagccccaacagcgtgagcagcagccccaccaacagcgccatcacccagctgaggaacaagctggagaatggcaagcccctgtccatgtctgagcagacaggcctgctgaagatcaagacagagcccctggacttcaatgactacaaggtgctgatggccacccacggcttcagcggcaccagccccttcatgaatggaggcctgggcgccaccagccccctgggcgtgcaccccagcgcccagagccccatgcagcacctgtag

SEQ ID NO: 182244 - DNA, 408 bp, Artificial Sequence
  derived and/or modified sequence
atgaagcagcccatcatggctgatggcccccgctgcaagaggaggaagcaggccaaccccaggaggaagaatgtggtgaactatgacaacgtggtggacaccggcagcgagacagatgaggaggacaagctgcacatcgccgaggatgatggcatcgccaaccccctggaccaggagaccagccctgcctctgtgcccaaccacgagagcagcccccacgtgtcccaggccctgctgccccgggaggaggaggaggatgagatccgggagggcggcgtggagcacccctggcacaacaatgagatcctgcaggcctctgtggatggccctgaggagatgaaggaggactatgacaccatgggccctgaggccaccatccagacagccatcaacaacggcaccggctag

SEQ ID NO: 182245 - DNA, 2109 bp, Artificial Sequence
  derived and/or modified sequence
atgaagcagcccatcatggctgatggcccccgctgcaagaggaggaagcaggccaaccccaggaggaagaatgtggtgaactatgacaacgtggtggacaccggcagcgagacagatgaggaggacaagctgcacatcgccgaggatgatggcatcgccaaccccctggaccaggagaccagccctgcctctgtgcccaaccacgagagcagcccccacgtgtcccaggccctgctgccccgggaggaggaggaggatgagatccgggagggcggcgtggagcacccctggcacaacaatgagatcctgcaggcctctgtggatggccctgaggagatgaaggaggactatgacaccatgggccctgaggccaccatccagacagccatcaacaacggcaccgtgaagaatgccaactgcaccagtgactttgaggagtactttgccaagaggaagctggaggagagagatggccatgctgtgtccattgaggagtacctgcagaggagtgacacagccatcatctacccagaggcccctgaggagctgagccggctgggcaccccagaggccaacggccaggaggagaatgacctgcccccaggcaccccagatgcctttgcccagctgctgacctgcccctactgtgaccggggctacaagaggctgaccagcctgaaggagcacatcaagtacagacatgagaagaatgaggagaacttcagctgccccctgtgcagctacacctttgcctaccgcacccagctggagcggcacatggtgacccacaagccaggcacagaccagcaccagatgctgacccagggcgccggcaacaggaagttcaagtgcacagaatgtgggaaggccttcaagtacaagcaccacctgaaggagcacctgcgcatccacagcggggagaagccctatgaatgtcccaactgcaagaagcgcttcagccacagcggcagctacagcagccacatcagcagcaagaagtgcatcggcctcatctctgtgaatggaaggatgaggaacaacatcaagacaggcagcagccccaacagcgtgagcagcagccccaccaacagcgccatcacccagctgaggaacaagctggagaatggcaagcccctgtccatgtctgagcagacaggcctgctgaagatcaagacagagcccctggacttcaatgactacaaggtgctgatggccacccacggcttcagcggcaccagccccttcatgaatggaggcctgggcgccaccagccccctgggcgtgcaccccagcgcccagagccccatgcagcacctgggcgtgggcatggaggcccccctgctgggcttccccaccatgaacagcaacctgtctgaggtgcagaaggtgctgcagatcgtggacaacacagtgtcccggcagaagatggactgcaaggccgaggagatcagcaagctgaagggctaccacatgaaggacccctgcagccagcctgaggagcagggcgtgaccagccccaacatcccccctgtgggcctgcctgtggtgagccacaatggagccaccaagagcatcatcgactacaccctggagaaggtgaatgaggccaaggcctgcctgcagagcctgaccacagacagccggcggcagatcagcaacatcaagaaggagaagctgcggaccctgattgacctggtgacagatgacaagatgattgagaaccacaacatcagcacccccttcagctgccagttctgcaaggagagcttccctggccccatccccctgcaccagcacgagcgctacctgtgcaagatgaatgaggagatcaaggctgtgctgcagccccatgagaacatcgtgcccaacaaggccggcgtgtttgtggacaacaaggccctgctgctgagctctgtgctgtctgagaagggcatgaccagccccatcaacccctacaaggaccacatgtctgtgctgaaggcctactatgccatgaacatggagcccaacagtgatgagctgctgaagatcagcattgctgtgggcctgccccaggagtttgtgaaggagtggtttgagcagaggaaggtgtaccagtacagcaactag

SEQ ID NO: 182246 - DNA, 192 bp, Artificial Sequence
  derived and/or modified sequence
atgaagcagcccatcatggctgatggcccccgctgcaagaggaggaagcaggccaaccccaggaggaagaatgtggtgaactatgacaacgtggtggacaccggcagcgagacagatgaggaggacaagctgcacatcgccgaggatgatggcatcgccaaccccctggaccaggagaccagccctgcctag

SEQ ID NO: 182247 - DNA, 3645 bp, Artificial Sequence
  derived and/or modified sequence
atgaagcagcccatcatggccgacggcccccggtgcaagcggcggaaacaggcgaacccaaggcgtaaaaacgtcgttaattacgacaatgtagtggacaccggatctgaaacagacgaagaagacaaattgcatatcgccgaagatgacggcatcgccaatccactcgatcaggagacgtctcctgctagcgtgcctaatcacgagtcatccccacacgtgtcacaggctctgctgccacgagaagaagaagaggacgagattagagaaggcggagtggagcacccttggcacaataacgagatcctacaggcttctgtcgacgggcctgaagagatgaaagaggactatgacaccatgggtcccgaggccaccattcagaccgcaattaataatggaacagtcaagaatgccaactgtacaagcgatttcgaggagtactttgccaagcgcaagctcgaggaacgagatggacatgctgtcagtatagaagagtatttgcaaaggtctgataccgctatcatctacccagaagcacctgaagagcttagcaggcttgggacccctgaagcaaacggccaagaagagaatgaccttccgcctggcaccccggatgcgtttgcacagctgctcacctgtccctactgcgatcggggttataaaagactaacctccctgaaggagcacatcaagtacagacatgagaagaatgaggagaatttctcgtgccccctctgtagctacacttttgcctaccgcacccagttagagagacatatggtgactcacaaaccaggtaccgaccaacaccaaatgctcacgcagggcgcagggaaccggaagttcaaatgcacagaatgcggaaaggcctttaagtataaacatcaccttaaggagcacttgcgcatacacagcggagagaaaccctacgaatgtcccaactgtaaaaagagattctcccatagcggctcgtacagttctcatatcagtagcaaaaaatgcattggtctcatttctgtgaacgggcgaatgcgcaataatatcaaaacggggtcctctccgaactcagtctcctcgagtccaaccaactccgccattacccagctgcgcaataagctggaaaacgggaaaccactctctatgtctgagcagacaggactccttaagatcaaaaccgagcctctagactttaacgattataaggtgctgatggccacacacggattttcaggaacctctccttttatgaatggcggcttgggagccacatctcccctaggggtccatccgagcgcccagtcccccatgcagcacttgggcgtcggcatggaggcacccctgttgggattccctacaatgaattctaatctgtctgaagtgcagaaagtgcttcagatcgtggacaacaccgtgtcccgccagaaaatggactgcaaagccgaggagatttccaaattgaagggttaccacatgaaggatccgtgctcccagcccgaggagcagggtgtgacatctcccaatattcctccagtaggccttcccgttgttagtcacaacggtgcaacaaagagcataatcgattatactcttgaaaaggtgaacgaggcaaaggcctgtttgcagagcctgacaaccgatagcagaaggcagatcagcaacatcaaaaaagagaagctaaggactttgatagatttagtgacagatgacaagatgatcgaaaaccataatatatccacccccttctcgtgtcagttttgtaaagaatctttccccgggccaatacctctgcatcagcacgagaggtacctgtgtaagatgaacgaagaaataaaagcagttctccagccacacgagaatatcgtgcctaataaggccggggtctttgtggataataaggcccttctgctctccagtgtgttaagtgagaagggaatgaccagcccaattaacccctataaggaccacatgtccgtgctcaaggcgtactacgctatgaatatggagccaaatagtgatgaattgctcaagatttctatcgctgtcgggttgccccaggaattcgtgaaggagtggttcgagcagcgaaaagtctaccaatactctaattctcgaagtccatcactggaacgaagttccaagcctttggctccaaattctaatccccccactaaggatagcctgctcccaaggtccccagtcaaaccgatggatagcattactagcccctccatcgccgaacttcacaattctgtgaccaattgcgacccaccacttcgcttaaccaagcctagtcattttacaaacattaaaccagtggaaaaattggatcattcccgatccaataccccctcacctttgaacttgtcatccacatcctctaaaaatagccattcgagctcttatacccctaactctttcagctcggaagaactccaggccgagcccttagacctctccttgcccaaacagatgaaggaacctaaatccataatcgcaacgaagaataagactaaggctagtagcattagtctggatcataacagcgtctcaagctcgagcgaaaattcagatgaaccccttaacctcaccttcatcaagaaagaattttcaaattccaacaatttagataacaagtcaacaaacccagtttttagcatgaatccttttagcgctaagccactctacacagctttgcctccacagtccgcatttccacctgccacattcatgccacccgtgcagacatcaattccaggactgcgcccgtatccgggcttggaccagatgagcttcctgccccacatggcatacacttaccccaccggcgctgctacttttgccgatatgcagcagcggcggaagtaccagcgcaaacaagggttccagggagagttgctggatggcgcccaggattatatgagcgggctggatgatatgactgactctgactcctgcctaagtagaaagaaaattaagaagactgaaagcggtatgtacgcctgcgacctctgcgacaaaacattccagaaatcgtcttccctcctacgtcataagtacgagcatacaggcaaacgccctcatcagtgccagatctgtaagaaagcgttcaaacataaacatcacttaatagagcatagccgcttgcatagcggagagaaaccctaccagtgtgacaagtgcggcaaacggttttcccacagtggctcatacagccaacatatgaatcaccgctactcctattgtaaacgcgaggctgaagaaagggaagccgccgagagggaagccagggaaaaaggtcacttagagcccactgaactcctcatgaaccgcgcttacctgcaatccatcacccctcagggatactcagactctgaggagagagaatccatgccacgcgacggagaaagtgagaaggagcacgagaaggaaggtgaagacggctacgggaagctcgggagacaagatggggatgaagaatttgaggaagaggaagaggagagcgaaaataaatctatggacaccgacccggagacaattcgtgacgaagaggagacgggggaccattcaatggatgatagctctgaggatggtaaaatggagacgaaaagcgaccacgaggaggataacatggaagacgggatgtag

SEQ ID NO: 182248 - DNA, 1275 bp, Artificial Sequence
  derived and/or modified sequence
atggccgacggcccccggtgcaagcggcggaagcaggccaacccccggcggaaaaatgtggttaattacgataatgtcgtggatacgggatcagaaaccgacgaggaggataaactccacattgcagaagacgatggcatcgcaaacccgctggatcaagagacctcccccgctagtgttccaaaccatgagagctccccccatgtctctcaggcacttttgccgagagaggaagaggaagatgagattagagagggcggggtggaacacccatggcataacaacgagatcttgcaggcttctgttgacgggcctgaggaaatgaaagaggattacgacacgatgggccccgaggcaactattcagactgccatcaacaacggaacagttaagaatgcgaactgcacaagcgacttcgaagagtactttgccaagcggaaactagaggaacgagacgggcatgcggtgtctatcgaagagtacctgcagcggagtgataccgcgatcatataccctgaggcccccgaagagctgtcaaggctagggacccctgaggcaaacggtcaggaggaaaacgacttgccccccggaacacctgacgcgttcgctcagctactcacgtgtccctactgtgatagaggctacaagagattaaccagcctcaaggagcacatcaaataccgccatgagaagaacgaagaaaacttcagttgccctctgtgttcgtacacctttgcataccggacccaactcgaaaggcacatggtgacacataagccgggtaccgaccagcaccagatgctgactcagggggccgggaatcgtaaattcaagtgcaccgagtgcggaaaggcattcaagtataaacaccacctgaaggaacacctgcggatacatagcggtgagaagccctatgagtgtcccaattgtaaaaaacggttcagccattcaggcagttactcatcccacatctcatctaagaagtgcataggactcatcagcgtcaatggccgaatgcggaacaatatcaagacagggtccagtccaaacagcgtttcctccagtcctactaactcagccatcacacagctgcggaacaaattggagaacggaaaaccgctgtctatgtctgagcagacagggctgctgaagtcgggtagagcccagtggcttaccccactcattccagctttactggaggctgaggtcgggcggagtcggggacagaagatcgagacgctcctggctaacatggttgaacctagactttattag

SEQ ID NO: 182249 - DNA, 1320 bp, Artificial Sequence
  derived and/or modified sequence
atgaagcagcccatcatggccgacggcccccggtgcaagcggcggaagcaggcaaatccacgacgcaagaatgtagtgaactacgacaatgttgtggacacaggaagcgaaacagatgaggaagataagctgcacattgccgaggacgatggaattgctaaccccctcgaccaggagacatctcctgcttccgtgccgaaccatgagtcctccccgcacgtgagccaggctcttttgccccgtgaagaagaggaagatgaaatacgagaaggaggagtggagcacccctggcataacaatgagattctgcaggcttccgtggatggacccgaggagatgaaagaagattacgacacgatgggacccgaagcgacaattcaaacagcgataaacaatgggaccgttaaaaatgctaattgcacgtcggactttgaggaatattttgcaaagaggaagctggaggaaagggacggtcacgcagttagcattgaggagtacctgcagaggagcgacaccgctatcatttaccctgaggccccagaggagctcagtcgtctaggcacccccgaggcaaatggtcaggaagagaatgaccttccacctgggaccccagacgcttttgcccaattactgacttgtccttactgtgacaggggttacaaacgtctgacttcccttaaggaacacatcaagtatcgccatgagaagaacgaggaaaattttagttgtcctctctgtagttatacttttgcttatcggactcagctggaaaggcatatggttactcataagccaggcaccgatcagcatcagatgctcacacaaggagccggaaaccggaaatttaagtgtaccgaatgcggcaaagcttttaagtataaacaccacctgaaggagcacctgcggatacactccggtgagaaaccatatgaatgtccaaactgtaagaaacgtttcagtcactctggtagctacagctcccatatctccagcaaaaagtgcatcggcttaatttcagtgaatggccgaatgaggaacaacataaagactggctcgtccccaaatagcgtctccagttctcctactaactctgccattacccagctacggaacaaactggagaatggaaaacctctctccatgtccgaacagacaggcctcttaaagatcaagacggagcctttggattttaatgactacaaagtcctgatggcaactcacggcttttctggcacgtctcccttcatgaacggaggcctcggggctacatcgcccctgggtgtgcacccatccgctcagagtccgatgcagcatctttag

SEQ ID NO: 182250 - DNA, 408 bp, Artificial Sequence
  derived and/or modified sequence
atgaagcagcccatcatggccgacggcccccggtgcaagcggcggaaacaggccaatccacggaggaagaacgtcgttaactacgataacgtggtggacaccgggtctgaaacagatgaagaagataagctacatattgcagaggacgatggcatcgctaacccactggatcaagagacgagccccgccagcgttccgaatcacgagtcatcccctcacgtatcacaggctctgcttcctagagaagaggaggaagatgaaattagagaaggcggagttgaacatccatggcacaacaacgaaattctgcaagctagtgtggacggacccgaggagatgaaagaggattatgataccatgggaccagaggctaccatccaaaccgcaattaataacggaaccgggtag

SEQ ID NO: 182251 - DNA, 3645 bp, Artificial Sequence
  derived and/or modified sequence
atgaagcagcccatcatggccgacggcccccggtgcaagcggcggaagcaggcaaatccaaggaggaaaaatgtcgtgaattatgataacgtcgtggacaccggttccgagaccgacgaggaggacaaattgcacattgcagaagacgatggaattgctaaccccctcgaccaagagacctccccggcaagcgttcctaaccacgagagttcaccccacgttagccaggcactcttgcctagggaagaagaggaggatgagatcagggagggcggcgtcgagcacccatggcataacaacgagattttacaagcctccgtcgacggcccagaggagatgaaggaagactacgacacaatgggccccgaagccactatccagacggccatcaataatggcactgtcaagaacgccaactgtacatctgactttgaagagtattttgccaaacgcaagctcgaggaaagagacggacacgctgtgtccatcgaggagtatctgcagcgcagcgatactgctatcatataccccgaagcacccgaggagttgtctaggttggggacccctgaggccaacggtcaagaagaaaacgatttgccacccggaacgcccgatgcctttgcccagttgctcacctgtccatattgcgatagagggtataaacgtctgacgagcctcaaggagcacatcaaataccggcacgagaagaatgaagagaacttctcttgtcctctgtgctcgtatacgttcgcctatcgtacccaactggaacgtcacatggtgacccacaaacctggtacggaccagcaccagatgctgacacagggagccggaaataggaaatttaaatgcaccgaatgtggcaaggccttcaagtataagcatcacctcaaggagcatctgcgcatccattcaggagaaaaaccttatgagtgtccaaactgcaaaaagcgattctcacattcgggatcctacagcagccatatctcgagtaagaaatgcataggccttattagtgtgaatgggaggatgaggaacaacataaaaaccggaagctcccctaactcggtgtcctcttctcctaccaactctgccattacacaattacgtaataagctcgagaatggcaagcctttgtctatgtcagaacagactgggctcctgaaaatcaagactgagcctctggatttcaacgattataaggtgctcatggccacgcatggatttagcgggacctctccgtttatgaatggcggattaggtgcaacgtctccattaggggtacatcccagtgcacagagcccgatgcaacatttgggagtcgggatggaagcgccgctcctgggctttccaacaatgaatagtaatttaagcgaagtgcagaaagtcctgcagatcgttgataacaccgtcagtcgacagaaaatggattgtaaagcagaggaaatctctaaactgaaaggctatcacatgaaagatccttgctcccaacccgaggagcagggagtcacctctcctaacatccctccagttggcctgcctgtcgtcagccataacggggcaaccaaatccatcattgactacaccttggagaaggttaacgaggcaaaggcctgcctgcaaagtttgacaaccgatagccgcaggcaaatatccaacatcaaaaaggaaaagctgaggacgctgattgatttggtgaccgatgataaaatgattgagaaccataatatcagcacccctttctcttgccaattctgcaaggagtcctttcccggcccaatccctttgcaccagcatgagcgatacctctgcaagatgaatgaggagatcaaggcggtgctccagccacatgagaatattgttcccaataaagccggggtcttcgttgataataaagccctactcctgtcctctgtccttagcgagaaaggaatgacaagtcccattaatccatacaaagaccatatgagtgtgctgaaagcctactacgctatgaacatggagcctaatagcgatgagctgctaaagatcagcatagccgtgggactacctcaggagttcgtaaaggagtggtttgaacagagaaaggtttaccagtatagtaatagccggtctccttctctcgaaagatccagcaaaccactcgctcccaactctaatccccctacaaaggatagcttacttcctagatccccagtgaaacctatggactccatcacctctccatccatagcggagctgcacaactcagtgaccaattgcgacccacccctcaggctcacaaagccgtctcatttcactaacataaagccggtagagaagcttgatcattcccgctcaaatacgccctcccccctgaatctgtcatcaacgtcaagtaagaatagccattcctcctcttacacacctaactccttttccagcgaggaactccaagccgagcctttagaccttagccttcccaagcagatgaaggagcctaaatcaatcatagcgactaagaataagaccaaggcctcttcaatcagccttgaccataacagcgtgtcctcttcaagcgagaacagcgatgaaccgctgaatttgacattcattaaaaaagaattttcaaattcaaacaatctggataataaatcgaccaatcctgtgttctccatgaaccccttctccgccaaacctttgtataccgccctccctcctcaatctgcatttccacccgctacttttatgcctcctgtccaaacatctatccctgggcttagaccataccccggcctggaccagatgtctttcttaccccatatggcctatacttacccgactggcgccgccacatttgctgacatgcaacagagaagaaaataccagcgaaagcagggttttcagggagaactgctggacggcgcgcaagactacatgtctggattggatgatatgaccgactccgacagctgtctcagccggaagaaaatcaaaaagaccgaaagtggaatgtacgcctgcgatctgtgtgacaagactttccagaagtcgtctagcctgttgcggcacaaatacgagcacacgggaaagcgacctcatcagtgccaaatctgtaagaaagcttttaagcacaagcaccacttaattgagcactccagactacacagcggagaaaaaccataccagtgcgacaaatgcggcaaaagattcagccattcggggtcctattcccaacacatgaaccatcggtatagctactgtaagcgcgaggccgaagagcgtgaagccgctgaaagagaagccagagaaaagggccacctggagcctaccgaactacttatgaatcgagcttacctgcagtctattacacctcagggctattcagacagtgaggagagagagtccatgccacgcgacggcgagtcagagaaagagcatgaaaaagagggagaggatggttacggtaaattgggcaggcaggatggcgatgaagaattcgaggaggaagaagaggagtccgaaaacaagtctatggatacagaccctgagaccatccgggacgaggaagaaaccggcgaccactccatggacgacagtagtgaagatggaaaaatggaaaccaaaagtgatcacgaagaagataacatggaggacggtatgtag

SEQ ID NO: 182252 - DNA, 2109 bp, Artificial Sequence
  derived and/or modified sequence
atgaagcagcccatcatggccgacggcccccggtgcaagcggcggaagcaggctaatcctaggaggaagaacgtggtcaattatgataatgtagtggacaccggatcagaaacagacgaggaagacaagctgcatatcgctgaagatgacgggatcgctaatccattggaccaggagactagccctgcctcagttccgaaccatgaatccagtccacacgtctcacaagccttgctacccagggaagaagaggaggacgagattcgagaggggggcgtagagcacccctggcataataacgagatactgcaggctagcgttgatggacccgaagaaatgaaggaagattacgacaccatgggtcctgaggccaccattcagacagcaattaataatggcactgtaaaaaatgccaattgtacgagcgatttcgaggaatatttcgccaagaggaaactggaagagcgcgacgggcatgccgtgtctatagaagaatatctgcagagaagcgatacagcaattatataccccgaggcccccgaggagctatctcgactggggacccccgaagcgaatggtcaggaagaaaacgacttgccaccaggaacgcctgatgctttcgctcagcttctcacctgcccttactgcgatagaggctataagagactgacatcgctaaaggaacacataaagtatcgacacgagaagaacgaggagaacttcagttgtcccttgtgctcatacacgtttgcctatcggacgcaattggaacgtcacatggtgacccacaagccaggaacggatcagcatcaaatgctgacccagggggcagggaataggaaattcaaatgtacagaatgcggtaaggcatttaagtacaagcaccacctcaaggaacacttaaggattcattcaggggaaaagccctatgagtgcccaaactgcaagaagcgcttctcacacagtgggtcatatagcagtcatatctccagcaagaaatgcatcggcctcattagcgtgaacggacgaatgcgaaataatattaaaaccggcagcagtcccaactcggtgtcatcctccccaaccaactccgccattacacagctaagaaataaattagagaatggaaagccgttgagtatgtcagaacagactgggctgctgaagataaaaactgagccactggacttcaatgattacaaggtgttaatggctacgcacggttttagcggcacctcaccttttatgaacgggggattgggagcaacctctccgttaggtgttcatcccagcgcccagtctccaatgcaacatctgggcgtggggatggaggctccccttctgggctttccaacgatgaattcaaacttatccgaagtccagaaggtgttacagatcgtggataacaccgtgtcccggcagaagatggattgtaaggcagaagagatatccaagctcaaaggttaccatatgaaagatccgtgttctcagccagaagagcagggcgtgacttcccccaacatcccccccgttggcctccctgtggtctctcacaatggagccaccaaaagtatcatcgactacacgcttgaaaaggtgaacgaagctaaggcttgcctccagtctctaacaactgatagccggagacagatctcgaacatcaagaaggagaagttaaggactttaattgatctcgtcaccgacgacaaaatgatcgagaatcacaatataagcactcctttctcctgtcagttctgtaaagagagctttcccggtccgatcccgctacatcaacatgaaagatacctgtgcaagatgaacgaagagatcaaagccgtattgcagccgcatgaaaacatagtccctaataaagctggcgtattcgtcgacaacaaggcactgctgctatcttctgtgttaagtgagaagggaatgacctctcctataaacccctacaaggaccatatgtctgtcctgaaagcctattacgccatgaatatggagccaaattccgacgaattgttgaaaatttcaatcgcggtgggcctaccccaagaattcgtaaaggagtggttcgagcagaggaaagtttaccagtactccaactag

SEQ ID NO: 182253 - DNA, 192 bp, Artificial Sequence
  derived and/or modified sequence
atgaagcagcccatcatggccgacggcccccggtgcaagcggcggaaacaggctaaccccagacgaaagaacgttgtgaattatgacaacgtcgtcgacaccggatctgaaaccgacgaggaagacaagctacacatagccgaagacgacggcatcgcgaatccccttgatcaggaaaccagcccagcttag

SEQ ID NO: 182254 - DNA, 3645 bp, Artificial Sequence
  derived and/or modified sequence
atgaagcagcccatcatggccgacggcccccggtgcaagcggcggaaacaagccaatcctagacggaagaatgtagtgaattatgacaatgtggtcgatacaggttccgaaacagatgaggaagacaagttacatatagcagaagacgatggcattgccaacccccttgatcaggagacaagtccagctagtgtgcccaatcatgagtcaagcccgcatgtgtctcaggccctgctgcctcgggaggaggaagaggacgaaatacgggagggtggcgtggagcacccgtggcacaacaacgaaatcttgcaggcaagtgtagacgggcccgaagagatgaaagaagactatgatactatgggccctgaggctaccatccagacagcaatcaataacggcaccgtgaagaatgctaactgcacaagcgatttcgaggagtacttcgccaagcgcaagcttgaggagagagacggtcatgcggtgtctattgaggagtatttacagagatcagacaccgcaattatttaccctgaagctcccgaggaactgagccgcctcggtacacctgaggctaatggccaggaggagaatgacctccctcccgggacacccgacgcttttgctcagctgttaacatgcccctattgcgatcgaggatataaaagattgaccagcttgaaggagcacatcaagtaccggcacgagaagaacgaggaaaactttagctgccccctctgtagctacaccttcgcctatcgaactcaactagaacggcatatggtcactcacaagccaggcaccgaccagcaccagatgttaacacagggtgccggcaatagaaagttcaagtgcacggaatgcggtaaggcatttaaatataagcatcatctgaaggagcaccttagaatccactctggggaaaaaccatacgagtgccctaactgtaagaagaggtttagccatagcggctcatacagtagccacattagctccaagaagtgcatcggactgattagcgtgaatggtcgaatgaggaacaacattaagacaggctccagccccaactctgtttcctctagccccacaaatagcgccatcacccagttaaggaataagctcgagaatggcaaaccattaagtatgtccgagcaaacaggcttgctgaaaataaagactgaacctctcgattttaacgactacaaggtgcttatggccacccatgggtttagcggtacaagcccgttcatgaatggcggcctgggggccactagccctctgggagtgcacccaagcgcccagtcaccaatgcagcatttgggcgtgggcatggaagcccctctcctgggttttcctacaatgaactctaacctaagcgaggttcagaaggtgctgcagattgtcgataataccgtgtcccggcagaagatggactgcaaggccgaggagatcagcaaactaaaaggctatcacatgaaggatccttgctcccagcctgaggagcagggcgtgacatctccaaacatcccaccggttggactgcctgtcgtgtctcataatggtgcaacgaagagcattatagattacactttagaaaaggtgaatgaagctaaagcttgcctgcagtcattgacgaccgactcaaggagacagattagcaatattaagaaagagaaactccggactctcatcgacctcgtcaccgatgataagatgatcgaaaaccataatatctccacccccttttcctgtcaattctgcaaggaatcttttccaggtccaatcccccttcatcaacacgaaagatatttatgtaagatgaacgaggagatcaaggcagtgctgcaaccgcacgaaaacatcgtgccaaacaaggcaggtgtgtttgtggacaacaaagcactgctgctctccagtgtcctgagcgagaagggaatgactagcccgattaacccttacaaggatcacatgtcagtattaaaggcctactacgccatgaatatggaaccaaactcagatgaactcctcaagatctctattgccgtggggctgccgcaggagttcgtcaaagagtggtttgaacagcgcaaggtttaccaatactctaattccaggagcccctctttggagcgcagctctaagccacttgcacctaacagcaatccccccactaaagatagcttactcccccgtagtcccgtcaagcccatggacagcatcacaagccctagtatcgccgagctgcataatagcgtgaccaattgtgaccctcctcttagattaacaaagccctcgcattttactaatatcaagcctgtggagaaactcgaccatagcaggagcaatactcctagtcccctcaacctgtcttcaacctccagcaaaaactcacattcgtcaagctatacccccaactcgttctctagcgaggagctccaggctgaaccactagacctgtcgctgccaaagcagatgaaggaaccaaaatcaattatcgccactaaaaacaaaacgaaggcatcatccataagcttagaccacaactccgtcagctcctcctccgagaatagtgacgagccactgaatctgaccttcattaagaaggagttctcgaacagcaacaatctcgacaacaagtcaacaaatcctgtgttctcaatgaaccccttcagcgcgaagcctctctataccgccctgcccccacagtcagcttttccacccgcgacttttatgccacccgttcaaacgtcaatccccgggttgaggccctaccccgggttagaccaaatgagctttctcccgcacatggcttacacatatccaacaggcgcagctacctttgccgatatgcagcaacgccgcaaatatcagcgaaaacagggcttccagggcgagctcctggatggagcacaggattacatgtcagggcttgacgacatgaccgatagcgacagctgcctgtcacggaagaagatcaaaaagactgaatccggaatgtacgcctgcgatctctgtgataaaaccttccaaaagtccagctcgctcctcaggcataaatacgaacataccgggaagaggccacatcagtgccagatttgtaagaaagcattcaagcataagcatcacctgattgagcacagtaggcttcactccggggagaaaccctatcagtgtgacaaatgcgggaaacgattttctcattccgggtcttactctcaacatatgaaccaccgctatagctattgtaagcgagaggccgaagagagggaggcagctgaacgagaggcacgagaaaaaggccacctcgaacctaccgaacttttgatgaatagagcctacctgcagtctatcacccctcagggctacagtgattctgaggaacgggaatcaatgccccgggacggtgaatctgaaaaagagcacgagaaggaaggcgaggacggatacggcaagctagggaggcaggacggcgatgaggaatttgaggaggaggaggaagaatctgaaaacaagagtatggacacagaccctgaaactatccgggacgaggaggagacaggagaccacagcatggatgactcatccgaggatgggaaaatggaaaccaagtccgatcatgaagaggataacatggaagacgggatgtag

SEQ ID NO: 182255 - DNA, 3645 bp, Artificial Sequence
  derived and/or modified sequence
atgaagcaaccgattatggccgacggcccacggtgtaaaaggagaaaacaggccaatccacgcagaaaaaatgtagtgaactatgataacgtcgtggacaccggctcagaaacagatgaagaggacaagcttcacattgccgaagatgacggaatcgcgaatccgttggaccaggagacgtcacccgcttcggtccccaaccatgagagctcaccacacgtttctcaggcactgctgcctagagaggaagaggaagatgagatcagggaagggggagtagaacacccatggcataacaacgagatcctacaggcttccgtggacggcccagaagagatgaaggaggactacgacaccatgggtccggaggctaccatacagactgccatcaataatggaactgtcaaaaacgccaattgcacgtcagacttcgaggagtacttcgcaaaacgaaagctcgaggaacgggatggacacgcggtctccatagaggagtatctccagaggtcagatactgccatcatctacccagaggccccagaagagttgtcccgcctcggtaccccggaggcaaacgggcaggaagaaaacgatttgccacctggaacacccgatgccttcgcacaacttttgacctgcccctactgtgatagggggtataaacgtctgacctctttgaaggagcatatcaagtacaggcatgaaaaaaatgaggaaaactttagctgtcccctgtgctcctatacctttgcctatcggactcagctggaaaggcatatggtgacgcacaaaccgggaacagatcagcaccaaatgctgacgcagggagccggtaacaggaaattcaagtgcaccgagtgtggtaaagccttcaaatataagcatcacctaaaggagcaccttagaatccactctggggaaaaaccgtacgagtgcccaaactgcaagaagcggttcagccattcaggctcttactcctcccacatatctagcaaaaaatgcataggtctgatcagtgtaaacggacgaatgaggaacaatatcaaaaccggttccagcccaaatagcgtctctagttctcccactaactccgctattacgcagctgcggaacaaattggagaatgggaaacccctatctatgtctgagcaaacaggcttgctcaagatcaaaacggaacccttggatttcaatgattacaaggtccttatggctacccatggcttcagtggaacttcaccatttatgaacgggggactgggggctacaagccccctgggagtccacccctctgctcaatcccctatgcaacatctgggagttggaatggaagccccactcttaggattccctactatgaacagtaatctcagcgaggttcagaaggtgcttcagattgtcgacaatacggtgtcccggcagaagatggactgtaaagcagaagaaatctcaaaactgaaaggatatcatatgaaggatccgtgttctcagcctgaagaacagggcgtcacttcaccaaacattccacctgtcggactgcccgtggttagtcataatggagcaaccaaatccatcattgactataccttagagaaggtaaacgaagcaaaggcgtgtctgcagagtctgaccacagactcaagaaggcagatcagcaatatcaagaaggaaaaactaagaacgctgatcgatctggttacggatgataagatgattgaaaatcacaacatatcaacacctttcagttgccaattttgtaaggagtctttcccaggcccaatacctctccaccaacatgaaaggtatctatgtaaaatgaacgaggaaattaaggcagtactgcagcctcatgaaaacatagtgcctaacaaagccggtgtcttcgttgacaacaaagcactcctcttaagcagcgttctgagtgagaaaggcatgacaagtccaattaatccctacaaggatcacatgtctgtactcaaggcctactatgcaatgaacatggagcccaattctgacgagttgcttaaaatcagcatagctgtcggtttacctcaggagttcgttaaagaatggtttgaacagagaaaggtgtaccaatactcgaatagccgctccccgtccttggagcgtagctcgaagcctcttgcaccaaacagcaaccctcccaccaaggactctctgctcccacgaagtccagtgaaacccatggactccataaccagcccctccattgccgaactgcataatagcgtgactaactgtgatccacccctgcgactgactaaaccgtcgcacttcactaacatcaagccggtcgagaagctggatcattcaagaagcaataccccatctccgctgaatttgagctcaacaagttctaaaaacagtcatagtagttcctacacccctaacagtttctccagcgaagaattacaggccgaacctcttgaccttagtctgcccaaacaaatgaaagaacctaaaagtataatagccacaaagaacaagaccaaggccagtagcatctccctggatcacaatagcgtttcttcatccagtgagaactccgacgagccactgaatctaaccttcataaagaaagagttttctaacagcaacaaccttgacaacaagtctacgaaccctgtattttccatgaacccattttccgcaaaaccactgtacacagcgcttcccccacagtctgcattcccgcctgccactttcatgccaccggtgcaaacgtcgatccccggactgcgtccttaccctgggctcgatcagatgtcgtttttaccccatatggcctacacctatcctacaggagccgcaaccttcgcagatatgcagcaacgccgaaagtaccaaagaaagcagggttttcagggcgaattgttagacggcgcacaggattatatgtctggtctcgatgatatgaccgactctgattcctgcctgtccagaaagaaaattaagaaaacggagagcggaatgtatgcatgcgacctgtgcgacaagacgttccagaagagcagttctctgttgcggcacaagtatgagcacacgggcaaacgccctcaccagtgccagatctgtaaaaaggccttcaaacataagcaccatttaatagagcatagtcggctgcattcaggcgagaagccttatcagtgtgacaagtgcggaaaacgcttctcacactcggggagctactctcaacacatgaatcacaggtactcatattgtaaaagagaggctgaggaaagagaagctgcagagcgagaggcaagggagaagggccaccttgagcccacagagctcttgatgaaccgcgcatacctacagagtattacccctcagggctactccgattctgaagagcgtgagagcatgccgagagatggggagagcgagaaagaacacgaaaaggagggtgaagatgggtatgggaaacttgggagacaggatggcgacgaggagtttgaggaggaagaagaggagtctgaaaataaaagtatggataccgatcccgaaaccattcgcgatgaggaggagacaggcgaccactccatggacgattccagcgaagatggcaagatggaaacaaagtctgaccatgaagaggacaatatggaagatggcatgtag

SEQ ID NO: 182256 - DNA, 1275 bp, Artificial Sequence
  derived and/or modified sequence
atggcagatggacctaggtgcaaacgtagaaaacaagccaatccacgcagaaaaaatgtggtcaattatgacaacgtggtggacaccggctccgagaccgatgaagaggacaaattgcatatcgccgaagacgacggaatcgctaacccgctagaccaggaaacttcccccgcttcggtccccaatcatgagagctcaccacatgtcagtcaagccctgctgccgagggaggaggaagaggatgagatcagggaaggaggagtggagcatccatggcacaataacgagatcctccaggcatctgtggacggtcctgaggagatgaaggaggattacgataccatgggcccagaagctacaattcagaccgccatcaataatgggactgtgaagaacgcgaactgtacaagcgattttgaagagtactttgccaagcgtaagcttgaagagagggatggccacgcagtctctatcgaagaatacctacagagatcagataccgccatcatttaccccgaggcacctgaagagctcagccggttgggcacacccgaggccaacggccaggaggaaaatgacttgcccccaggaactcctgacgcatttgctcagcttctgacatgtccctactgtgatagagggtacaaacgtcttaccagcctgaaggaacacattaaataccgtcatgagaaaaacgaggagaatttcagttgtcctttgtgttcctatactttcgcctataggactcagctggaacggcatatggttacacataagccagggactgatcaacatcaaatgctcacccaaggtgccggaaatcggaaatttaaatgcacagagtgcgggaaagcatttaagtacaagcaccatttgaaagagcatcttcgaatccactccggagagaaaccttacgaatgcccgaattgcaagaagcggttctcacacagtggctcctactcaagccacatctcatccaaaaagtgcattggacttatctccgtcaatggacgaatgaggaataatatcaaaacagggagctcccctaactcagtgagctcaagtcccacgaactccgctataacacagctacggaacaagctggaaaacggtaagccactgtcaatgtccgagcaaaccgggttactgaagtccgggcgtgcccagtggctgacgcctctgatccccgcactgctcgaggccgaagtggggaggtcacgtggacagaagatagagactctactcgccaatatggttgagcccagactgtattag

SEQ ID NO: 182257 - DNA, 1320 bp, Artificial Sequence
  derived and/or modified sequence
atgaagcagcccatcatggcagatggaccacgatgcaaacggagaaaacaggccaaccccagacgtaagaatgtggtgaactatgacaatgtggtggacactgggagtgagacggacgaagaggacaagcttcatatcgccgaagatgatggcattgctaatccattggaccaagaaacgtccccagcatccgtcccaaatcatgagtcaagcccccacgtgagtcaggccctgctgccacgtgaagaagaagaggatgaaatcagggaggggggagtggaacacccatggcataataatgagatccttcaagcttcagttgacggaccagaggagatgaaggaagattacgacacaatggggccagaggccactatacagacggcaataaataatggcacagtcaagaacgccaactgcacatcagacttcgaagagtacttcgctaagagaaaactagaagaaagagatggccacgcggtctctatcgaggaatacctgcagagatctgacacagcaattatctacccagaagctcccgaagagttgagcaggctgggaacccctgaagccaacggtcaggaggagaatgacctgccacccggaaccccagacgcatttgctcaactgctcacttgtccttattgcgataggggctacaagcggctgaccagccttaaagagcacatcaagtacaggcacgagaagaatgaagaaaacttctcctgtcccctctgctcctatacctttgcctaccgcacccaactggagagacacatggttactcacaaaccgggaacagatcagcatcagatgctgacccagggtgctgggaatcgcaagttcaaatgcacagagtgcggaaaggccttcaaatataaacaccatctcaaggagcatctgagaatccattctggagagaagccctatgaatgtccaaattgtaagaaacggttttcacactcgggatcttattcctcacatatctcctcaaaaaaatgtatcggtctgatcagtgttaacgggcgaatgcgtaataatatcaaaactggctcttcgcccaatagtgtctcatccagtccaacaaacagtgctattacgcagctgaggaacaagcttgagaatggcaagcccttaagcatgtctgagcagacaggcctgctgaagatcaagaccgagcctctagattttaacgactacaaagtcctgatggctacccacggatttagcgggacatctccattcatgaacgggggattaggggctacttcccccctgggagtacatccttcagctcagtcgcctatgcagcacctgtag

SEQ ID NO: 182258 - DNA, 408 bp, Artificial Sequence
  derived and/or modified sequence
atgaaacagcctattatggctgacgggcctcggtgcaaaaggaggaagcaggccaacccaaggagaaagaacgtggtgaactatgacaacgtagtggacaccggaagtgagaccgatgaggaggataagctgcacattgccgaagatgacgggatcgctaatcctttagaccaagagacttcacctgctagtgttccaaatcatgagagttccccacacgtcagccaggccttgctccctcgagaggaagaggaagatgagattagggagggcggagttgagcacccctggcataacaacgagattttgcaagcttccgtggacggccctgaagagatgaaagaagactacgacacaatgggacctgaggccacaatacagacagccatcaacaatggtacagggtag

SEQ ID NO: 182259 - DNA, 3645 bp, Artificial Sequence
  derived and/or modified sequence
atgaagcagccaatcatggctgacggtccacgttgtaaacgcagaaagcaggcaaacccacgccgaaaaaacgtggtgaactacgataatgttgtggatacagggtcggagaccgacgaagaagacaaactgcacatcgccgaggacgacggaatagccaacccgttggatcaggagacctctcccgcttctgtccctaaccacgaatcatcgcctcatgtatcacaggctctgctgccacgcgaggaggaggaggatgagatacgcgagggtggcgtggagcatccttggcataacaatgaaatcctgcaggcctctgttgacggcccagaggagatgaaagaggattacgatacaatggggccagaagcgaccattcagacagccatcaataacggcaccgtgaagaatgcgaactgcacgagcgattttgaagagtatttcgctaaaagaaaactggaggagagggatggccatgccgtgagcattgaggagtacttgcaaagaagtgacacggcaatcatttatccagaggcaccggaagagttaagcagactgggcacgcctgaggcaaacggccaagaagagaacgatctcccgcctggcacccccgatgccttcgcacagctgcttacgtgcccatactgcgatagaggctataagaggcttaccagtctaaaggagcacatcaagtaccgacacgaaaagaacgaagaaaacttctcctgccccttatgcagctatactttcgcttaccgcacacagctggaacgccacatggtcacccataaacccggtactgaccagcatcagatgctgacccaaggtgccggaaatcggaaattcaaatgcacagagtgcgggaaagcttttaagtataaacatcacttgaaagagcatcttcgcatccactctggagagaagccttatgagtgccctaactgtaagaaacgcttctctcatagtggatcttatagctcgcatatttcttctaagaaatgtatcggactgatctcggttaatggcagaatgcggaacaatataaagacaggcagctcccctaactccgttagttcctcccctactaatagcgccatcacacaacttaggaataaactcgaaaacggcaagcccctgtctatgtccgagcaaaccggccttctgaagattaaaacggaaccgctagattttaatgactacaaagtcctgatggcgactcatggcttttccgggacgtctccctttatgaatggaggtctgggagccacgtcgcccctgggagtgcaccctagcgcacagagcccaatgcaacaccttggggtgggtatggaagcccctttgctcgggttcccaacgatgaactctaacctcagcgaagtccagaaggttctgcagatcgtggataacaccgtcagtagacagaaaatggattgcaaagctgaggaaatctcaaagcttaaggggtaccacatgaaagatccttgctcacaacctgaggaacaaggggtgacttccccaaatatacccccagtgggattgcccgtggtcagccataacggggcaaccaagagcataattgattataccctcgagaaagttaatgaagcgaaggcctgcttacaaagtctgacaaccgatagccgacgacaaatttctaatatcaagaaggaaaagctccggacacttatagatttagtcaccgacgataagatgatcgaaaatcacaacatcagcactccattttcctgccaattctgtaaggaatccttccctggtccaatcccactgcatcagcacgagcgctacctgtgcaagatgaacgaagagataaaggcagtgctgcagccacacgagaatatcgtgccaaacaaggctggtgttttcgtcgataataaggcacttctcctgagctcagttctctccgaaaaggggatgacgagcccaattaatccgtataaagaccacatgagcgttctaaaagcctattatgccatgaatatggaacctaactctgatgaactactgaaaatctctatcgctgtgggcttgccccaggagttcgtcaaagagtggttcgagcagagaaaggtgtaccagtattccaactccagatctccttcactcgagcgttcttctaagcccttggctccgaatagcaatccacctactaaggacagcctactccctaggagtcccgtgaagccaatggactcaataaccagtccgagtatagctgagctgcataactctgttaccaattgtgaccctcccctgcgcctgactaagccttcccattttactaatattaagccggtcgagaagcttgaccactcaagaagcaatactcccagccccttgaaccttagctccacatccagcaagaacagtcatagtagttcctacacgccaaactccttcagctcagaggaacttcaggccgaaccactggacctgagtctgcccaaacagatgaaagagccgaaatcaataatagccaccaagaataagacaaaggcttcgagtatctctctggaccataatagtgtgtccagctcctcggagaattcagacgagcctctgaacctgacatttatcaaaaaagaattctctaattccaataaccttgacaacaagtcaacaaatcctgtgttttccatgaaccctttttcagcgaaacccttgtacacggccctgcctcctcaaagtgcattcccccctgccacattcatgcctccagttcagacatctatcccaggcctgcgtccataccctggacttgatcagatgtcttttctgccccatatggcatacacatatccgaccggtgccgctacttttgcagacatgcagcagagacgcaaatatcagcgtaagcagggttttcagggagagctgctggacggggcacaggattatatgtctggacttgatgatatgaccgatagtgactcttgtctgagccgaaagaaaataaagaagactgaaagtggcatgtacgcgtgcgacttatgcgacaaaaccttccagaagagcagctctttactgagacacaaatacgagcacactggtaaacgtccccaccagtgtcagatttgcaagaaagcgtttaagcacaaacaccatttgatagagcacagcagacttcatagcggagaaaagccatatcagtgtgacaaatgcggcaaaagatttagccactcgggctcttacagccagcacatgaatcaccgctatagttactgtaagcgggaagcggaagagagagaggcggcagagagggaggcccgagaaaagggccatctggagcccaccgagctccttatgaatcgggcttatttgcagtccatcacgccccaaggctacagcgactctgaggaacgcgagtccatgcctcgtgacggcgagagcgaaaaggaacacgaaaaagaaggtgaggacggctatggcaagttgggcagacaggacggagacgaggagttcgaggaagaggaggaggagagtgagaacaaaagtatggacaccgatcctgagaccattagagatgaggaggagacgggagaccactctatggacgactctagcgaagacggtaaaatggagaccaaatctgaccacgaagaggataatatggaagacggtatgtag

SEQ ID NO: 182260 - DNA, 2109 bp, Artificial Sequence
  derived and/or modified sequence
atgaagcagcctattatggcggatggacctcgctgtaaaaggagaaaacaggccaatcctagaagaaagaatgtcgtaaactatgacaatgtggtcgacactggctccgagacagatgaggaggacaaactgcacatcgccgaagatgacggcatcgcgaatccgctagatcaggaaacctccccagcaagcgtccctaatcacgagtcttccccccacgtctctcaggctcttctccctcgagaagaggaggaggatgaaattcgggaggggggtgtggaacatccttggcataacaacgagatccttcaagcatccgtggacggcccagaggaaatgaaggaagattatgacacaatgggtcccgaggcaaccattcagaccgccatcaataacggcaccgtcaaaaacgccaactgtaccagcgattttgaggagtacttcgctaagcgtaagctggaggagcgggacgggcacgctgtgtcaatcgaggaataccttcaacgatccgataccgcaatcatctatcccgaggctcctgaggaactgagtaggctcgggacacctgaggctaacggccaagaagagaacgatctgcccccaggcacacctgatgctttcgctcaactgctgacgtgcccatactgtgatcgcggttacaaaaggctgacgagcctgaaagagcatattaagtaccgccacgagaagaatgaagagaacttcagctgccccctctgtagttatacattcgcgtaccgcacgcaattggagcggcacatggttacacataaaccgggaaccgaccagcatcagatgcttacccagggcgcagggaacagaaagtttaaatgtaccgagtgtgggaaagctttcaagtataaacatcacctgaaggagcatttacggatacacagtggggagaaaccttatgagtgtcccaactgtaaaaaacgcttttcccattctgggagctactcaagccatatctcgagcaagaagtgtatcggcctgataagtgtgaacggcagaatgaggaacaatattaaaaccggatcgtctccgaattctgttagctcatcacctaccaacagcgccatcactcagctgaggaacaagcttgagaacggcaagcccctgtcgatgtctgagcaaaccgggctcctgaaaatcaagacggagcccctcgatttcaatgactacaaagttcttatggccacccacggattctctggcacgagcccattcatgaacggcggattaggcgctacgagcccactgggtgttcatccctcagcccagagtccgatgcaacatctgggtgttggaatggaggctcctcttctgggctttcccacaatgaattccaatcttagtgaggtgcagaaagtgctgcagattgtggataataccgtgagccgacagaagatggactgcaaggcggaagagatctccaagctcaagggctatcacatgaaggacccttgttcacaacccgaggagcagggtgtgacatccccgaatatcccccctgttggactcccagtggtgtcacacaacggagcaactaaatccattatcgactatactctcgaaaaggtgaacgaggctaaagcctgcctgcagtcactaaccacagatagtcggaggcaaatttcaaacatcaaaaaggagaagcttcgtaccttaatcgacctggtgacagatgataaaatgatcgagaatcacaacatttctacaccgttttcctgccaattctgcaaagagtcttttccaggaccaatcccacttcaccagcatgagcgttacttatgcaaaatgaatgaagagataaaagccgttctgcagccacacgagaatatagtacctaacaaggccggagtgttcgtcgacaataaggctttgctgctcagttcagtgctgtctgagaagggcatgacttcacctattaacccatataaggaccacatgtcggttttgaaggcttactatgctatgaacatggagccaaatagcgacgaactcctcaaaatctctatagcagttggtctgccccaggagttcgttaaggaatggttcgagcaacgtaaggtataccagtattcaaactag

SEQ ID NO: 182261 - DNA, 192 bp, Artificial Sequence
  derived and/or modified sequence
atgaaacagcctatcatggcagatggccctcgttgcaaacgaaggaagcaggccaacccgagacggaagaacgtggtaaactacgataatgtggtggataccgggtctgaaactgatgaggaagataagctgcacatagccgaagatgatggaattgccaacccactcgaccaagagacatctcccgcttag

SEQ ID NO: 182262 - DNA, 3645 bp, Artificial Sequence
  derived and/or modified sequence
atgaagcaacctatcatggcagacggcccaaggtgtaagcgcaggaagcaggctaacccaaggcggaaaaatgttgttaattatgataatgtggtcgatactgggtctgagactgacgaggaggacaagctccacattgccgaagatgacggtatagctaatcccctggaccaggaaacctctcctgcaagcgtgcccaatcacgaatccagtcctcacgtgtcgcaggctctgttacctcgtgaggaagaagaagacgaaatccgtgaaggtggggtggaacacccttggcacaataatgaaatccttcaggcatctgtcgatggcccagaagaaatgaaggaggactatgacactatggggcctgaagccaccattcaaactgccatcaataacggcaccgtcaaaaacgcaaattgtacaagcgactttgaagagtatttcgccaaaaggaagcttgaggagcgggacggccacgctgtgagcatagaggagtacttacagaggtccgacaccgctattatatatcccgaagcccctgaggagctgtccaggcttgggacgcccgaggccaatgggcaggaggagaacgacttgcctcctggcactccagatgcctttgcccagctgctgacatgcccatactgtgaccgcggttacaagcgcctgacatccttgaaggagcatattaaatatagacatgagaagaatgaggaaaacttctcctgtcccctgtgttcatatacatttgcttacaggacacaattggagagacacatggtgacgcataaaccgggtacggatcagcaccagatgcttactcaaggggctggaaatcggaaattcaagtgcactgagtgcggaaaggcctttaaatataaacaccaccttaaagaacacttacggatccatagtggggaaaagccttacgagtgcccaaactgcaaaaagcgcttttctcactctggatcctatagttcgcacatcagctctaaaaagtgtatcggactgattagtgtcaatgggagaatgcgtaacaatatcaaaactggcagcagcccaaatagtgtcagctcgtccccaactaattccgcaattacacagctaagaaacaaactcgaaaacggtaagccacttagcatgagcgagcagaccggtctcctgaagatcaaaaccgagcctctagacttcaatgattacaaagtgctgatggctacccatggattttcaggcacgtccccattcatgaacggtggcctcggcgcaacgagtccactcggcgtgcaccctagcgcccaatccccgatgcagcatctcggagtcggcatggaggcccctcttctgggcttccctacaatgaactcgaatctgtctgaggtccaaaaagtgctgcagatcgttgataacactgtgagtcggcagaagatggactgtaaagcagaggaaatctcaaagttaaaaggctaccacatgaaggacccttgctctcagcctgaagaacagggcgtgacctcccctaatatcccccctgtcgggctccctgtcgttagccataacggggcaactaagagcattattgattacactttggagaaggttaatgaggccaaggcgtgtttgcaatccttgactacagacagcagaagacaaattagcaacataaagaaggagaagttgagaaccctgatcgacctagtcacagatgacaagatgatagagaaccataatattagcacaccatttagctgtcagttttgcaaggagtcctttcccggtccgattccactgcatcaacatgaaagatacctttgcaagatgaatgaagaaattaaggcggtgctgcagccccacgaaaatattgtgccaaataaagccggagtatttgtcgataataaggccttgctcctcagcagcgttcttagcgagaagggtatgacatcgccgattaatccttacaaagatcatatgagtgtgttgaaggcctactatgccatgaacatggaacccaattctgacgagctgctcaagatttcaatcgccgttggcctgcctcaggagttcgttaaagagtggttcgagcaaaggaaagtgtaccagtacagtaattctcggtcccccagcctcgaacgctcaagcaaacccctggcccctaactccaatccacccaccaaagacagtctgttgccacgaagcccagtcaagcccatggactcaatcacctcgccatccatcgccgagctgcacaatagcgtgaccaactgcgatcctcctctacgcctgactaagccaagccatttcactaacataaaacccgtggagaagctcgaccatagcagaagtaacacaccatcccctctgaacttgagctccacgagctccaaaaacagtcactctagctcctacactcctaactcattttcgtctgaggaattacaggcggaaccgttagacctgagcttgcctaagcagatgaaagagccaaaaagtatcatagccacgaagaacaagaccaaagcgtcttccatttctctagaccacaatagtgtgtcttcctcctcagagaactctgacgagcctctgaacctcacctttattaaaaaggaatttagtaattccaataatcttgacaacaagtcaacaaatcccgtcttctctatgaacccttttagcgccaaacctctgtacacagcactgccacctcagagcgcatttcccccagccacttttatgcctcccgttcaaaccagcatccccggactcagaccttaccctggcttggatcagatgagctttctgccgcacatggcctacacttaccctactggcgctgcaacttttgctgatatgcaacaacggaggaagtatcaaaggaaacagggtttccagggagaacttctcgatggcgctcaggattatatgtcggggctggatgacatgactgactcagattcttgtctgtcccgaaagaagatcaaaaaaacagagagcggaatgtacgcctgtgatctgtgtgacaagactttccagaagagttcgtccctcctgcgccataagtacgagcatacaggtaaacgtccccaccagtgtcagatctgtaagaaagcattcaaacataaacaccacctgatcgaacacagtcgcctgcacagcggagagaagccctatcaatgtgataaatgtgggaagcgtttctcccatagtgggtcttactcccaacatatgaatcaccggtattcctattgtaagcgggaagcagaggagagggaggctgccgaaagagaagccagagagaagggtcatcttgaaccaaccgaattgctgatgaatcgggcatacctccagtcaataaccccacagggctattccgactctgaagagcgggagagcatgccccgagatggtgaatcagagaaggaacacgagaaggagggcgaagatggatatgggaaacttggaagacaggacggcgacgaggagtttgaagaggaggaggaggagtcggagaataaatccatggacaccgaccccgagaccattcgggatgaagaggagaccggagatcatagtatggacgactcttctgaggacggtaaaatggagaccaagagcgaccacgaagaagacaacatggaagatggtatgtag

SEQ ID NO: 182263 - DNA, 6280 bp, Artificial Sequence
  derived and/or modified sequence
catgccgtttaatatcatgctctcccttccctgctaagtttctctatggcctttctcgtttctcctcctgcctccctacacactctcccttactttgtagtgaggtctccccgaggtgtagagagattcagagatcggccaaccgagtgttctattttaatttacttagagaccctttattaaaatgccaaactactttttaatattgggatccagtccagaaattcatcatgcacacaccctaatacacatgccctaagatgcagctcccatgcagcatttttttttctggctctggtacctaaaaagaaaaaaataacaataagagaaagggcagagaactttgttccagaagctgtactgagatacctacacaatttgatgtgcatctcaaatctggtcattagagatatctgtataagaagagactatctggattgaggacccgggatctttccctttaactttcgccccttggagttctccagttctgtgaatggtgtgcaccgttttccgccctgtactctgtaggatttagtgatgaggataatgatgccaaaggcttgacgggcggggaggggggggtggagggggggagaagggagggaggggggagggaggcgaaggcgaaagggagggagaggaggaagggagggaggtggaatttcatttcttccactaaagcgtttgcggagacttcaaggtataatctatcccagatcctttcccagagagaaacttggcgatcacgttttcacatgatgctcacgctcagggcgcttcaattatccctccccacaaagataggtggcgcgtgtttcagggtctctcgtctctctcctacagaaaagaaaaagaaaaaaatgtcattagaagaggcgtaacacgtcagtccgtccccaggtttgtgtttcctggagtggccgaaagagatcagttctaacctgctctgcaggaataacggtcctgcctcccgacactcttggcgaggtttttgtacagtttgctccgggagctgtttcttcgcttccacctttttctcccccacacttcgcggcttcttcatgctttttcttctcaccatttctggccaaaactacaaacaagacttcgcagatcgagcctgcgtgctgccgaagcagggcgccgagtccatgcgaactgccatctgatccgctcttatcaatgaagcagccgatcatggcggatggcccccggtgcaagaggcgcaaacaagccaatcccaggaggaaaaacgtggtgaactatgacaatgtagtggacacaggttctgaaacagatgaggaagacaagcttcatattgctgaggatgacggtattgccaaccctctggaccaggagacgagtccagctagtgtgcccaaccatgagtcctccccacacgtgagccaagctctgttgccaagagaggaagaggaagatgaaataagggagggtggagtggaacacccctggcacaacaacgagattctacaagcctctgtagatggtccagaagaaatgaaggaagactatgacactatggggccagaagccacgatccagaccgcaattaacaatggtacagtgaagaatgcaaattgcacatcagattttgaggaatactttgccaaaagaaaactggaggaacgcgatggtcatgcagtcagcatcgaggagtaccttcagcgcagtgacacagccattatttacccagaagcccctgaggagctgtctcgccttggcacgccagaggccaatgggcaagaagaaaatgacctgccacctggaactccagatgcttttgcccaactgctgacctgcccctactgcgaccggggctacaagcgcttgacatcactgaaggagcacatcaagtaccgccacgagaagaatgaagagaacttttcctgccctctctgtagctacacgtttgcctaccgcacccagctcgagcggcatatggtgacacacaagccagggacagatcagcaccaaatgctaacccaaggagcaggtaatcgcaagttcaaatgcacagagtgtggcaaggccttcaaatataaacaccatctgaaagaacacctgcgaattcacagtggtgaaaaaccttacgagtgcccaaactgcaagaaacgtttctcccattctggttcctacagttcgcacatcagcagcaagaaatgtattggtttaatctctgtaaatggccgaatgagaaacaatatcaagacgggttcttcccctaattctgtttcttcttctcctactaattcagccattacccagttaagaaacaagttggagaatggaaaaccacttagtatgtctgaacagacaggcttacttaaaattaaaacagaaccactagacttcaatgactataaagttcttatggctacacacgggtttagtggcactagtccctttatgaatggtgggcttggagccaccagccctttaggagttcatccatctgctcagagtccaatgcagcacttaggtgtagggatggaagcccctttacttgggtttcccaccatgaatagtaatttaagtgaggtacaaaaggttctacagattgtggacaatactgtttccaggcaaaaaatggactgcaaggctgaagaaatttcaaagttgaaaggttatcacatgaaggatccatgctctcaacctgaggaacaaggagttacttctcctaatattccgcctgtcggtcttccggtagtgagtcataatggtgccactaaaagtattattgactatacgttggaaaaagtcaatgaagccaaagcttgcctccagagcttgactactgactcaaggagacagatcagtaatataaagaaagagaagctacgtactttaatagatttggtcactgatgacaaaatgattgagaaccacaacatatccactccattttcatgccagttctgtaaagaaagttttcctggccccatccctttgcatcagcatgaacgttacctttgtaagatgaatgaagagatcaaggcggtcctgcagcctcatgaaaacatagtccccaacaaagccggagtttttgttgataataaagccctcctcttgtcatctgtactttctgagaaaggaatgacaagccccatcaacccatacaaggaccacatgtctgtactcaaagcatactatgctatgaacatggagcccaactccgatgaactgctgaaaatttccattgctgtgggccttcctcaggaatttgtgaaggaatggtttgaacaacgaaaagtctaccagtactcaaattccaggtccccatccctggaaagaagctccaagccgttagctcccaacagtaaccctcccacaaaagactctttattacccaggtctcctgtaaaacctatggactccataacatcaccatctatagcagaactccacaacagtgttacgaattgtgatcctcctctcaggctaacaaaaccttcccattttaccaatattaaaccagttgaaaaattggaccactccaggagtaatactccttctcccttaaatctttcctccacatcttctaaaaactcccacagtagttcatacactccaaacagcttctcttctgaggagctccaggctgagcctttagacttgtcattaccaaaacaaatgaaagaacccaaaagtattatagccacaaagaacaaaacaaaagctagtagcatcagtttagatcataacagtgtttcttcctcatctgaaaactcagatgagcctctgaacttgacttttatcaagaaggaattttcaaattcaaataatctggacaacaaaagcactaacccagtgttcagcatgaacccatttagtgccaaacctttatacacagctcttccacctcaaagcgcatttccccctgctactttcatgccaccagtccagaccagtattcctgggctacgaccatacccaggactggatcagatgagcttcctaccacatatggcctacacctacccaactggagcagctacttttgctgatatgcagcaaaggagaaagtaccagcggaaacaaggatttcagggagaattgcttgatggagcacaagactacatgtcaggcctagatgatatgacagactccgactcctgtctgtctcgcaaaaagatcaagaagacagagagtggcatgtatgcatgtgacttatgtgacaagacattccagaaaagcagttcccttctgcgacataaatacgaacacacaggaaaaagaccacatcagtgtcagatttgtaagaaagcgtttaaacacaagcaccaccttatcgagcactcaaggcttcactcgggcgagaagccctatcagtgtgataaatgtggcaagcgcttctcacactcgggctcgtactcgcagcacatgaatcacaggtattcctactgcaagcgggaggcggaggagcgggaagcggcggagcgcgaggcgcgcgagaaagggcacttggaacccaccgagctgctgatgaaccgggcttacttgcagagcattacccctcaggggtactctgactcggaggagagggagagtatgccgagggatggcgagagcgagaaggagcacgagaaagaaggcgaggatggctacgggaagctgggcagacaggatggcgacgaggagttcgaggaggaagaggaagaaagtgaaaataaaagtatggatacggatcccgaaacgatacgagatgaagaagagactggagatcactccatggacgatagttcggaggatgggaaaatggaaaccaaatcagaccacgaggaagacaatatggaagatggcatgtaataaactactgcattttaagcttcctatttttttttccagtagtattgttacctgcttgaaaacactgctgtgttaagctgttcatgcacgtgcctgacgcttccaggaagctgtagagagggacagaaggggcggttcagccaagacagatgtagacggagttggagctgggtattgttaaaaactgcattatgcaaaaattttgtacagtgttaaggcctaaaaactgtgtggttcagagactaattcctgtgtttaatagcatttatactttaagcacaactagaaaattgtaagaattgcactctacttatgtatcactacaaactttaaaaaactatgtctaatttatattaatacattttaaaaaggtgcccgcactaccatacatcagtatttttattattattattgttattcctttttaatttaatgtgctcgcactacaatgcatcagtattatgattcctctgtactttcctttcgctattcatcaatttcccattttttttttcagcttaagtaaccacacaattttaggcctcaatttttttttttttctgtgaaggaacttgaagtgatgcatgtgtgaatttaagataccgaagtcttaaagtgacctggacgtgaaggaaaaagtaagatgagaaataaagaaagcctttgtaaggtggttttaaaagccttatatgcaaaccttttaatctgtgtttctgcaagtgccatccttgtacagtgttaagagggtaacatgggttacctttgcaccagcttcagtgttaagctcaccctgttctttgaagcacccatgtcagtattagaagaataggcagcagttccttagtttacatatgtttgtgcaattattttctgtacttttttgttcattaattttgtcagtattacaccaaactgtttttgcaacaaaaaaattttttttgcattcatttaattttaggtcaaataacattttatttatgtggctcattttatatttcctaattttatttatttcatactgtagtgtacagtattatagttcttcaatatatagatatattttagtaaaaaaggaacatgacgttgatcatttgggcaaattttacgtaaagagaagagcatttattgtgttttggaacattaattgtgagatgggatttttcaattttattattttatttttgtttttttccaattactggaaattccaaatttgggaacttttgatacgatcttgtgaaaacactgtattttcgactgaaaattccactttcttcatcttgttttttagctaaaaagagggactgttaaatacaatgtatgataccatgacaaaaatctttcctgaattgtctttgtaaaagtattattgaattttcaatttgtaatttcttttgaaaatgaccatgctcgaataaaaatgtagccaaactaagaatgtagttaatga

SEQ ID NO: 182264 - DNA, 1812 bp, Artificial Sequence
  derived and/or modified sequence
atttcatttcttccactaaagcgtttgcggagacttcaaggtataatctatcccagatcctttcccagagagaaacttggcgatcacgttttcacatgatgctcacgctcagggcgcttcaattatccctccccacaaagataggtggcgcgtgtttcagggtctctcgtctctctcctacagaaaagaaaaagaaaaaaatgtcattagaagaggcgtaacacgtcagtccgtccccaggtttgtgtttcctggagtggccgaaagagatcagttctaacctgctctgcaggaataacggtcctgcctcccgacactcttggcgaggtttttgtacagtttgctccgggagctgtttcttcgcttccacctttttctcccccacacttcgcggcttcttcatgctttttcttctcaccatttctggccaaaactacaaacaagacttcgcagatcgagcctgcgtgctgccgaagcagggcgccgagtccatgcgaactgccatctgatccgctcttatcaatgaagcagccgatcatggcggatggcccccggtgcaagaggcgcaaacaagccaatcccaggaggaaaaacgtggtgaactatgacaatgtagtggacacaggttctgaaacagatgaggaagacaagcttcatattgctgaggatgacggtattgccaaccctctggaccaggagacgagtccagctagtgtgcccaaccatgagtcctccccacacgtgagccaagctctgttgccaagagaggaagaggaagatgaaataagggagggtggagtggaacacccctggcacaacaacgagattctacaagcctctgtagatggtccagaagaaatgaaggaagactatgacactatggggccagaagccacgatccagaccgcaattaacaatggtacagtgaagaatgcaaattgcacatcagattttgaggaatactttgccaaaagaaaactggaggaacgcgatggtcatgcagtcagcatcgaggagtaccttcagcgcagtgacacagccattatttacccagaagcccctgaggagctgtctcgccttggcacgccagaggccaatgggcaagaagaaaatgacctgccacctggaactccagatgcttttgcccaactgctgacctgcccctactgcgaccggggctacaagcgcttgacatcactgaaggagcacatcaagtaccgccacgagaagaatgaagagaacttttcctgccctctctgtagctacacgtttgcctaccgcacccagctcgagcggcatatggtgacacacaagccagggacagatcagcaccaaatgctaacccaaggagcaggtaatcgcaagttcaaatgcacagagtgtggcaaggccttcaaatataaacaccatctgaaagaacacctgcgaattcacagtggtgaaaaaccttacgagtgcccaaactgcaagaaacgtttctcccattctggttcctacagttcgcacatcagcagcaagaaatgtattggtttaatctctgtaaatggccgaatgagaaacaatatcaagacgggttcttcccctaattctgtttcttcttctcctactaattcagccattacccagttaagaaacaagttggagaatggaaaaccacttagtatgtctgaacagacaggcttacttaaaagcggccgggcgcagtggctcacgcctttaatcccagcacttttggaggctgaggtaggcagatcacgaggtcagaagatcgagactctcctggctaacatggtggaaccccgtctctactaa

SEQ ID NO: 182265 - DNA, 1514 bp, Artificial Sequence
  derived and/or modified sequence
atcatttagtagagcttaaaagtattgccgtagtggttggactttctctttcctttcttaagggaaaaaaaaaattctactggaactatttaagggaaccagtgtgggggagcatgtgtgtgagtgagatcgagcctgcgtgctgccgaagcagggcgccgagtccatgcgaactgccatctgatccgctcttatcaatgaagcagccgatcatggcggatggcccccggtgcaagaggcgcaaacaagccaatcccaggaggaaaaacgtggtgaactatgacaatgtagtggacacaggttctgaaacagatgaggaagacaagcttcatattgctgaggatgacggtattgccaaccctctggaccaggagacgagtccagctagtgtgcccaaccatgagtcctccccacacgtgagccaagctctgttgccaagagaggaagaggaagatgaaataagggagggtggagtggaacacccctggcacaacaacgagattctacaagcctctgtagatggtccagaagaaatgaaggaagactatgacactatggggccagaagccacgatccagaccgcaattaacaatggtacagtgaagaatgcaaattgcacatcagattttgaggaatactttgccaaaagaaaactggaggaacgcgatggtcatgcagtcagcatcgaggagtaccttcagcgcagtgacacagccattatttacccagaagcccctgaggagctgtctcgccttggcacgccagaggccaatgggcaagaagaaaatgacctgccacctggaactccagatgcttttgcccaactgctgacctgcccctactgcgaccggggctacaagcgcttgacatcactgaaggagcacatcaagtaccgccacgagaagaatgaagagaacttttcctgccctctctgtagctacacgtttgcctaccgcacccagctcgagcggcatatggtgacacacaagccagggacagatcagcaccaaatgctaacccaaggagcaggtaatcgcaagttcaaatgcacagagtgtggcaaggccttcaaatataaacaccatctgaaagaacacctgcgaattcacagtggtgaaaaaccttacgagtgcccaaactgcaagaaacgtttctcccattctggttcctacagttcgcacatcagcagcaagaaatgtattggtttaatctctgtaaatggccgaatgagaaacaatatcaagacgggttcttcccctaattctgtttcttcttctcctactaattcagccattacccagttaagaaacaagttggagaatggaaaaccacttagtatgtctgaacagacaggcttacttaaaattaaaacagaaccactagacttcaatgactataaagttcttatggctacacacgggtttagtggcactagtccctttatgaatggtgggcttggagccaccagccctttaggagttcatccatctgctcagagtccaatgcagcactta

SEQ ID NO: 182266 - DNA, 590 bp, Artificial Sequence
  derived and/or modified sequence
aacctccaccgagttttcaggattctcctcctctcctgcctgcctccgaggtcccccttctccaagttttgacagtttcaactgaaaaaatgcagcgcctctctcgatttttagatcgagcctgcgtgctgccgaagcagggcgccgagtccatgcgaactgccatctgatccgctcttatcaatgaagcagccgatcatggcggatggcccccggtgcaagaggcgcaaacaagccaatcccaggaggaaaaacgtggtgaactatgacaatgtagtggacacaggttctgaaacagatgaggaagacaagcttcatattgctgaggatgacggtattgccaaccctctggaccaggagacgagtccagctagtgtgcccaaccatgagtcctccccacacgtgagccaagctctgttgccaagagaggaagaggaagatgaaataagggagggtggagtggaacacccctggcacaacaacgagattctacaagcctctgtagatggtccagaagaaatgaaggaagactatgacactatggggccagaagccacgatccagaccgcaattaacaatggtacaggtga

SEQ ID NO: 182267 - DNA, 5266 bp, Artificial Sequence
  derived and/or modified sequence
agtcaagcggtcttactgtaccgccgtgtgcattccctcatacggtcaggagttatgactcattttgaagatgtaattcttgtctctctgatcccctcgcgggtgcaacacaccaaacaatcgagcctgcgtgctgccgaagcagggcgccgagtccatgcgaactgccatctgatccgctcttatcaatgaagcagccgatcatggcggatggcccccggtgcaagaggcgcaaacaagccaatcccaggaggaaaaacgtggtgaactatgacaatgtagtggacacaggttctgaaacagatgaggaagacaagcttcatattgctgaggatgacggtattgccaaccctctggaccaggagacgagtccagctagtgtgcccaaccatgagtcctccccacacgtgagccaagctctgttgccaagagaggaagaggaagatgaaataagggagggtggagtggaacacccctggcacaacaacgagattctacaagcctctgtagatggtccagaagaaatgaaggaagactatgacactatggggccagaagccacgatccagaccgcaattaacaatggtacagtgaagaatgcaaattgcacatcagattttgaggaatactttgccaaaagaaaactggaggaacgcgatggtcatgcagtcagcatcgaggagtaccttcagcgcagtgacacagccattatttacccagaagcccctgaggagctgtctcgccttggcacgccagaggccaatgggcaagaagaaaatgacctgccacctggaactccagatgcttttgcccaactgctgacctgcccctactgcgaccggggctacaagcgcttgacatcactgaaggagcacatcaagtaccgccacgagaagaatgaagagaacttttcctgccctctctgtagctacacgtttgcctaccgcacccagctcgagcggcatatggtgacacacaagccagggacagatcagcaccaaatgctaacccaaggagcaggtaatcgcaagttcaaatgcacagagtgtggcaaggccttcaaatataaacaccatctgaaagaacacctgcgaattcacagtggtgaaaaaccttacgagtgcccaaactgcaagaaacgtttctcccattctggttcctacagttcgcacatcagcagcaagaaatgtattggtttaatctctgtaaatggccgaatgagaaacaatatcaagacgggttcttcccctaattctgtttcttcttctcctactaattcagccattacccagttaagaaacaagttggagaatggaaaaccacttagtatgtctgaacagacaggcttacttaaaattaaaacagaaccactagacttcaatgactataaagttcttatggctacacacgggtttagtggcactagtccctttatgaatggtgggcttggagccaccagccctttaggagttcatccatctgctcagagtccaatgcagcacttaggtgtagggatggaagcccctttacttgggtttcccaccatgaatagtaatttaagtgaggtacaaaaggttctacagattgtggacaatactgtttccaggcaaaaaatggactgcaaggctgaagaaatttcaaagttgaaaggttatcacatgaaggatccatgctctcaacctgaggaacaaggagttacttctcctaatattccgcctgtcggtcttccggtagtgagtcataatggtgccactaaaagtattattgactatacgttggaaaaagtcaatgaagccaaagcttgcctccagagcttgactactgactcaaggagacagatcagtaatataaagaaagagaagctacgtactttaatagatttggtcactgatgacaaaatgattgagaaccacaacatatccactccattttcatgccagttctgtaaagaaagttttcctggccccatccctttgcatcagcatgaacgttacctttgtaagatgaatgaagagatcaaggcggtcctgcagcctcatgaaaacatagtccccaacaaagccggagtttttgttgataataaagccctcctcttgtcatctgtactttctgagaaaggaatgacaagccccatcaacccatacaaggaccacatgtctgtactcaaagcatactatgctatgaacatggagcccaactccgatgaactgctgaaaatttccattgctgtgggccttcctcaggaatttgtgaaggaatggtttgaacaacgaaaagtctaccagtactcaaattccaggtccccatccctggaaagaagctccaagccgttagctcccaacagtaaccctcccacaaaagactctttattacccaggtctcctgtaaaacctatggactccataacatcaccatctatagcagaactccacaacagtgttacgaattgtgatcctcctctcaggctaacaaaaccttcccattttaccaatattaaaccagttgaaaaattggaccactccaggagtaatactccttctcccttaaatctttcctccacatcttctaaaaactcccacagtagttcatacactccaaacagcttctcttctgaggagctccaggctgagcctttagacttgtcattaccaaaacaaatgaaagaacccaaaagtattatagccacaaagaacaaaacaaaagctagtagcatcagtttagatcataacagtgtttcttcctcatctgaaaactcagatgagcctctgaacttgacttttatcaagaaggaattttcaaattcaaataatctggacaacaaaagcactaacccagtgttcagcatgaacccatttagtgccaaacctttatacacagctcttccacctcaaagcgcatttccccctgctactttcatgccaccagtccagaccagtattcctgggctacgaccatacccaggactggatcagatgagcttcctaccacatatggcctacacctacccaactggagcagctacttttgctgatatgcagcaaaggagaaagtaccagcggaaacaaggatttcagggagaattgcttgatggagcacaagactacatgtcaggcctagatgatatgacagactccgactcctgtctgtctcgcaaaaagatcaagaagacagagagtggcatgtatgcatgtgacttatgtgacaagacattccagaaaagcagttcccttctgcgacataaatacgaacacacaggaaaaagaccacatcagtgtcagatttgtaagaaagcgtttaaacacaagcaccaccttatcgagcactcaaggcttcactcgggcgagaagccctatcagtgtgataaatgtggcaagcgcttctcacactcgggctcgtactcgcagcacatgaatcacaggtattcctactgcaagcgggaggcggaggagcgggaagcggcggagcgcgaggcgcgcgagaaagggcacttggaacccaccgagctgctgatgaaccgggcttacttgcagagcattacccctcaggggtactctgactcggaggagagggagagtatgccgagggatggcgagagcgagaaggagcacgagaaagaaggcgaggatggctacgggaagctgggcagacaggatggcgacgaggagttcgaggaggaagaggaagaaagtgaaaataaaagtatggatacggatcccgaaacgatacgagatgaagaagagactggagatcactccatggacgatagttcggaggatgggaaaatggaaaccaaatcagaccacgaggaagacaatatggaagatggcatgtaataaactactgcattttaagcttcctatttttttttccagtagtattgttacctgcttgaaaacactgctgtgttaagctgttcatgcacgtgcctgacgcttccaggaagctgtagagagggacagaaggggcggttcagccaagacagatgtagacggagttggagctgggtattgttaaaaactgcattatgcaaaaattttgtacagtgttaaggcctaaaaactgtgtggttcagagactaattcctgtgtttaatagcatttatactttaagcacaactagaaaattgtaagaattgcactctacttatgtatcactacaaactttaaaaaactatgtctaatttatattaatacattttaaaaaggtgcccgcactaccatacatcagtatttttattattattattgttattcctttttaatttaatgtgctcgcactacaatgcatcagtattatgattcctctgtactttcctttcgctattcatcaatttcccattttttttttcagcttaagtaaccacacaattttaggcctcaatttttttttttttctgtgaaggaacttgaagtgatgcatgtgtgaatttaagataccgaagtcttaaagtgacctggacgtgaaggaaaaagtaagatgagaaataaagaaagcctttgtaaggtggttttaaaagccttatatgcaaaccttttaatctgtgtttctgcaagtgccatccttgtacagtgttaagagggtaacatgggttacctttgcaccagcttcagtgttaagctcaccctgttctttgaagcacccatgtcagtattagaagaataggcagcagttccttagtttacatatgtttgtgcaattattttctgtacttttttgttcattaattttgtcagtattacaccaaactgtttttgcaacaaaaaaattttttttgcattcatttaattttaggtcaaataacattttatttatgtggctcattttatatttcctaattttatttatttcatactgtagtgtacagtattatagttcttcaatatatagatatattttagtaaaaaaggaacatgacgttgatcatttgggcaaattttacgtaaagagaagagcatttattgtgttttggaacattaattgtgagatgggatttttcaattttattattttatttttgtttttttccaattactggaaattccaaatttgggaacttttgatacgatcttgtgaaaacactgtattttcgactgaaaattccactttcttcatcttgttttttagctaaaaagagggactgttaaatacaatgtatgataccatgacaaaaatctttcctgaattgtctttgtaaaagtattattgaattttcaatttgtaatttcttttgaaaatgaccatgctcgaataaaaatgtagccaaact

SEQ ID NO: 182268 - DNA, 2236 bp, Artificial Sequence
  derived and/or modified sequence
ttactgtaccgccgtgtgcattccctcatacggtcaggagttatgactcattttgaagatatcgagcctgcgtgctgccgaagcagggcgccgagtccatgcgaactgccatctgatccgctcttatcaatgaagcagccgatcatggcggatggcccccggtgcaagaggcgcaaacaagccaatcccaggaggaaaaacgtggtgaactatgacaatgtagtggacacaggttctgaaacagatgaggaagacaagcttcatattgctgaggatgacggtattgccaaccctctggaccaggagacgagtccagctagtgtgcccaaccatgagtcctccccacacgtgagccaagctctgttgccaagagaggaagaggaagatgaaataagggagggtggagtggaacacccctggcacaacaacgagattctacaagcctctgtagatggtccagaagaaatgaaggaagactatgacactatggggccagaagccacgatccagaccgcaattaacaatggtacagtgaagaatgcaaattgcacatcagattttgaggaatactttgccaaaagaaaactggaggaacgcgatggtcatgcagtcagcatcgaggagtaccttcagcgcagtgacacagccattatttacccagaagcccctgaggagctgtctcgccttggcacgccagaggccaatgggcaagaagaaaatgacctgccacctggaactccagatgcttttgcccaactgctgacctgcccctactgcgaccggggctacaagcgcttgacatcactgaaggagcacatcaagtaccgccacgagaagaatgaagagaacttttcctgccctctctgtagctacacgtttgcctaccgcacccagctcgagcggcatatggtgacacacaagccagggacagatcagcaccaaatgctaacccaaggagcaggtaatcgcaagttcaaatgcacagagtgtggcaaggccttcaaatataaacaccatctgaaagaacacctgcgaattcacagtggtgaaaaaccttacgagtgcccaaactgcaagaaacgtttctcccattctggttcctacagttcgcacatcagcagcaagaaatgtattggtttaatctctgtaaatggccgaatgagaaacaatatcaagacgggttcttcccctaattctgtttcttcttctcctactaattcagccattacccagttaagaaacaagttggagaatggaaaaccacttagtatgtctgaacagacaggcttacttaaaattaaaacagaaccactagacttcaatgactataaagttcttatggctacacacgggtttagtggcactagtccctttatgaatggtgggcttggagccaccagccctttaggagttcatccatctgctcagagtccaatgcagcacttaggtgtagggatggaagcccctttacttgggtttcccaccatgaatagtaatttaagtgaggtacaaaaggttctacagattgtggacaatactgtttccaggcaaaaaatggactgcaaggctgaagaaatttcaaagttgaaaggttatcacatgaaggatccatgctctcaacctgaggaacaaggagttacttctcctaatattccgcctgtcggtcttccggtagtgagtcataatggtgccactaaaagtattattgactatacgttggaaaaagtcaatgaagccaaagcttgcctccagagcttgactactgactcaaggagacagatcagtaatataaagaaagagaagctacgtactttaatagatttggtcactgatgacaaaatgattgagaaccacaacatatccactccattttcatgccagttctgtaaagaaagttttcctggccccatccctttgcatcagcatgaacgttacctttgtaagatgaatgaagagatcaaggcggtcctgcagcctcatgaaaacatagtccccaacaaagccggagtttttgttgataataaagccctcctcttgtcatctgtactttctgagaaaggaatgacaagccccatcaacccatacaaggaccacatgtctgtactcaaagcatactatgctatgaacatggagcccaactccgatgaactgctgaaaatttccattgctgtgggccttcctcaggaatttgtgaaggaatggtttgaacaacgaaaagtctaccagtactcaaatt

SEQ ID NO: 182269 - DNA, 3912 bp, Artificial Sequence
  derived and/or modified sequence
cgcggcttcttcatgctttttcttctcaccatttctggccaaaactacaaacaagacttcgcagatcgagcctgcgtgctgccgaagcagggcgccgagtccatgcgaactgccatctgatccgctcttatcaatgaagcagccgatcatggcggatggcccccggtgcaagaggcgcaaacaagccaatcccaggaggaaaaacgtggtgaactatgacaatgtagtggacacaggttctgaaacagatgaggaagacaagcttcatattgctgaggatgacggtattgccaaccctctggaccaggagacgagtccagctagtgtgcccaaccatgagtcctccccacacgtgagccaagctctgttgccaagagaggaagaggaagatgaaataagggagggtggagtggaacacccctggcacaacaacgagattctacaagcctctgtagatggtccagaagaaatgaaggaagactatgacactatggggccagaagccacgatccagaccgcaattaacaatggtacagtgaagaatgcaaattgcacatcagattttgaggaatactttgccaaaagaaaactggaggaacgcgatggtcatgcagtcagcatcgaggagtaccttcagcgcagtgacacagccattatttacccagaagcccctgaggagctgtctcgccttggcacgccagaggccaatgggcaagaagaaaatgacctgccacctggaactccagatgcttttgcccaactgctgacctgcccctactgcgaccggggctacaagcgcttgacatcactgaaggagcacatcaagtaccgccacgagaagaatgaagagaacttttcctgccctctctgtagctacacgtttgcctaccgcacccagctcgagcggcatatggtgacacacaagccagggacagatcagcaccaaatgctaacccaaggagcaggtaatcgcaagttcaaatgcacagagtgtggcaaggccttcaaatataaacaccatctgaaagaacacctgcgaattcacagtggtgaaaaaccttacgagtgcccaaactgcaagaaacgtttctcccattctggttcctacagttcgcacatcagcagcaagaaatgtattggtttaatctctgtaaatggccgaatgagaaacaatatcaagacgggttcttcccctaattctgtttcttcttctcctactaattcagccattacccagttaagaaacaagttggagaatggaaaaccacttagtatgtctgaacagacaggcttacttaaaattaaaacagaaccactagacttcaatgactataaagttcttatggctacacacgggtttagtggcactagtccctttatgaatggtgggcttggagccaccagccctttaggagttcatccatctgctcagagtccaatgcagcacttaggtgtagggatggaagcccctttacttgggtttcccaccatgaatagtaatttaagtgaggtacaaaaggttctacagattgtggacaatactgtttccaggcaaaaaatggactgcaaggctgaagaaatttcaaagttgaaaggttatcacatgaaggatccatgctctcaacctgaggaacaaggagttacttctcctaatattccgcctgtcggtcttccggtagtgagtcataatggtgccactaaaagtattattgactatacgttggaaaaagtcaatgaagccaaagcttgcctccagagcttgactactgactcaaggagacagatcagtaatataaagaaagagaagctacgtactttaatagatttggtcactgatgacaaaatgattgagaaccacaacatatccactccattttcatgccagttctgtaaagaaagttttcctggccccatccctttgcatcagcatgaacgttacctttgtaagatgaatgaagagatcaaggcggtcctgcagcctcatgaaaacatagtccccaacaaagccggagtttttgttgataataaagccctcctcttgtcatctgtactttctgagaaaggaatgacaagccccatcaacccatacaaggaccacatgtctgtactcaaagcatactatgctatgaacatggagcccaactccgatgaactgctgaaaatttccattgctgtgggccttcctcaggaatttgtgaaggaatggtttgaacaacgaaaagtctaccagtactcaaattccaggtccccatccctggaaagaagctccaagccgttagctcccaacagtaaccctcccacaaaagactctttattacccaggtctcctgtaaaacctatggactccataacatcaccatctatagcagaactccacaacagtgttacgaattgtgatcctcctctcaggctaacaaaaccttcccattttaccaatattaaaccagttgaaaaattggaccactccaggagtaatactccttctcccttaaatctttcctccacatcttctaaaaactcccacagtagttcatacactccaaacagcttctcttctgaggagctccaggctgagcctttagacttgtcattaccaaaacaaatgaaagaacccaaaagtattatagccacaaagaacaaaacaaaagctagtagcatcagtttagatcataacagtgtttcttcctcatctgaaaactcagatgagcctctgaacttgacttttatcaagaaggaattttcaaattcaaataatctggacaacaaaagcactaacccagtgttcagcatgaacccatttagtgccaaacctttatacacagctcttccacctcaaagcgcatttccccctgctactttcatgccaccagtccagaccagtattcctgggctacgaccatacccaggactggatcagatgagcttcctaccacatatggcctacacctacccaactggagcagctacttttgctgatatgcagcaaaggagaaagtaccagcggaaacaaggatttcagggagaattgcttgatggagcacaagactacatgtcaggcctagatgatatgacagactccgactcctgtctgtctcgcaaaaagatcaagaagacagagagtggcatgtatgcatgtgacttatgtgacaagacattccagaaaagcagttcccttctgcgacataaatacgaacacacaggaaaaagaccacatcagtgtcagatttgtaagaaagcgtttaaacacaagcaccaccttatcgagcactcaaggcttcactcgggcgagaagccctatcagtgtgataaatgtggcaagcgcttctcacactcgggctcgtactcgcagcacatgaatcacaggtattcctactgcaagcgggaggcggaggagcgggaagcggcggagcgcgaggcgcgcgagaaagggcacttggaacccaccgagctgctgatgaaccgggcttacttgcagagcattacccctcaggggtactctgactcggaggagagggagagtatgccgagggatggcgagagcgagaaggagcacgagaaagaaggcgaggatggctacgggaagctgggcagacaggatggcgacgaggagttcgaggaggaagaggaagaaagtgaaaataaaagtatggatacggatcccgaaacgatacgagatgaagaagagactggagatcactccatggacgatagttcggaggatgggaaaatggaaaccaaatcagaccacgaggaagacaatatggaagatggcatgtaataaactactgcattttaagcttcctatttttttttccagtagtattgttacctgcttgaaaacactgctgtgttaagctgttcatgcacgtgcctgacgcttccaggaagctgtagagagggacagaaggggcg

SEQ ID NO: 182270 - DNA, 1152 bp, Artificial Sequence
  derived and/or modified sequence
atgaccggcggcaccaacaagaccagcagcagcatcagcgagatcctggacaaggtgcaggaggacgccgaggacgtgctgttcagcctgggcttcggccaggaggaccacaaggacaccagcagaatccccgccagattcttcaccacccccagccaggccaagggcatcgacttccagctgttcctgaagagccaggtgagaagaatcgagatggaggacccctgcctgatgctggccagcagattcaagcaggtgcagaccctggccgtgaccgccgacgccttcttctgcctgtacagctacgtgagcaagacccccgtgcagaagttcacccccagccacatgttctggaactgcaaccaccccaccgacgtgcccagcatcagaatcctgagcagagagcccgagccccagagccccagagacagactgagaaaggccatcagcaagatgtgcctgtacacctgccccagagacagacccccccccccccacaacacccccaagagaaacagcctggaccaggtggtgctggaggtgatggacaaggtgaaggaggagaagcagttcctgcagcaggacagcgacctgggccagttcagccaggaggaccccgtgccccccgccgagggcaagaagctgcccaccagcccctacccctgcgtgttctgctgcgaggaggagacccagcagagaatgagcaccgtgctggcccccagccagaccctggacagcaaccccaaggtgccctgctgcacccacagcctgcccatcgaggacccccagtggagcaccgaccccgcccagatcagaagagagctgtgcagcctgcccgccaccaacaccgagacccaccccgccaaggacgagaccttctggaagagaaagagcagagccagaaagagcctgttccagaagaacctgatgggcagaaaggtgaagagcctggacctgagcatcacccagcagaagtggaagcagagcgtggacagacccgagctgagaagaagcctgagccagcagccccaggacaccttcgacctggaggaggtgcagagcaacagcgaggaggagcagagccagagcagatggcccagcagacccagacacccccaccaccaccagaccttcgccggcaaggacagctag

SEQ ID NO: 182271 - DNA, 1152 bp, Artificial Sequence
  derived and/or modified sequence
atgacaggcggaaccaataagactagcagctctattagcgagattctggacaaggtgcaggaagatgctgaggacgtgctcttttccctagggtttggacaggaggaccacaaggatacgagtcgaatccccgctcgtttttttacaacgccttcacaggccaaggggatcgactttcagctgtttctaaaatcacaggtgcgcagaatagaaatggaggatccatgcctgatgctggcctcacgcttcaagcaggtgcagacactggctgtgaccgcagacgccttcttctgcttatatagctacgtatcaaaaacccctgtacagaagtttacccccagtcatatgttctggaactgcaatcaccccactgacgtgcctagcatccgaatcttgtcccgcgagcccgaaccccagtcaccccgagacagactgagaaaagctatttcaaagatgtgcctctatacttgtccacgcgacagaccaccgccaccacacaacacaccgaaaagaaatagcctggatcaggtcgtgttggaggtcatggataaggtgaaggaagagaaacagttcctgcagcaggattcagacctcggccagttctctcaggaagaccctgtcccaccagccgaaggaaagaagctccccacatccccctacccctgtgttttctgttgtgaggaggaaacccaacagagaatgtctactgtgctggcaccgtctcagaccttggacagtaatccgaaagtgccttgttgcacccattctctgcccattgaagatccgcagtggagtaccgacccagcccagattaggagggagctgtgctccctgccggcaactaatactgagacacaccccgccaaagacgaaaccttttggaagcgcaagtccagggcacggaaatctctgtttcagaaaaatctgatgggtcggaaagtaaagagcctggacttgtctatcacccagcagaaatggaaacaatcagtggacagaccggagttacggaggagtttgtctcagcagccccaggacacttttgatctggaggaggttcagtccaactccgaggaggagcaatcccagtctcgttggccatcccggcccagacatccacaccaccatcagaccttcgcaggcaaggattcatag

SEQ ID NO: 182272 - DNA, 1152 bp, Artificial Sequence
  derived and/or modified sequence
atgactggaggcaccaacaagaccagcagcagcatcagcgagatcctggacaaggtgcaggaggatgctgaagatgtgctcttcagcctgggcttcggccaggaggaccacaaggacaccagccgcatcccagcccgcttcttcaccacccccagccaggccaagggcatcgacttccagctgttcctgaagagccaggtgcggcgcatcgagatggaggacccctgcctgatgctggccagccgcttcaagcaggtgcagaccctggccgtgacagcagatgccttcttctgcctgtacagctatgtgtccaagacccctgtgcagaagttcacccccagccacatgttctggaactgcaaccaccccacagatgtgcccagcatccgcatcctgagccgggagcctgagccccagagcccccgggaccggctgaggaaggccatcagcaagatgtgcctgtacacctgcccccgggaccggcccccaccaccccacaacacccccaagaggaacagcctggaccaggtggtgctggaggtgatggacaaggtgaaggaggagaagcagttcctgcagcaggacagcgacctgggccagttcagccaggaggaccctgtgcccccagctgagggcaagaagctgcccaccagcccctacccctgtgtgttctgctgtgaggaggagacccagcagaggatgagcacagtgctggcccccagccagaccctggacagcaaccccaaggtgccctgctgcacccacagcctgcccatcgaggacccccagtggagcacagatcctgcccagatccggcgggagctgtgcagcctgcctgccaccaacacagagacccacccagccaaggatgagaccttctggaagaggaagagccgggccaggaagagcctcttccagaagaacctgatgggcaggaaggtgaagagcctggacctgagcatcacccagcagaagtggaagcagagcgtggacaggcctgagctgcggcgcagcctgagccagcagccccaggacacctttgacctggaggaggtgcagagcaacagcgaggaggagcagagccagagccgctggcccagccggcccaggcacccccaccaccaccagacctttgctgggaaggacagctag

SEQ ID NO: 182273 - DNA, 1152 bp, Artificial Sequence
  derived and/or modified sequence
atgaccggcggcaccaacaagaccagcagcagcatcagcgagatcctggataaagtccaagaggacgccgaggacgtgttgttctcactcggattcggccaggaagaccacaaggatacatccagaattcccgctaggttttttacaacaccttcgcaagcaaaaggaatagacttccagttgtttctgaaaagtcaggtgcgcaggattgaaatggaggatccatgcttaatgctcgcaagccggttcaaacaggtccagacactggccgttactgcagatgcattcttctgcctctacagttatgtgtcgaagactcctgtacagaaattcactccttcccacatgttctggaattgcaaccatccgaccgacgtccccagtattcggattctctcacgagagccagagccacagagccccagagatcgtctacgtaaggcgatcagtaaaatgtgtctgtatacatgccccagagatcgccctcctccaccacataataccccgaaacgtaatagccttgatcaggtggtactggaggtgatggacaaggtgaaggaggagaaacaatttctccagcaggactccgatttgggccagttttcccaagaagaccctgtccctccagcagaagggaagaagctacccactagtccctacccctgtgtcttctgctgcgaagaggagactcagcaaagaatgtccacagttttagccccatcgcagacgctcgatagcaaccccaaagtcccctgctgcacacactccttacccatcgaggacccccaatggtctaccgaccccgcacagattagacgcgaactgtgctctcttcccgccacaaacaccgaaacccacccagcaaaggatgagaccttttggaagcggaagtcccgggctaggaagtctctgttccagaagaatttgatgggaagaaaagtcaagtctctggatctcagtataacacaacaaaaatggaaacagtctgtcgacagaccagaactgaggcggagcctctctcagcagccacaggataccttcgatctggaagaggtgcaatctaatagcgaggaggaacagagccaatcgagatggcccagccggcctagacatccccaccaccaccaaactttcgccggcaaagacagctag

SEQ ID NO: 182274 - DNA, 1152 bp, Artificial Sequence
  derived and/or modified sequence
atgactggaggaactaataagactagctcatcaatatcagagattctcgacaaagtgcaggaagatgctgaggatgtcctcttttctctcggtttcggccaagaagaccataaggacacctcacgcatccctgccaggttctttactacccctagccaggccaaggggattgacttccagctgttcctgaaaagccaggtccggagaatcgagatggaggatccatgcctgatgctggcgagcagattcaagcaggtgcagacactagctgtcactgctgacgcctttttttgcttatattcctacgtcagtaagactccagtgcagaaattcacaccatcccacatgttctggaattgtaaccaccctactgatgtaccgtctattcgaatactcagccgcgaacctgaaccacagagccctcgtgacaggctgaggaaggcaattagtaagatgtgcctatacacctgccctcgtgaccgcccaccccctccccacaacacaccaaagcgtaactccttggaccaagttgtgctcgaggttatggacaaagtgaaagaagagaaacaattcttgcagcaggactctgatctaggccagttttctcaggaggatcctgtgccgccagcagaggggaagaagctccccacatctccctacccatgcgttttttgctgtgaagaggagactcagcagcgtatgtccacggtgctcgctccaagccagaccctggactcgaatcctaaagtgccatgttgtacacacagcctgcccatagaggacccccaatggtcaaccgaccctgcccaaatccgcagggagttatgctcgctaccagcaaccaacacagagacccatcctgccaaggacgagaccttttggaagcgcaaatctagagcaagaaaaagcctgttccagaagaacttgatgggcagaaaagtgaagtctctcgatttgtcaatcacacagcagaagtggaagcaatccgtggaccggccagaacttcgcaggtctctttctcaacagccgcaggacacgtttgatctggaagaagttcaatctaactccgaagaagagcaaagtcaatccagatggccatctagaccaagacatccacaccaccatcagacctttgccggaaaagattcatag

SEQ ID NO: 182275 - protein, 697 aa, Artificial Sequence
  derived and/or modified sequence
MAETSPEPSGQLVVHSDAHSDTVLASFEDQRKKGFLCDITLIVENVHFRAHKALLAASSEYFSMMFAEEGEIGQSIYMLEGMVADTFGILLEFIYTGYLHASEKSTEQILATAQFLKVYDLVKAYTDFQNNHSSPKPTTLNTAGAPVVVISNKKNDPPKRKRGRPKKVNTLQEEKSELAAEEEIQLRVNNSVQNRQNFVVKGDSGVLNEQIAAKEKEESEPTCEPSREEEMPVEKDENYDPKTEDGQASQSRYSKRRIWRSVKLKDYKLVGDQEDHGSAKRICGRRKRPGGPEARCKDCGKVFKYNHFLAIHQRSHTGERPFKCNECGKGFAQKHSLQVHTRMHTGERPYTCTVCSKALTTKHSLLEHMSLHSGQKSFTCDQCGKYFSQNRQLKSHYRVHTGHSLPECKDCHRKFMDVSQLKKHLRTHTGEKPFTCEICGKSFTAKSSLQTHIRIHRGEKPYSCGICGKSFSDSSAKRRHCILHTGKKPFSCPECNLQFARLDNLKAHLKIHSKEKHASDASSISGSSNTEEVRNILQLQPYQLSTSGEQEIQLLVTDSVHNINFMPGPSQGISIVTAESSQNMTADQAANLTLLTQQPEQLQNLILSAQQEQTEHIQSLNMIESQMGPSQTEPVHVITLSKETLEHLHAHQEQTEELHLATSTSDPAQHLQLTQEPGPPPPTHHVPQPTPLGQEQS

SEQ ID NO: 182276 - DNA, 2094 bp, Artificial Sequence
  derived and/or modified sequence
atggcagagacctcgccagaacctagcggccaactcgttgttcattccgacgcccacagtgacactgtattggcctcgtttgaggaccaacgaaaaaagggctttctttgtgacattaccctgatcgtagaaaacgtacattttagagcccacaaggccctgctggcagccagttctgagtactttagtatgatgtttgctgaagagggagagataggacaatctatttacatgctggaaggcatggtcgccgataccttcggaatcttactggaattcatatacaccggttacctgcacgcatctgaaaagagtacggaacagatcctggctaccgcccagttcctcaaggtgtacgacttggtcaaggcatacacagatttccagaacaatcacagctctcccaagcccactaccctcaatacagccggtgctcccgtcgtcgtcatcagtaacaagaaaaatgatcccccaaagcgaaaacgtggtaggcctaagaaagtcaatactctacaggaggagaaatccgaactcgcagccgaagaagagattcagctccgagttaataacagcgtgcagaacagacagaattttgtggtaaaaggagatagtggtgtactgaatgagcagatcgccgcaaaggagaaggaggaaagtgaaccaacttgcgagcctagtagagaggaggagatgcccgtggagaaggacgaaaactacgaccccaaaacagaagatggacaggcatcccagtctcgctacagtaaaaggagaatatggcgaagtgtcaagctgaaggactacaagctcgtgggagaccaggaggaccatggctcagctaaacgcatatgcggacgaagaaagaggcccggcggaccagaagcgagatgcaaggattgcggtaaagtctttaaatataaccatttcttggcgatacaccagcgctctcacaccggggaacgaccattcaagtgcaacgaatgcggcaaaggattcgctcaaaagcactccttgcaggtccatacaaggatgcacaccggcgaaagaccttacacctgtaccgtgtgtagtaaggcgctgactacgaaacacagtctcttagagcatatgtctcttcacagcgggcagaagtcgttcacttgcgatcagtgcgggaagtactttagccaaaacagacagctgaaatcccactaccgcgtccatacaggccattctttgccagagtgcaaagactgccaccgtaagttcatggacgttagccaattaaagaaacacttacggacccatacgggcgaaaagccttttacatgtgagatctgtggtaagtcatttactgcaaagtcatctctgcaaactcacattcgcatccataggggtgagaagccttattcatgtggaatttgtggaaaaagcttctccgatagctcagcaaagcgtcgtcactgtatcctgcacacaggaaaaaagccttttagctgcccagaatgtaatctacagttcgccaggctcgacaatctcaaggcacacttaaagattcacagcaaggaaaaacacgcatccgacgcaagctccatctccggttcctccaatacagaggaggttaggaatattctccagttacaaccttatcagctctctacatctggagagcaggaaattcagctgctggtgaccgacagcgtgcataatatcaacttcatgcccggtcccagtcaaggcattagcatcgttacagcagaatcatcgcagaacatgaccgcagaccaggccgccaatctgactctgctcacccagcagcctgagcagctccagaatttgatcctatcggcccagcaagaacagaccgaacacattcaaagcctgaacatgatcgagagccagatggggccctctcagacagagccagtgcatgttatcactcttagcaaggagacactagaacacctacacgcccaccaagaacagacggaagagctccaccttgctacttctacatcggatccagctcagcatctacagttaacgcaggaaccagggcccccaccccccactcatcatgtgcctcaacccacccccctcggacaagaacaaagttag

SEQ ID NO: 182277 - DNA, 2094 bp, Artificial Sequence
  derived and/or modified sequence
atggccgagaccagccctgagcccagcggccagctggtggtgcacagtgatgcccacagcgacacagtgctggccagctttgaggaccagaggaagaagggcttcctgtgtgacatcaccctcatcgtggagaatgtgcacttccgggcccacaaggccctgctggccgccagcagcgagtacttctccatgatgtttgctgaggagggggagatcggccagagcatctacatgctggagggcatggtggccgacaccttcggcatcctgctggagttcatctacacaggctacctgcacgccagcgagaagagcacagagcagatcctggccacagcccagttcctgaaggtgtatgacctggtgaaggcctacacagacttccagaacaaccacagcagccccaagcccaccaccctgaacacagctggggcccctgtggtggtgatcagcaacaagaagaatgacccccccaagaggaagaggggccggcccaagaaggtgaacaccctgcaggaggagaagtctgagctggccgctgaggaggagatccagctgcgggtgaacaacagcgtgcagaaccggcagaactttgtggtgaagggggacagcggcgtgctgaatgagcagattgctgccaaggagaaggaggagagcgagcccacctgtgagcccagccgggaggaggagatgcctgtggagaaggatgaaaattatgaccccaagacagaagatggccaggccagccagagccgctacagcaagaggcgcatctggaggtctgtgaagctgaaggactacaagctggtgggggaccaggaggaccacggcagcgccaagaggatctgtggccgcaggaagaggcctgggggccctgaggcccgctgcaaggactgtgggaaggtgttcaagtacaaccacttcctggccatccaccagaggagccacactggagagcggcccttcaagtgcaatgaatgtgggaaaggatttgcccagaagcacagcctgcaggtgcacaccaggatgcacactggagagcggccctacacctgcaccgtgtgcagcaaggccctgaccaccaagcacagcctgctggagcacatgagcctgcacagcggccagaagagcttcacctgtgaccagtgtgggaagtacttcagccagaaccggcagctgaagagccactacagagtgcacacaggccacagcctgcctgagtgcaaggactgccacaggaagttcatggatgtgtcccagctgaagaagcacctgcggacccacactggagagaagcccttcacctgtgagatctgtgggaagagcttcaccgccaagagcagcctgcagacccacatccgcatccacagaggagagaagccctacagctgtggcatctgtgggaagagcttcagtgacagcagcgccaagaggaggcactgcatcctgcacacaggcaagaagcccttcagctgcccagagtgcaacctgcagtttgcccggctggacaacctgaaggcccacctgaagatccacagcaaggagaagcacgccagtgatgccagcagcatcagcggcagcagcaacacagaggaggtgaggaacatcctgcagctgcagccctaccagctgagcaccagcggggagcaggagatccagctgctggtgacagattctgtgcacaacatcaacttcatgcctggccccagccagggcatcagcatcgtgacagctgagagcagccagaacatgacagctgaccaggccgccaacctgaccctgctgacccagcagcctgagcagctgcagaacctgatcctgagcgcccagcaggagcagacagagcacatccagagcctgaacatgattgagagccagatgggccccagccagacagagcctgtgcacgtgatcaccctgagcaaggagaccctggagcacctgcacgcccaccaggagcagacagaggagctgcacctggccaccagcaccagtgaccctgcccagcacctgcagctgacccaggagcccggccccccaccacccacccaccacgtgccccagcccacccccctgggccaggagcagagctag

SEQ ID NO: 182278 - DNA, 2094 bp, Artificial Sequence
  derived and/or modified sequence
atggccgagaccagccccgagcccagcggccagctggtggtgcactcggacgcccactccgataccgttctggcctcttttgaggaccagcgaaaaaaagggttcttatgcgatatcacccttatcgtggagaatgttcattttcgggcacacaaagcattactggcggcttcctccgaatacttcagcatgatgtttgctgaggagggggaaatcggtcagagtatctacatgctggagggcatggtcgccgataccttcggcattttgctagagtttatctatacggggtaccttcatgcatctgaaaaatccacagaacagatcctggccacagcacagttcctaaaagtttacgacctagtcaaggcttacacagacttccagaacaaccacagcagccctaaacctaccaccctgaatacagcgggggccccagtggtagtgatcagtaataaaaagaatgatccacctaagagaaaacgggggcgacctaagaaggtgaacaccttacaggaagagaagagtgagcttgctgccgaggaagagattcagctacgagtaaataacagcgtgcagaatcgccaaaacttcgtggtaaagggagacagcggcgtattgaacgaacagatcgccgctaaggagaaggaagagtccgaacccacatgcgagccctcccgtgaagaggaaatgcccgtggagaaagacgagaactacgaccccaaaaccgaggacggtcaggcctcccaatctaggtactctaaaagacgaatttggaggtctgttaaactgaaggactacaaactcgtgggggatcaggaggatcatggttccgcaaaacgaatttgcggcaggcggaaacgaccgggcggcccagaggctcgatgcaaggattgtggtaaggtcttcaagtataaccacttcctcgctattcaccagcgttcccataccggggagcgccccttcaagtgcaatgagtgcgggaaaggatttgctcaaaaacactctctgcaagtccacacgcggatgcacaccggtgagagaccgtatacctgcacagtgtgctctaaagcgcttaccactaaacactcgctgctagaacatatgagtctacattcaggccaaaagtcttttacttgcgatcagtgtggcaaatacttctctcaaaatcggcagttgaagtcccattaccgcgtccacacaggccactccctgcccgaatgcaaagactgccacaggaagttcatggacgtttcccagctgaagaaacacctccgaacccacacgggggagaagccctttacttgcgagatttgcgggaaatcatttaccgcaaaaagctcgctgcagacccacatacggattcaccggggcgaaaaaccatattcttgtggaatttgcgggaagagtttcagcgactcctctgctaaaaggcgacattgcatactgcacacaggaaagaaacctttttcctgtccagagtgtaatctgcagttcgctaggctagataacctgaaggcccatctgaagatccactccaaggaaaaacatgcttctgatgcctcaagcatctccggctctagtaataccgaggaggtgcggaatattctacagttgcagccgtaccaactgtccacctcaggggaacaggagattcagctgctagtgacagacagtgtgcacaacattaatttcatgccagggccgtcccaaggcatttccatcgtgaccgccgagagcagtcagaatatgaccgccgaccaggcggccaacctgacactgttgacgcagcaacctgaacaactgcagaatctcatactgtcagctcaacaggagcagaccgaacatatccagtcacttaacatgatagaatcccagatggggccgtctcaaactgaaccagtgcacgtgatcacactctctaaagagacgctagaacacttgcacgcccatcaggagcagaccgaagagttgcacttagccaccagcacctctgatcctgcccagcacctgcagctcacgcaggagccgggaccacccccaccaacccatcacgtcccgcagcctacaccactcgggcaggagcagtcctag

SEQ ID NO: 182279 - DNA, 2094 bp, Artificial Sequence
  derived and/or modified sequence
atggccgagactagtcctgagcctagtggtcagcttgtcgttcacagtgacgcacattccgacacagtactggccagttttgaggaccagaggaaaaagggcttcctgtgcgacataaccttgattgtggagaacgttcattttagggctcacaaggcgctgttagcggcttccagcgaatacttcagtatgatgtttgcagaggagggggaaattggacaatcaatttatatgctggaagggatggtagcagacacattcggcatcctattagagtttatctatactggctacttacatgcctctgagaaatccacagagcagatacttgccaccgctcaattcctgaaggtgtatgatctcgtgaaggcgtataccgactttcagaacaatcattccagtcctaaaccaaccacactgaacacagcaggggctccagtggtggtcatttctaataaaaagaatgatccacccaaaagaaaacggggacggccaaaaaaggtgaatacactgcaggaggagaagtcagaattggctgcagaagaggagatccagctgagagtgaacaactctgtccagaatagacagaacttcgtggtgaaaggtgattcaggagttctgaacgagcagattgcagccaaagaaaaggaggagtccgagcctacatgcgagccctctcgcgaggaggaaatgcccgtggaaaaggatgaaaactacgatcctaagaccgaggacggccaggccagtcagtccaggtactcaaaacgccgtatctggcggagcgttaagttaaaggattacaagctcgtcggcgatcaggaggaccacggcagcgctaaacggatctgtggtcggcgtaagcgaccagggggaccagaggcaagatgcaaggactgtggaaaggtttttaaatacaaccactttctggccatccaccagcgctcccatacgggagagcgcccatttaaatgcaatgaatgcggcaagggcttcgcacagaagcactcgctccaggtgcacacccgcatgcacaccggagagagaccgtatacatgtacagtgtgctccaaagcactcacgacaaaacactccctcctggaacatatgtctttacactcgggccagaagagctttacctgtgaccaatgtgggaagtatttctcccagaatcgccagctgaaaagccactacagggtccacaccggacactccttgcctgagtgcaaggactgtcacagaaagttcatggacgttagccagctgaaaaagcatctacgtactcacaccggggaaaaaccctttacatgcgaaatctgtggcaaatcgtttacagccaaatcatccctccagacgcatattcgaatccaccggggtgagaagccgtatagctgcggtatctgtggtaagtccttttctgactcgagtgcaaagcggcgtcactgcattctgcataccggaaagaagccgttttcctgccctgagtgtaacctccagttcgccaggctcgataaccttaaggctcatctcaaaattcattccaaggaaaagcacgcctcggacgcttcttcgatctccggttcaagcaatactgaagaagttcggaatatcctgcagctgcaaccataccagctgtccacatcaggtgaacaggagattcagttgttggtaacagattctgtccacaacatcaatttcatgcccggtccctctcaagggatctctatcgtcactgcggagtcctctcagaacatgactgctgatcaggcggcaaacttgaccctgttaacccagcagcctgaacagctgcaaaatttgattctgagtgcccagcaggaacaaaccgagcacatccaatctttaaatatgattgaaagccagatgggacctagtcaaactgagcctgtccatgtcattacgctgtccaaggaaaccttggagcacctccatgcccatcaagagcagactgaggaactgcacctcgctaccagtacttccgacccagcccagcacctgcagttgacacaagaacctgggcctcccccacccacccatcacgtgccccagcctacccccctgggtcaggaacaatcttag

SEQ ID NO: 182280 - DNA, 5519 bp, Artificial Sequence
  derived and/or modified sequence
cgcgcttccgggttggctgtggctgtggctgcggcggcggcgcaggagcagaaaccggtgcggcgcagaagccccagaggcgggcggggcggagcggagggccagcgggccccggcgtgggtctcccgccaggccgccggatttaacccttagtggcttctgaagaaaatggcagaaacatcgccagagccttctgggcagcttgttgtacactcagacgctcacagtgacactgtgctggccagttttgaggatcagaggaagaaaggcttcctctgtgacattactttaatcgtggagaatgtacatttccgggcccacaaagccttacttgctgccagtagtgaatacttctcaatgatgtttgcagaagagggggaaatcggccaatccatttatatgctggaaggcatggttgcagacacctttggtatcctgctggaatttatctacacaggttatctccatgccagtgagaaaagtacagaacaaatcctggctactgctcagttcttaaaagtctatgacctggtaaaggcttacacagacttccaaaataatcatagctccccaaagccaacaactttgaacactgctggtgccccagtggttgttatctctaataagaaaaacgatcctccaaagcggaaacggggaagaccaaaaaaagtcaatacattgcaggaggagaaatcagaactggctgcagaggaagaaatacagttaagagtgaacaattcagttcagaatagacaaaactttgtggttaaaggagacagtggtgtactgaatgagcaaattgcagcaaaagaaaaggaagaatcggagcctacttgtgagccaagtagagaggaggaaatgccagttgaaaaagatgagaactatgatcccaagaccgaggatggccaggcaagccagagtcgatacagcaagcggaggatttggagatccgtcaaacttaaagattacaaacttgttggggatcaagaggaccatggttcagccaagaggatctgtggaaggagaaagcgccctggaggccctgaggcccgctgtaaagactgtggcaaggtctttaagtacaatcactttttagcaatccaccagaggagccacacaggggagcgacctttcaaatgtaatgagtgtggaaaaggctttgcccagaagcactcgctacaggtccacaccaggatgcacacaggcgagcggccgtacacctgcaccgtgtgcagcaaggctctgaccaccaagcactcactgctggagcacatgagcctgcactcaggacagaagtcttttacctgtgatcaatgcggaaaatatttcagccagaacagacagctaaagagccattaccgagttcatacaggccactcattaccggaatgcaaagactgccatcgcaaattcatggatgtgtctcagctaaagaaacatctgcgaacacacacaggtgagaagccatttacttgtgaaatctgtggcaaatctttcacagcaaagagttctcttcagacccacatcagaatccatcgaggagaaaagccatactcctgtggcatttgtggcaaatccttctctgactccagtgccaaaaggagacactgcattctacacactggcaagaagcctttctcctgccctgagtgtaacttacagtttgctcgcttagacaacttgaaggctcacttgaaaattcatagcaaggagaagcatgcttcagatgccagcagcatttctggcagtagtaatacagaagaggtcaggaatattcttcagctacagccatatcaactctctacctcgggagagcaggaaattcagcttctcgtaaccgattctgtacataacatcaatttcatgcccggtcctagccagggaatcagcattgtgactgcagagagttcccaaaacatgactgcagaccaggctgctaatcttaccctgctcacgcagcagccagagcaactgcagaatttaattctttcagctcaacaggagcaaacagaacacattcagagcctcaatatgattgaaagccagatggggccctcacaaacagagccagtgcacgtgatcactctgtccaaggaaacactggaacatcttcatgcccatcaagagcaaacagaggagctccatttagctacaagtacttcagatccagctcagcacctgcagctgacacaggagcctggtccgccaccacccactcaccacgtgccccagccaacgccacttggccaggagcagagctgacctgtaaacacgtttgactgcttgattgggctcttcttataagccagctctgactggattttgaacgcttgaaatcaggctctccacaccattgacttgcagatgcttctgtgagagctgtgatggctaactgatgtttataatgccctccatccaggtagcaagatgtgtgtatgtcttgtctaaggtactgatttgtattgagcatttcaatattattgaatggttttcattttaatctgcaatgtctcataaagactcgggtagtttttctttgggggcattgatctcagtttttctgtaaggtttaaatgttcacagccataggttatggtcttgccaacctccccagttatgtttttttgttttctaggacaaagggagtcattttggttgaactgggcagaatggtttgttctattttcttatttttcttaggcaacacagttgttaccacaagacaagtcagggctaaatatgacagatcacaatgtatggggaatttgcccttttaataatttccagtcccctaagacaaagtaaccctcaacgttttatctttatgcagtacagtgggcttattgtgttaacacttcagaaagattcaaactcataaactcagtattttaactcaaaattcatgtaacaagatagccaaaagcataggatttcttaaaattctgaattcgtcttttctgagaaacataaatttacatatttttcaacagaaggctatcaaaattttaattaagtttaaaatacaaaattggatcaagacattcaccctaaattctgaatttttgtcagaaaagagatttgattttcatgaaggtaaagctttcttcactattctggaacataaaactttattcagtgtaatttaagtcttatatatactctactgaattctaactgatctcctgaaaatgttgatctacgtgttgtgtctgataactttctggagatggaagcttataattcatttttattgcagactagttaaatcccacaaagtgaatatcttctcctaatctttccttttttagagacagggtctcactgtatcacccaggccagagtgtagtggcacaatcattgctcactgtaacctcgaattcctgggctcaagcaaccctcccaccttagcctccctagtagctgggactacagggatgtaccaccacacccagctaatcttcatctaatcttaaaactttgagcctcagagactttgtagccagcatgtgtctgtaattgtatgatttttaaatcatcatcaaaagattaaattatgtttgggttaggttttcaagctaagcttattgaattcttttaccactttcatgtaagctggtaggggatttttgagaaaagaaggtgggcactagtatatctaaattaacaatgctgatggggagtagggggtaatctactctaaaattaatagagcctttccatcaattgttttgttttagacatccttgatttctccctaaatcaaataagttatttggaggttagagtaatagagaattcttcaggtttgagagaagataaaaacattttggttgcatatttgctaagctatattttattatatgtaattcacaaaacttccaaaatgatatatatcttatatgtatcaaccaaactaatgttaaatcaggcctgactagagcaaagataacaattttttacaaacactgttaagccctaagtattatttcaggttctcgtttaaactgtttaattttattcttaaaacacaaagtttttaccaacttttcaaagcccaccaatccacattttctccaggaaattaaatatttaagtaagtgagtgtttactcactctggatagctaggtgattattcagaaaatacggttacatagctatttataagtcaagtttcactggctctataacagtctacctctacactaagagaactataacatgaacaacataggtcactttaaatgttctagtagcaacttttaaaaacataaaaagaagcaggtgaaaatgttaataaaagtttatttaatccaacatttgccaaatatttcaacatataaaaatatattagtgagacattttacattctctttttcatactaagctttcgaaatctggtgtgtattttacactttctgcacatctccatttggatgctaatgttcattggacatacttgatctgtatttagatttcatacaacttacagttgaaaacagattctcatatcaagtagctaagacaaaagtttttttcaagaattgaaataagtatcagtttaaaaatttatattaaatttattaaaattaaaatccagttccttgttgcatgggacacagtgcaaatgcttgataagcacatgtggctagtggctgctatattggacagcatgggccacctgtttctaacttgagcatcagtcctagctatgcctgaattatttgaccagctgtcaaagagaaacaaggaaatgatagctttgttaatctagcctctttctttgtcccacatatacattctacccctttgaataaaaaagttcaatgacgccgggcgtggaggctcatgcctgtaatcccagcactttgggaggccaaggtgggcggatcacgaggtcaggagttcgagggcagcctgaccaacatagtgaaaccccatctctactaaaaatacaaaaattagctgggcgtggtggtgtacccctgtaatcccagctactcgggaggctgagacaggagaatcacttgaacccaggaggcggaggctgcagtgagctgagatcacgccattgcactcaagcctggcgacagagcgagactccgtctcaaaaaaaaaagttaaatgacttgagtacccaaaagaaatgtcgtgaacatgaaagtacttctcatgtgtccttgagaaatgatgttgctagtgcagtgtttcacaattcattttctactaaatgtgtaccattttttaaattgttttaacagaaatatagagtgtgtttcttaggaaatagaatgttatgctttggggctcctgaaacacctcgttttgaaggtgaatctttggttttctcccagaagagggtctgccttgggatgattggagctcttaccatcaaaatcagttattcaagtgcttgcccagtgcttcttgaaactcacctctactctgtattttctacagttggttcttgtgttataaatgttgtgagcaacagattaaatgatgctgaggaatgaaaaaa

SEQ ID NO: 182281 - DNA, 2094 bp, Artificial Sequence
  derived and/or modified sequence
atggccgagaccagccccgagcccagcggccagctggtggtgcacagcgacgcccacagcgacaccgtgctggccagcttcgaggaccagagaaagaagggcttcctgtgcgacatcaccctgatcgtggagaacgtgcacttcagagcccacaaggccctgctggccgccagcagcgagtacttcagcatgatgttcgccgaggagggcgagatcggccagagcatctacatgctggagggcatggtggccgacaccttcggcatcctgctggagttcatctacaccggctacctgcacgccagcgagaagagcaccgagcagatcctggccaccgcccagttcctgaaggtgtacgacctggtgaaggcctacaccgacttccagaacaaccacagcagccccaagcccaccaccctgaacaccgccggcgcccccgtggtggtgatcagcaacaagaagaacgacccccccaagagaaagagaggcagacccaagaaggtgaacaccctgcaggaggagaagagcgagctggccgccgaggaggagatccagctgagagtgaacaacagcgtgcagaacagacagaacttcgtggtgaagggcgacagcggcgtgctgaacgagcagatcgccgccaaggagaaggaggagagcgagcccacctgcgagcccagcagagaggaggagatgcccgtggagaaggacgagaactacgaccccaagaccgaggacggccaggccagccagagcagatacagcaagagaagaatctggagaagcgtgaagctgaaggactacaagctggtgggcgaccaggaggaccacggcagcgccaagagaatctgcggcagaagaaagagacccggcggccccgaggccagatgcaaggactgcggcaaggtgttcaagtacaaccacttcctggccatccaccagagaagccacaccggcgagagacccttcaagtgcaacgagtgcggcaagggcttcgcccagaagcacagcctgcaggtgcacaccagaatgcacaccggcgagagaccctacacctgcaccgtgtgcagcaaggccctgaccaccaagcacagcctgctggagcacatgagcctgcacagcggccagaagagcttcacctgcgaccagtgcggcaagtacttcagccagaacagacagctgaagagccactacagagtgcacaccggccacagcctgcccgagtgcaaggactgccacagaaagttcatggacgtgagccagctgaagaagcacctgagaacccacaccggcgagaagcccttcacctgcgagatctgcggcaagagcttcaccgccaagagcagcctgcagacccacatcagaatccacagaggcgagaagccctacagctgcggcatctgcggcaagagcttcagcgacagcagcgccaagagaagacactgcatcctgcacaccggcaagaagcccttcagctgccccgagtgcaacctgcagttcgccagactggacaacctgaaggcccacctgaagatccacagcaaggagaagcacgccagcgacgccagcagcatcagcggcagcagcaacaccgaggaggtgagaaacatcctgcagctgcagccctaccagctgagcaccagcggcgagcaggagatccagctgctggtgaccgacagcgtgcacaacatcaacttcatgcccggccccagccagggcatcagcatcgtgaccgccgagagcagccagaacatgaccgccgaccaggccgccaacctgaccctgctgacccagcagcccgagcagctgcagaacctgatcctgagcgcccagcaggagcagaccgagcacatccagagcctgaacatgatcgagagccagatgggccccagccagaccgagcccgtgcacgtgatcaccctgagcaaggagaccctggagcacctgcacgcccaccaggagcagaccgaggagctgcacctggccaccagcaccagcgaccccgcccagcacctgcagctgacccaggagcccggcccccccccccccacccaccacgtgccccagcccacccccctgggccaggagcagagctag

SEQ ID NO: 182282 - protein, 1056 aa, Artificial Sequence
  derived and/or modified sequence
MLSVVENGLDPQAAIPVIKKKLVGSVKALQKQYVSLDTVVTSEDGDANTMCSALEAVFIHGLHAKHIRAEAGGKRKKSAHQKPLPQPVFWPLLKAVTHKHIISELEHLTFVNTDVGRCRAWLRLALNDGLMECYLKLLLQEQARLHEYYQPTALLRDAEEGEFLLSFLQGLTSLSFELSYKSAILNEWTLTPLALSGLCPLSELDPLSTSGAELQRKESLDSISHSSGSEDIEVHHSGHKIRRNQKLTASSLSLDTASSSQLSCSLNSDSCLLQENGSKSPDHCEEPMSCDSDLGTANAEDSDRSLQEVLLEFSKAQVNSVPTNGLSQETEIPTPQASLSLHGLNTSTYLHCEAPAEPLPAQAASGTQDGVHVQEPRPQAPSPLDLQQPVESTSGQQPSSTVSETAREVGQGNGLQKAQAHDGAGLKLVVSSPTSPKNKSWISEDDFYRPSREQPLESASDHPIASYRGTPGSRPGLHRHFSQEPRKNCSLGALDQACVPSPGRRQAQAAPSQGHKSFRVVHRRQMGLSNPFRGLMKLGTVERRGAMGIWKELFCELSPLEFRLYLSNEEHTCVENCSLLRCESVGPAHSDGRFELVFSGKKLALRASSQDEAEDWLDRVREALQKVRPQQEDEWVNVQYPDQPEEPPEAPQGCLSPSDLLSEPAALQGTQFDWSSAQVPEPDAIKESLLYLYMDRTWMPYIFSLSLEALKCFRIRNNEKMLSDSHGVETIRDILPDTSLGGPSFFKIITAKAVLKLQAGNAEEAALWRDLVRKVLASYLETAEEAVTLGGSLDENCQEVLKFATRENGFLLQYLVAIPMEKGLDSQGCFCAGCSRQIGFSFVRPKLCAFSGLYYCDICHQDDASVIPARIIHNWDLTKRPICRQALKFLTQIRAQPLINLQMVNASLYEHVERMHLIGRRREQLKLLGDYLGLCRSGALKELSKRLNHRNYLLESPHRFSVADLQQIADGVYEGFLKALIEFASQHVYHCDLCTQRGFICQICQHHDIIFPFEFDTTVRCAECKTVFHQSCQAVVKKGCPRCARRRKYQEQNIFA

SEQ ID NO: 182283 - DNA, 3171 bp, Artificial Sequence
  derived and/or modified sequence
atgctgagcgtggtggagaacggcctggacccccaggccgccatccccgtgatcaagaagaagctggtgggcagcgtgaaggccctgcagaagcagtacgtgagcctggacaccgtggtgaccagcgaggacggcgacgccaacaccatgtgcagcgccctggaggccgtgttcatccacggcctgcacgccaagcacatcagagccgaggccggcggcaagagaaagaagagcgcccaccagaagcccctgccccagcccgtgttctggcccctgctgaaggccgtgacccacaagcacatcatcagcgagctggagcacctgaccttcgtgaacaccgacgtgggcagatgcagagcctggctgagactggccctgaacgacggcctgatggagtgctacctgaagctgctgctgcaggagcaggccagactgcacgagtactaccagcccaccgccctgctgagagacgccgaggagggcgagttcctgctgagcttcctgcagggcctgaccagcctgagcttcgagctgagctacaagagcgccatcctgaacgagtggaccctgacccccctggccctgagcggcctgtgccccctgagcgagctggaccccctgagcaccagcggcgccgagctgcagagaaaggagagcctggacagcatcagccacagcagcggcagcgaggacatcgaggtgcaccacagcggccacaagatcagaagaaaccagaagctgaccgccagcagcctgagcctggacaccgccagcagcagccagctgagctgcagcctgaacagcgacagctgcctgctgcaggagaacggcagcaagagccccgaccactgcgaggagcccatgagctgcgacagcgacctgggcaccgccaacgccgaggacagcgacagaagcctgcaggaggtgctgctggagttcagcaaggcccaggtgaacagcgtgcccaccaacggcctgagccaggagaccgagatccccaccccccaggccagcctgagcctgcacggcctgaacaccagcacctacctgcactgcgaggcccccgccgagcccctgcccgcccaggccgccagcggcacccaggacggcgtgcacgtgcaggagcccagaccccaggcccccagccccctggacctgcagcagcccgtggagagcaccagcggccagcagcccagcagcaccgtgagcgagaccgccagagaggtgggccagggcaacggcctgcagaaggcccaggcccacgacggcgccggcctgaagctggtggtgagcagccccaccagccccaagaacaagagctggatcagcgaggacgacttctacagacccagcagagagcagcccctggagagcgccagcgaccaccccatcgccagctacagaggcacccccggcagcagacccggcctgcacagacacttcagccaggagcccagaaagaactgcagcctgggcgccctggaccaggcctgcgtgcccagccccggcagaagacaggcccaggccgcccccagccagggccacaagagcttcagagtggtgcacagaagacagatgggcctgagcaaccccttcagaggcctgatgaagctgggcaccgtggagagaagaggcgccatgggcatctggaaggagctgttctgcgagctgagccccctggagttcagactgtacctgagcaacgaggagcacacctgcgtggagaactgcagcctgctgagatgcgagagcgtgggccccgcccacagcgacggcagattcgagctggtgttcagcggcaagaagctggccctgagagccagcagccaggacgaggccgaggactggctggacagagtgagagaggccctgcagaaggtgagaccccagcaggaggacgagtgggtgaacgtgcagtaccccgaccagcccgaggagccccccgaggccccccagggctgcctgagccccagcgacctgctgagcgagcccgccgccctgcagggcacccagttcgactggagcagcgcccaggtgcccgagcccgacgccatcaaggagagcctgctgtacctgtacatggacagaacctggatgccctacatcttcagcctgagcctggaggccctgaagtgcttcagaatcagaaacaacgagaagatgctgagcgacagccacggcgtggagaccatcagagacatcctgcccgacaccagcctgggcggccccagcttcttcaagatcatcaccgccaaggccgtgctgaagctgcaggccggcaacgccgaggaggccgccctgtggagagacctggtgagaaaggtgctggccagctacctggagaccgccgaggaggccgtgaccctgggcggcagcctggacgagaactgccaggaggtgctgaagttcgccaccagagagaacggcttcctgctgcagtacctggtggccatccccatggagaagggcctggacagccagggctgcttctgcgccggctgcagcagacagatcggcttcagcttcgtgagacccaagctgtgcgccttcagcggcctgtactactgcgacatctgccaccaggacgacgccagcgtgatccccgccagaatcatccacaactgggacctgaccaagagacccatctgcagacaggccctgaagttcctgacccagatcagagcccagcccctgatcaacctgcagatggtgaacgccagcctgtacgagcacgtggagagaatgcacctgatcggcagaagaagagagcagctgaagctgctgggcgactacctgggcctgtgcagaagcggcgccctgaaggagctgagcaagagactgaaccacagaaactacctgctggagagcccccacagattcagcgtggccgacctgcagcagatcgccgacggcgtgtacgagggcttcctgaaggccctgatcgagttcgccagccagcacgtgtaccactgcgacctgtgcacccagagaggcttcatctgccagatctgccagcaccacgacatcatcttccccttcgagttcgacaccaccgtgagatgcgccgagtgcaagaccgtgttccaccagagctgccaggccgtggtgaagaagggctgccccagatgcgccagaagaagaaagtaccaggagcagaacatcttcgcctag

SEQ ID NO: 182284 - DNA, 3171 bp, Artificial Sequence
  derived and/or modified sequence
atgctcagtgttgtggagaacggccttgacccccaagccgctatacctgtcattaagaaaaagttggtcggctcagtaaaagccctgcagaagcaatacgtctcacttgacaccgtagtaacttctgaggatggcgacgcaaacactatgtgttcagcacttgaggctgtctttattcacgggctgcatgccaagcacattcgcgctgaggcgggaggcaagcgaaaaaaatcagcacatcagaagcccttaccacagcccgttttctggcccctgctcaaggcagtcactcacaagcacattatctccgagttagagcatttaacctttgttaacaccgacgttggaaggtgcagggcttggcttcggcttgcgcttaacgatgggctgatggagtgctaccttaaactccttcttcaagaacaggccagattgcatgagtattatcagcctacagcattgttacgggacgctgaagagggagaatttctgctcagttttctgcagggccttacatcactctcctttgagctttcatataagtctgcgattctaaacgaatggactctgacacccttggcactaagcggtctatgtcccctgagtgagctggacccactctcaacctcaggtgccgagctccagcgcaaggagtccctcgatagtatctcccactcttctggctctgaagatatcgaggtacaccattccggacacaaaattaggcgcaatcaaaaactgaccgcttcctctcttagtcttgacaccgccagttcttcacagctgtcttgctccttgaacagtgactcgtgccttcttcaagaaaacgggtccaaaagtcctgaccactgcgaagaacctatgtcctgtgactctgaccttggaactgctaacgctgaggattccgatcggtctctgcaggaagtgctgttagaatttagcaaagcgcaggtgaactccgtcccgaccaatggcttatctcaagaaaccgagattccaacgcctcaagcgagtctgagcctgcatggtctgaacacaagtacctatctgcattgtgaagcccccgcagagccacttcccgcccaagccgcttcaggaacccaggacggcgtccacgtccaggagccaaggccacaggctccgtcccccctggacctccagcagcctgtggaaagcacctctggacagcagccttcatctaccgtgagcgagacagcacgggaggtggggcagggcaatggtcttcagaaagcacaggctcacgacggcgcagggcttaagttggtggtgtcgtctcctacctcgccgaagaacaagtcctggatttccgaggacgatttctatcgccccagtagagagcagccacttgaatctgcatccgaccatccgatagccagctacaggggtacacctggtagccgcccaggcctgcatcgccacttcagccaggagcccaggaaaaattgttcacttggtgccctggatcaggcatgcgtgcctagccccgggcggcgtcaggcccaggcggctccgagtcagggccacaagagtttccgggtggtgcaccgccgacagatggggctgtccaaccccttcagaggacttatgaagttgggtaccgtggagagacgcggcgccatgggcatctggaaggagctgttctgtgaactctcccccctggagtttcggttgtatctgagtaacgaggagcacacctgcgtcgagaactgcagcctgctgcgttgcgagtctgtaggccctgcccattccgacgggagattcgaactggtgttcagtggaaagaagttagcacttcgcgccagttcccaggatgaggcagaagattggctagatagggtcagagaagcgctgcagaaggttcgacctcagcaagaagatgaatgggtgaatgtgcaataccccgatcaaccagaggagccaccagaggctccgcaagggtgcctgtcaccctctgacctgctctcggaaccagctgcgctccaaggaacacagtttgactggtccagtgctcaggtaccagagcccgatgcaatcaaggagagtctcctttacctgtacatggaccgaacatggatgccttatatcttcagcctcagtcttgaggctttgaaatgttttcgtatccgcaacaatgaaaagatgctgagtgattcacacggtgtggaaaccatacgagacatcctccctgatacatccctgggaggcccttctttcttcaaaatcatcaccgccaaagccgtgctgaaactgcaggccgggaatgccgaagaggcagctttgtggagagatcttgtgcggaaagtcctggcttcctacttggagaccgcagaggaggccgtaacactcggtgggagtctggacgagaattgtcaagaggtactgaaattcgcaacaagagagaacggtttcttgcttcagtatctggtcgcaatccctatggaaaagggattggattcacagggttgtttctgtgctggctgcagcaggcagattggcttctctttcgtgagacccaaactttgtgccttttccggactatactattgcgatatttgccaccaggatgacgcttctgtaatccctgctcgaataatacataactgggatctgacaaaacggccaatttgccgacaggcactaaaatttctgacccagatccgggcccagcccctgatcaaccttcagatggtgaacgcctccttatacgagcatgtagagcgtatgcatctgatcggccgccggcgggaacagctcaaactactgggggactatctgggactgtgcaggtccggcgctttgaaggagttaagcaagcgcctcaaccaccggaattatctcctcgagtccccccacagattttctgtggcggacctacagcagattgctgatggtgtgtatgagggctttctgaaagccttgatagagttcgccagccagcacgtgtaccactgcgatttgtgcactcaacgtgggttcatttgccagatatgccagcaccacgatatcatctttcctttcgagttcgacactacagtgcgatgcgctgaatgcaaaacagtattccatcaaagctgtcaggccgttgtcaagaaggggtgtcccagatgcgctcgccgacggaagtatcaagaacaaaatattttcgcctag

SEQ ID NO: 182285 - DNA, 3171 bp, Artificial Sequence
  derived and/or modified sequence
atgctgtctgtggtggagaatggcctggacccccaggccgccatccctgtgatcaagaagaagctggtgggctctgtgaaggccctgcagaagcagtatgtgtccctggacacagtggtgaccagtgaagatggagatgccaacaccatgtgcagcgccctggaggccgtgttcatccacggcctgcacgccaagcacatccgggcagaggccggcggcaagaggaagaagagcgcccaccagaagcccctgccccagcctgtgttctggcccctgctgaaggctgtgacccacaagcacatcatcagcgagctggagcacctgacctttgtgaacacagatgtgggccgctgccgggcctggctgcggctggccctgaatgatggcctgatggagtgctacctgaagctgctgctgcaggagcaggcccggctgcacgagtactaccagcccacagccctgctgagagatgctgaggagggggagttcctgctgtccttcctgcagggcctgaccagcctgagctttgagctgagctacaagagcgccatcctgaatgagtggaccctgacccccctggccctgagcggcctgtgccccctgtctgagctggaccccctgagcaccagcggggctgagctgcagaggaaggagagcctggacagcatcagccacagcagcggcagcgaggacatcgaggtgcaccacagcggccacaagatcagaagaaaccagaagctgacagccagcagcctgagcctggacacagccagcagcagccagctgagctgcagcctgaacagcgacagctgcctgctgcaggagaatggcagcaagagcccagaccactgtgaggagcccatgagctgtgacagcgacctgggcacagccaatgctgaggacagcgacaggagcctgcaggaggtgctgctggagttcagcaaggcccaggtgaacagcgtgcccaccaacggcctgagccaggagacagagatccccaccccccaggccagcctgagcctgcacggcctgaacaccagcacctacctgcactgtgaggccccagctgagcccctgcctgcccaggccgccagcggcacccaggatggagtgcacgtgcaggagccccggccccaggcccccagccccctggacctgcagcagcctgtggagagcaccagcggccagcagcccagcagcacagtgtctgaaacagcccgggaggtgggccagggcaatggcctgcagaaggcccaggcccatgatggagctggcctgaagctggtggtgagcagccccaccagccccaagaacaagtcctggatcagtgaagatgacttctaccggcccagccgggagcagcccctggagagcgccagtgaccaccccatcgccagctaccggggcaccccaggcagcaggcctggcctgcaccgccacttcagccaggagcccaggaagaactgcagcctgggcgccctggaccaggcctgtgtgcccagccctggccggcggcaggcccaggccgcccccagccagggccacaagagcttccgggtggtgcaccggcggcagatgggcctgagcaaccccttccggggcctgatgaagctgggcaccgtggagaggagaggagccatgggcatctggaaggagctgttctgtgagctgagccccctggagttccggctgtacctgagcaatgaggagcacacctgtgtggagaactgcagcctgctgcgctgtgagagcgtgggccctgcccacagtgatggccgctttgagctggtgttttctgggaagaagctggccctgcgggccagcagccaggatgaagctgaggactggctggacagagtgcgggaggccctgcagaaggtgcggccccagcaggaggatgagtgggtgaatgtgcagtacccagaccagcctgaggagcccccagaggccccccagggctgcctgagccccagcgacctgctgtctgagcctgctgccctgcagggcacccagtttgactggagcagcgcccaggtgcctgagccagatgccatcaaggagagcctgctgtacctgtacatggacaggacctggatgccctacatcttcagcctgagcctggaggccctgaagtgcttccgcatccggaacaatgagaagatgctgagtgacagccacggcgtggagaccatccgggacatcctgcctgacaccagcctgggcggccccagcttcttcaagatcatcacagccaaggctgtgctgaagctgcaggccggaaatgctgaggaggccgccctgtggagggacctggtgaggaaggtgctggccagctacctggagacagctgaggaggccgtgaccctgggcggcagcctggatgagaactgccaggaggtgctgaagtttgccaccagagaaaatggcttcctgctgcagtacctggtggccatccccatggagaagggcctggacagccagggctgcttctgtgccggctgcagccggcagatcggcttctcctttgtgcggcccaagctgtgtgccttcagcggcctgtactactgtgacatctgccaccaggatgatgccagcgtcatcccagcccgcatcatccacaactgggacctgaccaagaggcccatctgccggcaggccctgaagttcctgacccagatccgggcccagcccctcatcaacctgcagatggtgaatgccagcctgtatgaacatgtggagaggatgcacctgattggaagaagaagagagcagctgaagctgctgggggactacctgggcctgtgccgcagcggggccctgaaggagctgagcaagaggctgaaccacaggaactacctgctggagagcccccaccgcttctctgtggccgacctgcagcagattgctgatggagtgtatgagggcttcctgaaggccctgattgaatttgccagccagcacgtgtaccactgtgacctgtgcacccagaggggcttcatctgccagatctgccagcaccacgacatcatcttcccctttgaatttgacaccaccgtgcgctgtgccgagtgcaagacagtgttccaccagagctgccaggccgtggtgaagaagggctgcccccgctgtgcccggcggaggaagtaccaggagcagaacatctttgcctag

SEQ ID NO: 182286 - DNA, 3171 bp, Artificial Sequence
  derived and/or modified sequence
atgctgagcgtggtggagaacggcctggacccccaggccgccatccccgtcataaaaaagaagttagtgggcagcgttaaggctctccagaagcagtacgttagcctggataccgttgtgacgagcgaggatggcgatgctaataccatgtgttctgccctggaggctgtgtttatccacggcctgcacgccaagcacattagggctgaggcgggaggcaagcgtaaaaagtcagcgcaccagaaaccactaccgcagccggtgttttggccactgctgaaggctgttacgcataagcatattatctccgagctggaacatctgaccttcgtgaacacagacgtgggacggtgccgcgcgtggctgagactggccctgaatgacggcctcatggagtgttacctcaagctcctgttacaagagcaggcgaggctccacgaatactaccagccgaccgctctgctccgtgatgccgaggaaggggaattcctgctgtcatttctgcaaggtcttacctcactctcatttgagctgtcgtacaagtcggcaatactgaacgagtggactctgactccccttgcactctccggcttgtgccctctcagcgaactggacccgttaagcacctccggtgccgaattgcaaagaaaggagagcttggattccatctcccattccagcggctctgaagacatcgaggtccatcactcagggcataaaatacggcgcaaccaaaaactgacagccagttccctgtccttggacactgcatctagttctcagttgtcctgctctctgaactccgatagctgcctgttgcaggaaaatggaagtaagtcccccgaccactgtgaggagccgatgagctgcgatagtgatttaggtacagccaacgccgaggattcagacagatccctgcaggaggtactcttggagttctccaaagcacaggtaaattcagtgccaacaaacggtctgtctcaggaaacagagattcccacaccacaagcctccctgtcattacacggtctgaatactagtacctacttgcattgtgaggcccccgccgagcccctccccgcccaagctgcgtccggaacccaggacggggtgcatgtgcaggaacctagaccccaggctcccagcccactggatctgcagcaaccagtggaaagcacatcgggccaacagcctagctcaaccgtgtctgagaccgcaagagaagtcgggcagggaaatggtctgcagaaagctcaggcccatgacggcgccggtctgaaactggtcgtgagcagtcccaccagcccgaagaataaaagctggataagtgaggacgacttctaccgaccttcccgtgagcagcctttagaaagtgcctccgaccatcccatagcgagttatcggggcacgcccggctccagacctgggctgcacaggcacttttcgcaggaaccccgtaagaactgctctctaggggccctggaccaggcctgcgtgccttccccggggcgtaggcaagcacaagccgcacctagtcagggacacaaatcattccgggttgttcataggcgccagatgggcctgtctaatccgttcagaggtctgatgaaattgggaacggtggaaagacgcggagctatgggtatctggaaggagctattttgcgaactctcccccctggaatttagactctacctctctaatgaggagcatacgtgtgtggaaaattgtagcctgctgagatgtgaaagtgttggccctgcccactctgatggccgtttcgaacttgtgttctcgggcaagaaactagcactcagagctagctcacaggacgaggcagaggactggcttgacagagtcagggaagccctgcaaaaggtacgcccacagcaagaggacgagtgggtgaacgtccagtatcctgatcagcccgaggagccacccgaagctccacagggttgcctttcaccatcggatctgttatctgagccagccgcccttcagggcacacagttcgattggtccagcgcccaggtgcctgaacccgatgccattaaggagagcttactctacctgtatatggataggacttggatgccgtacatctttagcttgagcctcgaagccctcaagtgctttagaatccgtaataacgagaagatgctgagcgacagccacggggtcgaaaccattagagatatactcccagatacctccctgggcggaccgagtttttttaagatcataactgccaaagcagtccttaagctccaagccgggaacgccgaggaagctgcgctgtggcgtgacttggttcggaaggttttggcaagttatctcgagaccgctgaggaagcagtcaccctcggtggatcactggatgagaattgccaggaggtccttaaatttgccactagagaaaatggattcctgctacagtacctggtggctattcccatggaaaaggggctcgattcccaagggtgcttttgtgcaggctgcagtcggcagataggcttcagcttcgtgcggcccaagctctgcgcattctccggtctctattattgcgacatctgtcaccaagacgatgccagcgtgatccctgctcgtatcattcacaattgggacctgacaaagaggccaatttgcagacaggcattaaaatttctcacccagattcgcgctcagccgctcattaatctgcaaatggtcaacgccagcctatacgaacacgtggagaggatgcatttgatcgggcggaggagagagcaactcaagctcttgggggactatctgggcctgtgcagatctggtgctctgaaagagctttctaagaggttgaatcaccgtaactatctattggaaagcccgcataggttttctgtggccgatctgcagcagatcgcagatggggtgtacgaggggtttctaaaggccctgatcgagttcgcctctcagcacgtttatcattgtgatctttgcacccaacgcgggtttatctgccagatctgtcagcaccacgatattatctttcccttcgaatttgatactaccgtccggtgcgcagaatgtaaaacagtattccaccaatcttgtcaggctgtcgttaagaagggctgcccccgatgtgctcgtcgaaggaaataccaggagcaaaatattttcgcatag

SEQ ID NO: 182287 - DNA, 3171 bp, Artificial Sequence
  derived and/or modified sequence
atgctgagtgtagtggagaacggcctggatccacaggctgctatccctgtgatcaagaagaagctcgtgggttccgtcaaagcactccagaagcagtatgtgagcctcgacactgttgtgacatcagaagacggggacgcaaatacaatgtgttctgcgctcgaagcggtcttcatacacggactacatgcaaaacacattcgggctgaggctgggggtaagaggaaaaaaagcgcacatcagaagcccctgcctcagcccgttttctggccgcttttaaaagccgtgacccacaagcatatcatctctgaactggaacacctgaccttcgtgaataccgatgttggcagatgtcgggcttggctgaggttagccctgaacgacggtcttatggaatgttatctgaaattgctgctgcaggagcaagctcgcctgcatgagtattaccagccaaccgcgttgctgcgagacgccgaggaaggcgaattccttctgagcttcctccaaggactgaccagtctgtctttcgagctcagctataagtccgctattctaaatgagtggacactgacaccccttgcactgagcgggctgtgtccacttagcgagttggacccactgagtacttccggcgcagaactgcagaggaaggagagtcttgattcaatttcccacagtagcggctccgaggatatagaggtgcaccattccgggcacaaaatacgacgtaaccagaaactgaccgcctcctcattgtcactagatacggcctcatccagccaactctcctgttctcttaatagtgacagctgcttacttcaggaaaacggaagtaagtcgcccgatcattgcgaggaaccaatgtcttgcgactcagacctgggcacagctaatgcagaagactcagatcgcagcctgcaggaggtcctcctggagttttctaaagctcaggtcaattccgtgcctactaatgggttgtctcaggagactgagatccccactccacaggcctccctaagcctccatggcctcaatacatccacatacctgcattgcgaggctccagcagagccgctgccagcacaagcagccagcgggacacaggatggcgtgcatgtgcaagagccacgaccacaggcgccaagtcccctggacctgcaacagccagttgagtcaacatccgggcagcagcctagtagcaccgtgtcagaaactgcgagggaggttggtcagggtaatggcctgcaaaaggctcaggctcacgacggggctggtcttaaactggtcgtgtcctctcccacctctcccaagaacaagagttggatctcggaagacgatttttatcggccttcacgggagcagccactcgagagtgcaagtgatcacccaatcgcatcttaccggggaactccaggcagccggccagggttgcatcggcattttagccaagagcctcgaaaaaactgctctctgggcgcactcgaccaggcctgcgttccctccccgggtcgacgccaagcccaggccgctccctcccagggccataagagttttcgcgttgtgcatcggagacagatgggtctgagcaatccattccggggattaatgaaactgggcacagtcgagaggaggggcgcaatgggcatttggaaagagctcttctgcgagcttagcccactcgagtttcgcctctatctctctaacgaggagcatacttgtgtcgagaattgctccttattgcgatgcgaaagtgtaggcccagcccactctgacgggcgatttgaactcgtcttcagtgggaagaagctcgccctgagagcctcatctcaagacgaggcagaggattggctcgaccgtgttagagaggcccttcagaaggtgagaccacaacaggaagacgagtgggttaacgttcagtatccagatcagcctgaggagccccctgaggcccctcagggctgcctctctccttcggatctcctcagtgagcctgcggctctgcaaggaacgcaattcgactggtcaagcgcgcaggtacccgagcctgatgcaatcaaagagtccctgttgtatctgtacatggacaggacttggatgccctacatattctcactgtcactcgaggcgttaaagtgcttccgaataagaaataatgagaagatgctatctgactctcatggggtagaaaccataagggacatcttgcctgacacatctctcgggggtccttcctttttcaagatcatcactgccaaggcagttttaaaactgcaggccggaaatgccgaggaggctgcactgtggcgagaccttgtgcggaaggtgttagcttcttatctcgaaactgccgaggaggccgtcactctcgggggttcacttgatgagaattgtcaagaggtgttgaaattcgcaacccgcgagaatgggtttcttctccagtacctggttgctatccctatggagaagggcctggattctcaaggatgcttttgtgccggatgcagccggcaaatagggttttcctttgtgcgccctaaactttgtgccttcagtggcctgtactattgcgatatctgccatcaggacgatgccagtgtgattcctgccagaattatacacaactgggatctgacgaagcggccaatctgccgacaggcgttaaaattcctgactcaaatcagagcacagcctctcattaatcttcagatggttaacgcttcactgtacgagcacgttgaaaggatgcatcttatcggacggagaagggagcagctcaagttgttgggggactatcttggtttgtgccggagcggcgctctcaaagaactgtctaagaggctgaatcatcggaattacctgctcgaatcaccccacaggttcagcgttgccgatctgcagcagattgccgacggcgtctacgagggtttcctcaaggcgttgatcgagttcgctagccagcatgtatatcattgcgatctctgtacccagcggggatttatatgccagatctgccagcatcatgacatcatctttcccttcgagttcgataccaccgtaaggtgcgcagaatgcaagacagtgtttcaccagtcgtgccaggcagtggttaagaaaggctgcccacgctgcgcacgtagacgcaaatatcaggaacagaacattttcgcttag

SEQ ID NO: 182288 - DNA, 5298 bp, Artificial Sequence
  derived and/or modified sequence
aacgtgatggcgtcaggggccggggcgccgcttcctgttgtcagtggccgagagaccgcatcgtcggctcggaggctgaggggctgccgcggccgggagcgcccctcgcctcgctcctcgctccgcttggtgtcatgtgattctctgagggagcagctgcgtgagtggagatgctttcagtggtggagaatggactggacccccaggctgccatcccggtcatcaagaagaagctggtgggatccgtgaaggccttgcagaagcagtacgtgtccctggacacggtggtcactagtgaagacggagatgccaacaccatgtgcagcgccctggaggccgtatttatccatggcctgcacgccaagcacatccgagctgaggccggaggaaaaaggaagaaaagtgcccaccagaagcctctgccccagcctgtcttctggcccctcctgaaagctgtcacccacaaacacatcatctcagagttggagcacctgacgtttgtcaacacggatgtgggccgctgccgggcatggctgcggctggccctgaacgatggcctgatggagtgctacctgaagctgctgctgcaggagcaggcccgcttgcatgagtactaccagcccaccgccctgctccgagatgctgaggagggcgagttcctccttagcttcctgcagggcctcacgtccttgtccttcgaactctcctacaagtctgccatcttaaatgagtggacgctcaccccactggccctgtctgggctttgcccgctttctgagctggaccctctctctacctctggtgcagaactacagcggaaggaatctctggattccatttcgcattcttcaggctctgaagacatcgaagtccatcactcgggccataagatacggaggaaccagaagctgactgcctcctccctcagcctggacacggccagttcatcccagctgtcctgcagcctaaactctgatagctgcttactccaagagaatggctccaagagtccagaccattgtgaggagcccatgtcctgtgactcagacctgggcacagcaaatgctgaggactcagaccggtctctgcaagaggtattgttggaattcagcaaagcccaggtaaactctgtgccaaccaacggactgagccaagaaacggagatccccacaccacaggcctcgctctccctccatggcctcaacaccagcacatacctgcactgtgaggcacctgcagagccccttcctgcccaggcagcctctggaactcaagatggtgtccacgtgcaggagccgcgtccccaggcgcccagccccctggacttacagcagcctgtagagagcacctcaggccagcagccttctagtactgtcagcgagacagccagagaagtgggccaagggaatggcctgcagaaggcccaggctcatgacggagctggtctgaagctggtagtttcctcacccaccagtccgaaaaacaagagctggatctcagaggatgacttctaccggccttcccgggagcaacccctggagagtgcttcagaccacccaatagcttcttacagggggactccagggtcaaggcctggtctccacaggcatttttctcaagaaccaagaaaaaactgctccctgggggcgttagaccaagcgtgtgtaccttccccaggaagaaggcaagcccaggcagccccatcccaggggcataagagcttccgggtggtacaccggagacagatgggactgtccaacccattccggggtctcatgaagctgggcaccgtggagcggcggggggcaatgggcatctggaaggagctcttctgcgagctctccccgctggagttccgcctctacctgagcaacgaggagcacacctgtgtggagaactgctcgctgcttcgctgtgagtctgtggggccagcccatagtgatgggcgctttgagctggtcttctctggcaagaagctggccctgcgcgcctcctcccaggacgaagctgaggactggctggaccgggtgcgggaggccctgcagaaggtccggcctcagcaggaggatgagtgggtgaacgtgcagtacccagaccagcctgaggaaccccccgaggcgccccagggctgcctctctccctcagacctgctctcggagcccgcggccctccagggcacacagtttgactggtcgtccgcccaggttccagagccagatgccatcaaggagtccctgctgtacttgtacatggacaggacctggatgccctatatattttctctgtccttggaggctctgaaatgtttccgcatcaggaacaatgagaagatgctgagtgacagccacggcgtggagaccatccgggacatcctgccagacaccagccttgggggcccatccttcttcaaaatcatcacggccaaggctgtcctgaagctgcaggccggaaacgccgaggaagccgccctgtggagggatctggtccgcaaagtcctggcatcctacttggagacagccgaggaggcggtgaccctgggcgggagcctggatgaaaactgtcaggaggtgctgaaatttgccacccgggagaatggcttcctgctgcagtacctggtggctatccccatggagaaaggccttgactcccaaggctgcttctgcgcaggctgctcccggcagatcggcttctcctttgtacgacccaagctctgtgccttctctggcctctattactgtgacatctgccaccaagacgatgcctcagtgattccggccaggatcatccacaactgggacctcaccaagcgcccgatctgcaggcaggccctgaagtttctgacacagatccgggcccagcccctcatcaacctgcagatggtgaacgcgtctctgtacgagcatgtggagcggatgcacctcattgggaggagacgggagcagctgaagctcctgggggattacctgggcctgtgccggagtggcgccctgaaggagctcagcaagaggctcaaccacaggaattatctcttggaatctccgcataggttcagtgttgctgacctccaacagatcgcagacggggtgtatgaaggattcctcaaggccctgattgaatttgcctcccagcatgtctaccactgcgacctgtgcacccagcgcggcttcatctgccagatctgccagcaccacgacatcatcttcccctttgagtttgacaccacagtcaggtgtgccgagtgcaagaccgtcttccaccagagctgccaggctgtggtgaagaagggctgcccccgctgtgcccgccggcgcaagtaccaggaacagaacattttcgcctgatgcccatctgctgaccccgctctgaaagccgggggtgagtgtggctcagccatcccggctgggtttgccatcagcccaggatactcaccgtgtcacagctgtgtccccttgtcaggaagaccctcagatgtggccagagcaccggcctcccagagaaagcccaggaagtccccgtggtgtcccctggccctccccccacccctctgctgcaggaggcgtggccaccaccagatgctccctgtctggggcaggcagggccgtttactcactaggccctggctcaccagcgtcccggcgcctccgttagggctgcccaaacactgtggaaaggggacttggggagcattttcaattccacattcctgattaaaaggtctagttttttaaggtgggtttttcccattcatatttcaacagaaagtatttttttattcttgaccctacgtgagtcacccatgaaatccagacattctcacccccagcggatgcacaggagccactcaggcctggcttagaggtagcgggtggctggtgggcaggccactgctgggacagggtctatgggcccacccagtgcctttccttggccctcactgccagtgccaaaccgcccctcagcagggcagggccagtcctggcgaccccggttcctctgtgtcctctttactccccaccccagtgcgtctcgcctgctgagcccaccgctttctcagcgtcagagcccctagctcttctctagcctggggccttggccccattaggagaaggagaaatgactggaaaccagcactgtcagcactttgagccctcctcggtttatggagggtcgccgtcttgcccacccccgatccccgtgcgctcctcacccctctacagacaggggcgctgctgcagatgctccaggcccaccttggtgggtgcccggggtcacactctctgcctgactgacccctgccagggcacagataggcaggaccccagagagggcaggcagccacgccctgcactgtggagaagtgacctggtcctaagctgtgcagggcgtgcgggggaactgccctgtggatgcagccaccacctcacaaagccatgaattcccaaagcatcactgaacttgcccagccgggacactggagactgaagaagttccccggagcaggactgcctttgaaggggccttggggctggggtgggagtctggaattgttttcaaagtgatggtcagaccctccaggcttcggggaaatgtgggtttgctggtctctctgtcgccttcccccacctctcctggacctagcaggccctcagtcctagctgtcttacctgcactcagcttggagtcaggcctcaggtggagagccgcatgtcactgtcagagatgagcccacccccacccttccctgggggcgattagctgctgagtcacccacccagccttggagctggatgcctgtgcagcagaacagaggcaacggtggcaggcaggtggaggctgcgcacagcttctcccggtcatggcacacacctgtgcccagacgccaatgcctcctaagccaggagctgggttatgcaccgccatggcccacattaacgctccaccacaagcccagcctagtcagagccctcattgccccatccctgagtgggcaggagcctggcctggggagggcttcggcctgtgaggattctccccgaaggtgccctcggaggcagcaggtttgaggccctggggggcccgttccccagaagctgccagtgctttcagatgcattgactcttcccacctcccctccctcagaaaggtagtgcccacactatttttaaaatgttattttatgcaatacactgttcctagtgagcagggctctggccctgaggagtctttgcaatgtattgaaggaattgctgccgtgtgagttttgaatgattttgcagtaaagacctgatctttctcatc

SEQ ID NO: 182289 - DNA, 2841 bp, Artificial Sequence
  derived and/or modified sequence
gagaccgcatcgtcggctcggaggctgaggggctgccgcggccgggagcgcccctcgcctcgctcctcgctccgcttggtgtcatgtgattctctgagggagcagctgcgtgagtggagatgctttcagtggtggagaatggactggacccccaggctgccatcccgacacatcatctcagagttggagcacctgacgtttgtcaacacggatgtgggccgctgccgggcatggctgcggctggccctgaacgatggcctgatggagtgctacctgaagctgctgctgcaggagcaggcccgcttgcaactacagcggaaggaatctctggattccatttcgcattcttcaggctctgaagacatcgaagtccatcactcgggccataagatacggaggaaccagaagctgactgcctcctccctcagcctggacacggccagttcatcccagctgtcctgcagcctaaactctgatagctgcttactccaagagaatggctccaagagtccagaccattgtgaggagcccatgtcctgtgactcagacctgggcacagcaaatgctgaggactcagaccggtctctgcaagaaaaaacaagagctggatctcagaggatgacttctaccggccttcccgggagcaacccctggagagtgcttcagaccacccaatagcttcttacagggggactccagggtcaaggcctggtctccacaggcatttttctcaagaaccaagaaaaaactgctccctgggggcgttagaccaagcgtgtgtaccttccccaggaagaaggcaagcccaggcagccccatcccaggggcataagagcttccgggtggtacaccggagacagatgggactgtccaacccattccggggtctcatgaagctgggcaccgtggagcggcggggggcaatgggcatctggaaggagctcttctgcgagctctccccgctggagttccgcctctacctgagcaacgaggagcacacctgtgtggagaactgctcgctgcttcgctgtgagtctgtggggccagcccatagtgatgggcgctttgagctggtcttctctggcaagaagctggccctgcgcgcctcctcccaggacgaagctgaggactggctggaccgggtgcgggaggccctgcagaaggtccggcctcagcaggaggatgagtgggtgaacgtgcagtacccagaccagcctgaggaaccccccgaggcgccccagggctgcctctctccctcagacctgctctcggagcccgcggccctccagggcacacagtttgactggtcgtccgcccaggttccagagccagatgccatcaaggagtccctgctgtacttgtacatggacaggacctggatgccctatatattttctctgtccttggaggctctgaaatgtttccgcatcaggaacaatgagaagatgctgagtgacagccacggcgtggagaccatccgggacatcctgccagacaccagccttgggggcccatccttcttcaaaatcatcacggccaaggctgtcctgaagctgcaggccggaaacgccgaggaagccgccctgtggagggatctggtccgcaaagtcctggcatcctacttggagacagccgaggaggcggtgaccctgggcgggagcctggatgaaaactgtcaggaggtgctgaaatttgccacccgggagaatggcttcctgctgcagtacctggtggctatccccatggagaaaggccttgactcccaaggctgcttctgcgcaggctgctcccggcagatcggcttctcctttgtacgacccaagctctgtgccttctctggcctctattactgtgacatctgccaccaagacgatgcctcagtgattccggccaggatcatccacaactgggacctcaccaagcgcccgatctgcaggcaggccctgaagtttctgacacagatccgggcccagcccctcatcaacctgcagatggtgaacgcgtctctgtacgagcatgtggagcggatgcacctcattgggaggagacgggagcagctgaagctcctgggggattacctgggcctgtgccggagtggcgccctgaaggagctcagcaagaggctcaaccacaggaattatctcttggaatctccgcataggttcagtgttgctgacctccaacagatcgcagacggggtgtatgaaggattcctcaaggccctgattgaatttgcctcccagcatgtctaccactgcgacctgtgcacccagcgcggcttcatctgccagatctgccagcaccacgacatcatcttcccctttgagtttgacaccacagtcaggtgtgccgagtgcaagaccgtcttccaccagagctgccaggctgtggtgaagaagggctgcccccgctgtgcccgccggcgcaagtaccaggaacagaacattttcgcctgatgcccatctgctgaccccgctctgaaagccgggggtgagtgtggctcagccatcccggctgggtttgccatcagcccaggatactcaccgtgtcacagctgtgtccccttgtcaggaagaccctcagatgtggccagagcaccggcctcccagagaaagcccaggaagtccccgtggtgtcccctggccctccccccacccctctgctgcaggaggcgtggccaccaccagatgctccctgtctggggcaggcagggccgtttactcactaggccctggctcaccagcgtcccggcgcctccgttagggctgcccaaacactgtggaaaggggacttggggagcattttcaattccacattcctgattaaaaggtctagtttttt

SEQ ID NO: 182290 - DNA, 3171 bp, Artificial Sequence
  derived and/or modified sequence
atgctctccgtggtggaaaatgggttagatccgcaggctgctatcccggtaatcaagaaaaagctggtgggctccgtgaaggcattacaaaagcagtacgtgtccctggacacagtcgtaacctcagaagatggtgacgccaacactatgtgctcagccctggaggcggtgtttattcatggcttacatgctaagcacatacgggcggaagccggaggtaaaaggaaaaagagcgcccatcagaagcccctccctcagccagtgttctggcctctccttaaggccgtaactcataagcatatcatctccgaattggagcatctgaccttcgttaatacggatgttggaaggtgtagggcctggctcagactcgccctgaacgatggcctgatggagtgctaccttaagctgctgcttcaggagcaggcccgcttgcacgaatattaccaacccaccgccctgctccgtgatgcggaggagggcgaatttctactttctttccttcagggcctcacctcactctctttcgagttatcatacaaaagcgcgatcctaaacgagtggaccctgactcccctggcgttatctggcctgtgcccactaagcgaattggatcctctgtcaacatccggggccgagctccaacgcaaggagagcctagatagcattagccattcttcaggaagtgaagatatcgaagtgcatcattccgggcacaaaatcagaaggaatcagaaactcactgccagttctctgtctctcgacaccgccagctcctcccaactctcctgtagtctgaacagtgactcatgtttgttacaggagaatggatcaaaatctcctgatcactgtgaagaaccaatgtcttgtgattccgacctgggtaccgccaacgcggaggattccgacaggagtttacaagaggttctgttagagttctccaaggcccaagtgaactctgtgccaaccaatggcctcagccaggaaacggagatccccactccgcaggcctcattatcgctacatgggttgaatacctccacataccttcactgcgaggctccagctgagcctctgcccgcccaagccgctagtggtacccaggacggggtccatgtgcaagaaccacgccctcaggccccttcaccactagatcttcaacagcccgtggagagcacctccgggcagcaaccttcgtctaccgtgtctgagacagctcgggaagttgggcagggcaatggactgcaaaaggcccaggcacacgacggagcagggctcaaattagttgtgtcctctcctacttccccaaaaaacaagtcatggatctccgaagatgacttttataggccaagcagagaacagcctttggaaagcgcctccgaccaccctattgccagttatagaggtacccccgggtctcgccccggacttcatcgacacttttcccaggagccccgcaagaactgtagcctgggcgctctggatcaggcttgcgtgccgagccctggccggcgccaagcccaagccgctccctcccagggccacaagtcatttcgtgtagtgcacaggaggcagatggggctctcaaatccttttcgcggccttatgaagctggggaccgttgagaggagaggcgcaatgggtatctggaaggaattgttttgcgaactgtcaccactggagttccgcttatacctgtctaatgaggagcacacctgcgtggaaaattgctcactgctgcggtgcgaaagcgttggtccagcccactctgatggacgatttgaactggtattttccggtaagaaacttgcgttgcgagcatctagccaagacgaggcagaagactggttggaccgggttcgtgaggcactgcagaaggtgcggccacagcaggaggatgagtgggtgaatgtccagtacccggaccaaccagaggagcctccagaagctccccagggatgtttgtcgccatctgatctactgagcgagcccgcggcattgcagggcacacagtttgactggtccagcgcccaggttccagagccagatgccattaaagagtcactgctttacctctatatggataggacatggatgccatatatcttttctctgtctctggaagcactgaaatgcttccgtataagaaataacgagaagatgcttagtgacagtcacggtgtggagactattcgggacatcctgccggacacttctctcggcggcccatcgttcttcaaaatcatcactgccaaggcggtactgaaactccaggccggcaatgcagaggaggccgccctgtggagggacctggtgcggaaagtcttggcttcctaccttgagacggctgaggaagctgtgactctcggggggtctctggatgagaattgccaggaggtcctgaagttcgcaactagagaaaatggcttcctgcttcaatatctggtggcgattcctatggagaagggcctggacagccagggctgcttttgcgctggctgcagtcggcagatcggcttttctttcgtcaggcccaaactctgtgcgtttagtggcctctattactgtgatatatgccaccaggacgatgcctccgttataccagccaggattattcataactgggacctgaccaaaagacctatctgtagacaggcccttaagtttctcacacagatcagggctcaaccgctgattaatctgcagatggtcaatgcctcactgtacgagcatgtggagcgcatgcaccttattgggaggcggagggagcagttgaagctgcttggtgactatttgggtctatgtcgcagcggcgcactgaaagagctcagtaaacgtcttaatcacagaaactatctacttgaaagtccacacaggttttctgtagctgaccttcagcagatagccgatggtgtgtacgagggctttctgaaggcactcattgagttcgccagccagcacgtgtaccactgcgacttatgtacgcagcgcgggttcatttgccaaatctgccagcatcacgatataatattccccttcgagttcgataccacagtgcgatgtgcggaatgtaagacagttttccaccaatcttgccaggctgtggttaaaaaaggctgccccagatgtgctagacggaggaagtaccaggagcagaatatattcgcctag

SEQ ID NO: 182291 - DNA, 3171 bp, Artificial Sequence
  derived and/or modified sequence
atgctgagcgtggtggagaacggcctggacccccaggccgccatcccagtgattaaaaaaaaactggtgggcagtgtgaaagccctccaaaaacagtatgtctccctggacactgtcgtgactagtgaagacggggacgctaatactatgtgctcggccctcgaggctgtttttatacacggccttcacgcaaaacatattcgcgcagaggccggcgggaagagaaagaagtctgctcaccagaagccactgccacagccggtgttctggcctttactgaaggctgtcacacataagcacattattagcgagctggagcatctgacgttcgtgaatacagacgtgggcagatgtcgtgcatggttgcgactggccctcaatgacggattaatggagtgttatctaaagttactgctccaggaacaagctaggctccacgagtactaccagccaaccgccctgttgagagatgccgaggaaggggaattcttactgagcttcctgcaggggttgacatctctaagcttcgaactatcctacaaatccgccattctgaatgagtggaccttgacccccctggccctgtctggcttatgcccgctcagcgagctggatccactctcgaccagcggtgcagagcttcagagaaaagagtcactagattctatctcgcacagctctggcagcgaggacatcgaggttcatcactctggacacaagatcaggaggaatcagaaactgacagcctcgtcgctttcattggatacagccagtagttcacaactttcttgtagtctcaattcagatagctgcctgctgcaggaaaacggctccaagagtcccgatcactgtgaggaacccatgagttgcgactcagacctgggtacagctaacgctgaggactcagatagatcccttcaagaggttctgctcgaattcagtaaggcccaggtcaatagtgtgcccacaaacggcctgtcccaggagaccgagatacctacccctcaggcaagcctgtctctgcatgggctcaacaccagtacctatttgcattgcgaggcccccgcagaacctcttccagcccaggcagcctcagggacccaggatggggtccacgtgcaggaaccaagaccccaggccccgagccctctggaccttcagcaacccgttgagtccaccagtggtcagcagccatcttctactgtgtccgaaaccgcacgtgaggttggacagggcaatggcctccagaaggcacaagcacacgacggagctggactgaaattagtcgtgagttctcctacgtctcccaaaaacaaatcatggatctcagaagacgatttctaccgcccctccagagaacagccgctggaatcagccagtgaccatccgatcgccagctaccgaggaactcccgggtctcgcccaggcctccatcgccacttttcgcaggagccgagaaaaaattgcagcctaggtgcccttgaccaagcctgtgtcccatcacccggtagacgccaggcccaggccgccccctcccagggacacaaaagctttcgggtcgtccacaggcgccagatggggctgagcaatccgtttagagggctgatgaaattgggaacagtcgaacgcagaggcgccatgggaatctggaaggagctgttctgcgagctgtcccctctcgagttccggctctacctctcaaacgaggaacacacatgtgtcgaaaactgtagcctccttaggtgcgagtccgtaggccctgcacattccgacggccggtttgaacttgtatttagcgggaaaaaacttgcgttaagggcatctagccaagatgaggccgaggattggttggatagggtcagagaagccctccagaaggttcggccccagcaagaagacgagtgggtaaatgtacagtatcccgaccaacctgaggaaccacccgaggctccccagggctgtctttccccttccgacctgctctcagagcctgccgccctccaagggacacagttcgattggtctagcgctcaagtgccggaacctgatgcaatcaaagagtccctcctttacctgtacatggataggacgtggatgccatacatcttttcactttctctggaagcccttaaatgttttagaatacggaacaatgagaagatgctctccgactctcacggggtcgaaaccattcgcgatattctgcctgacactagtcttggaggtccttcttttttcaaaataatcaccgcaaaggccgtcctgaaacttcaagccgggaacgccgaagaggcagcgctctggcgtgatcttgttcggaaagttctagcttcctacctggaaacggctgaggaggcagttacgctggggggatcactagatgagaactgccaggaggtgctaaagtttgccacaagagagaatggatttttgcttcagtacctagttgcaatccccatggagaagggactggactcccagggatgcttctgtgctggatgctcccgtcagatcggcttctcctttgttagacctaagctttgcgcgttcagcggattatattattgcgatatctgtcatcaggatgatgcctcagtcatccctgcaaggataatacataattgggacctcaccaagcgacccatatgtagacaggctctgaagtttctgacacagatcagggctcagccgctgatcaatcttcagatggttaacgcatctctgtacgaacacgtggagcggatgcatcttattggcagacggagagagcagcttaagttgctcggagactatctggggctgtgccggagtggcgcactaaaggagctatccaaacggctgaaccatcggaactatttgctcgaatctccacataggttttccgtggcagatctgcagcagatagcagacggtgtgtacgaagggtttctgaaggctttgatagagtttgctagccagcacgtgtaccactgcgacctgtgcacccagagagggttcatttgccaaatctgtcagcaccacgacatcattttcccatttgagtttgatacaaccgttcgctgcgcggagtgcaaaacagtatttcatcagtcctgccaggcggtcgtgaagaaaggctgtccaaggtgcgcacggcgcagaaagtatcaggaacagaacatctttgcatag

SEQ ID NO: 182292 - DNA, 5298 bp, Artificial Sequence
  derived and/or modified sequence
aacgtgatggcgtcaggggccggggcgccgcttcctgttgtcagtggccgagagaccgcatcgtcggctcggaggctgaggggctgccgcggccgggagcgcccctcgcctcgctcctcgctccgcttggtgtcatgtgattctctgagggagcagctgcgtgagtggagatgctttcagtggtggagaatggactggacccccaggctgccatcccggtcatcaagaagaagctggtgggatccgtgaaggccttgcagaagcagtacgtgtccctggacacggtggtcactagtgaagacggagatgccaacaccatgtgcagcgccctggaggccgtatttatccatggcctgcacgccaagcacatccgagctgaggccggaggaaaaaggaagaaaagtgcccaccagaagcctctgccccagcctgtcttctggcccctcctgaaagctgtcacccacaaacacatcatctcagagttggagcacctgacgtttgtcaacacggatgtgggccgctgccgggcatggctgcggctggccctgaacgatggcctgatggagtgctacctgaagctgctgctgcaggagcaggcccgcttgcatgagtactaccagcccaccgccctgctccgggatgctgaggagggcgagttcctccttagcttcctgcagggcctcacgtccttgtccttcgaactctcctacaagtctgccatcttaaatgagtggacgctcaccccattggccctgtctgggctttgcccgctttctgagctggaccctctctctacctctggtgcagaactacagcggaaggaatctctggattccatttcccattcttcaggctctgaagacatcgaagtccatcactcgggccataagatacggaggaaccagaagctgactgcctcctccctcagcctggacacggccagttcatcccagctgtcctgcagcctaaactctgatagctgcttactccaagagaatggctccaagagtccagaccattgcgaggagcccatgtcctgtgactcagacctgggcacagcaaatgctgaggactcagaccggtctctgcaagaggtattgttggaattcagcaaagcccaggtaaactctgtgccaaccaacggactgagccaagaaacagagatccccacaccacaggcctcgctctccctccatggcctcaacaccagcacatacctgcactgtgaggcacctgcagagccccttcctgcccaggcagcctctggaactcaagatggtgtccacgtgcaggagccgcgtccccaggcgcccagccccctggacttacagcagcctgtagagagcacctcaggccagcagccttctagtactgtcagcgagacagccagagaagtgggccaagggaatggcctgcagaaggcccaggctcatgacggagctggtctgaagctggtagtttcctcacccaccagtccgaaaaacaagagctggatctcagaggatgacttctaccggccttcccgggagcaacccctggagagtgcttcagaccacccaatagcttcttacagggggactccagggtcaaggcctggtctccacaggcatttttctcaagaaccaagaaaaaactgctccctgggggcgttagaccaagcgtgtgtaccttccccaggaagaaggcaagcccaggcagccccatcccaggggcataagagcttccgggtggtacaccggagacagatgggactgtccaacccattccggggtctcatgaagctgggcaccgtggagcggcggggggcaatgggcatctggaaggagctcttctgcgagctctccccgctggagttccgcctctacctgagcaacgaggagcacacctgtgtggagaactgctcgctgcttcgctgtgagtctgtggggccagcccatagtgatgggcgctttgagctggtcttctctggcaagaagctggccctgcgcgcctcctcccaggacgaagctgaggactggctggaccgggtgcgggaggccctgcagaaggtccggcctcagcaggaggatgagtgggtgaacgtgcagtacccagaccagcctgaggaaccccccgaggcgccccagggctgcctctctccctcagacctgctctcggagcccgcggccctccagggcacacagtttgactggtcgtccgcccaggttccagagccagatgccatcaaggagtccctgctgtacttgtacatggacaggacctggatgccctatatattttctctgtccttggaggctctgaaatgtttccgcatcaggaacaatgagaagatgctgagtgacagccacggcgtggagaccatccgggacatcctgccagacaccagccttgggggcccatccttcttcaaaatcatcacggccaaggctgtcctgaagctgcaggccggaaacgccgaggaagccgccctgtggagggatctggtccgcaaagtcctggcatcctacttggagacagccgaggaggcggtgaccctgggcgggagcctggatgaaaactgtcaggaggtgctgaaatttgccacccgggagaatggcttcctgctgcagtacctggtggctatccccatggagaaaggccttgactcccaaggctgcttctgcgcaggctgctcccggcagatcggcttctcctttgtacgacccaagctctgtgccttctctggcctctattactgtgacatctgccaccaagacgatgcctcagtgattccggccaggatcatccacaactgggacctcaccaagcgcccgatctgcaggcaggccctgaagtttctgacacagatccgggcccagcccctcatcaacctgcagatggtgaacgcgtctctgtacgagcatgtggagcggatgcacctcattgggaggagacgggagcagctgaagctcctgggggattacctgggcctgtgccggagtggcgccctgaaggagctcagcaagaggctcaaccacaggaattatctcttggaatctccgcataggttcagtgttgctgacctccaacagatcgcagacggggtgtatgaaggattcctcaaggccctgattgaatttgcctcccagcatgtctaccactgcgacctgtgcacccagcgcggcttcatctgccagatctgccagcaccacgacatcatcttcccctttgagtttgacaccacagtcaggtgtgccgagtgcaagaccgtcttccaccagagctgccaggctgtggtgaagaagggctgcccccgctgtgcccgccggcgcaagtaccaggaacagaacattttcgcctgatgcccatctgctgaccccgctctgaaagccgggggtgagtgtggctcagccatcccggctgggtttgccatcagcccaggatactcaccgtgtcacagctgtgtccccttgtcaggaagaccctcagatgtggccagagcaccggcctcccagagaaagcccaggaagtccccgtggtgtcccctggccctccccccacccctctgctgcaggaggcgtggccaccaccagatgctccctgtctggggcaggcagggccgtttactcaccaggccctggctcaccagcgtcccggcgcctccgttagggctgcccaaacactgtggaaaggggacttggggagcattttcaattccacattcctgattaaaaggtctagttttttaaggtgggtttttcccattcatatttcaacagaaagtatttttttattcttgaccctacgtgagtcacccatgaaatccagacattctcacccccagcggatgcacaggagccactcaggcctggcttagaggtagcgggtggctggtgggcaggccactgctgggacagggtctatgggcccacccagtgcctttccttggccctcactgccagtgccaaaccgcccctcagcagggcagggccagtcctggcgaccccggttcctctgtgtcctctttactccccaccccagtgcgtctcgcctgctgagcccaccgctttctcagcgtcagagcccctagctcttctctagcctggggccttggccccattaggagaaggagaaatgactggaaaccagcactgtcagcactttgagccctcctcggtttatggagggtcgccgtcttgcccacccccgatccccgtgcgctcctcacccctctacagacaggggcgctgctgcagatgctccaggcccaccttggtgggtgcccggggtcacactctctgcctgactgacccctgccagggcacagataggcaggaccccagagagggcaggcagccacgccctgcactgtggagaagtgacctggtcctaagctgtgcagggcgtgcgggggaactgccctgtggatgcagccaccacctcacaaagccatgaattcccaaagcatcactgaacttgcccagccgggacactggagactgaagaagttccccggagcaggactgcctttgaaggggccttggggctggggtgggagtctggaattgttttcaaagtgatggtcagaccctccaggcttcggggaaatgtgggtttgctggtctctctgtcgccttcccccacctctcctggacctagcaggccctcagtcctagctgtcttacctgcgctcagcttggagtcaggcctcaggtggagagccgcatgtcactgtcagagatgagcccacccccacccttccctgggggcgattagctgctgagtcacccacccagccttggagctggatgcctgtgcagcagaacagaggcaacggtggcaggcaggtggaggctgcgcacagcttctcccggtcatggcacacacctgtgcccagacgccaatgcctcctaagccaggagctgggttatgcaccgccatggcccacattaacgctccaccacaagcccagcctagtcagagccctcattgccccatccctgagtgggcaggagcctggcctggggagggcttgggcctgtgaggattctccccgaaggtgccctcggaggcagcaggtttgaggccctggggggcccgttccccagaagctgccagtgctttcagatgcattgactcttcccgcctcccctccctcagaaaggtagtgcccacactatttttaaaatgttattttatgcaatacactgttcctagtgagcagggctctggccctgaggagtctttgcaatgtattgaaggaattgctgccgtgtgagttttgaatgattttgcagtaaagacctgatctttctcatc

SEQ ID NO: 182293 - DNA, 3171 bp, Artificial Sequence
  derived and/or modified sequence
atgcttagtgtggtggagaacggactggacccccaggccgcaattcccgtgatcaagaaaaaattagtgggcagtgtgaaggctcttcaaaagcagtacgtcagcctggatacagtcgtcacaagcgaagacggggacgccaatacgatgtgttctgcactagaagccgtgttcatccatggacttcacgctaagcacatccgcgctgaagcgggtggtaaaaggaagaaatccgcccaccagaaacccctcccacagcctgtgttttggccactgctcaaagcagtgacacataaacacataatcagcgagttggagcacctgacgttcgttaacaccgatgtgggcagatgccgtgcttggctgcgcctggcgctgaatgacggtctaatggagtgctaccttaagctcctgcttcaggaacaggctagactgcacgaatactatcagccaaccgcattactcagagacgctgaagaaggcgaatttttgctctccttcctgcaggggctgacttcactgtcatttgagctcagttacaaaagcgcaatcctgaatgagtggaccctgacccccttggcactgtctggtttgtgcccactgtccgaactggatccactttctacatccggagccgaactccagagaaaggagagccttgacagtatatcccactcttctgggtcagaagatatcgaggtacaccactccggccataagatcagaaggaatcagaaactcactgctagcagtttgtcactggacaccgctagcagttcccagctatcatgctcccttaatagcgactcatgtttgttacaggaaaacggctccaagagtcctgatcattgtgaggaacctatgtcctgcgacagcgacctagggaccgccaatgccgaagattcagaccggtctctgcaggaggtcctgctcgagttctccaaggcccaagtcaattctgttccgactaatggactctcccaggagacagaaatcccaacaccccaggccagcctcagcctacatggtctgaacacatctacctaccttcactgtgaagccccagccgagcctctacctgcacaggctgcttcgggcactcaggacggcgttcacgtgcaggaaccaaggccgcaggccccatcccctctcgacctccagcaaccagtcgagtctacttctggacagcagccaagctccacagttagcgaaaccgcacgggaagtgggtcaggggaatggtctgcagaaagcacaggcccacgatggcgctggattgaagctcgtggtgagctccccaacaagccctaagaataaatcatggatctccgaggatgacttctatcggccttctagagagcaacctttggagtctgcctcagatcaccccattgcttcctacagaggcactccaggctctaggcctgggctccaccgccacttttcccaagaacctaggaagaattgtagtcttggggctctggaccaagcctgtgtcccttcgccagggcgacggcaagcccaggccgctccaagtcaaggtcacaaaagctttagggtcgtgcaccggcgacaaatgggcctatcaaatcctttcagggggctcatgaaacttggtacggtcgaaaggagaggagctatgggcatctggaaagagcttttctgcgagctctcaccattagaatttcgcctgtatctgagcaacgaagagcatacttgcgtggagaattgtagtctcttacggtgcgagtcagtagggcctgcacattccgacggtagattcgagctcgtttttagcgggaagaagctagcccttcgcgcatcctctcaggacgaggcagaagactggctggatagggtgcgggaagctctccagaaagttcggcctcagcaggaggatgaatgggtaaatgtgcagtatccagaccagcctgaggagccccctgaagcccctcaaggctgcctaagtccctctgacctgctgtcggagccagcggcattgcagggaacacagtttgactggtcttcagcacaagtgcccgaacccgacgcgataaaggagtctctgctctacctctacatggatcgaacttggatgccctatatcttttcactctcactggaagccttgaagtgttttagaataagaaataacgagaagatgctgagtgactctcatggtgttgagaccatcagggatatactccccgacaccagcctcggtgggccttccttcttcaagattatcaccgccaaagctgtccttaaattgcaggccggtaatgcagaagaagctgccttgtggcgcgaccttgtcaggaaagtactggccagctacctcgaaaccgccgaggaggccgtgacgctcggcggttccctggacgagaactgccaggaagtgctgaaatttgctacccgagagaatggatttctgctgcagtatctagttgccatacctatggaaaaagggctcgattcacaaggatgcttttgcgccggttgttccaggcagatcggatttagctttgtcaggccaaaactgtgcgcattctccggcctgtattattgtgatatctgccatcaagacgacgcatccgtaatcccagccagaatcatccataattgggacctcacaaagcgtccaatctgccgccaggctcttaagtttctcacccaaatccgcgcacagcctctcatcaatctccagatggtgaacgccagtttgtatgagcatgttgaacgaatgcacctcattgggaggaggcgtgagcaactgaagttgctaggcgactacttggggctgtgccgttccggagctctgaaggaacttagcaagcggctcaatcatcgaaattacctgctcgaaagccctcatagattctccgtcgcagatttgcagcagatcgctgatggagtgtacgaaggattcttaaaggccctgattgagttcgcatcacagcacgtgtatcactgcgacctgtgtactcagagaggctttatctgccagatatgtcagcaccatgatatcatattccctttcgagtttgacaccacagttcgatgcgccgaatgcaagaccgtgtttcatcaatcctgtcaagcggtggtgaaaaaaggctgcccacggtgtgccaggaggcgcaagtatcaggaacagaatatctttgcatag

SEQ ID NO: 182294 - protein, 891 aa, Artificial Sequence
  derived and/or modified sequence
MHAINGFVFGNLPELNMCAQKRVAWHLFGMGNEIDVHTAFFHGQMLTTRGHHTDVANIFPATFVTAEMVPWEPGTWLISCQVNSHFRDGMQALYKVKSCSMAPPVDLLTGKVRQYFIEAHEIQWDYGPMGHDGSTGKNLREPGSISDKFFQKSSSRIGGTYWKVRYEAFQDETFQEKMHLEEDRHLGILGPVIRAEVGDTIQVVFYNRASQPFSMQPHGVFYEKDYEGTVYNDGSSYPGLVAKPFEKVTYRWTVPPHAGPTAQDPACLTWMYFSAADPIRDTNSGLVGPLLVCRAGALGADGKQKGVDKEFFLLFTVLDENKSWYSNANQAAAMLDFRLLSEDIEGFQDSNRMHAINGFLFSNLPRLDMCKGDTVAWHLLGLGTETDVHGVMFQGNTVQLQGMRKGAAMLFPHTFVMAIMQPDNLGTFEIYCQAGSHREAGMRAIYNVSQCPGHQATPRQRYQAARIYYIMAEEVEWDYCPDRSWEREWHNQSEKDSYGYIFLSNKDGLLGSRYKKAVFREYTDGTFRIPRPRTGPEEHLGILGPLIKGEVGDILTVVFKNNASRPYSVHAHGVLESTTVWPLAAEPGEVVTYQWNIPERSGPGPNDSACVSWIYYSAVDPIKDMYSGLVGPLAICQKGILEPHGGRSDMDREFALLFLIFDENKSWYLEENVATHGSQDPGSINLQDETFLESNKMHAINGKLYANLRGLTMYQGERVAWYMLAMGQDVDLHTIHFHAESFLYRNGENYRADVVDLFPGTFEVVEMVASNPGTWLMHCHVTDHVHAGMETLFTVFSRTEHLSPLTVITKETEKAVPPRDIEEGNVKMLGMQIPIKNVEMLASVLVAISVTLLLVVLALGGVVWYQHRQRKLRRNRRSILDDSFKLLSFKQ

SEQ ID NO: 182295 - DNA, 2676 bp, Artificial Sequence
  derived and/or modified sequence
atgcatgccattaacggattcgttttcgggaacctgcccgagctaaatatgtgcgctcagaagcgcgtcgcatggcatctgttcggcatgggaaacgaaatcgacgtgcacaccgcattctttcatgggcagatgctgaccacccggggacatcatactgacgtggccaatatcttccctgctacatttgtcactgctgagatggtaccctgggagcccgggacatggctgatctcttgccaggttaatagccattttcgcgatggtatgcaggccctgtacaaagtgaagtcttgctctatggcccccccagttgacctccttacaggaaaagtgagacaatatttcattgaagcacacgaaatccaatgggattacggtcctatggggcacgatgggtctacagggaaaaaccttcgagagccaggctccatatcggataagtttttccagaaaagcagcagcaggatcggggggacttactggaaagtgcggtacgaagccttccaggacgaaacatttcaagagaaaatgcacctggaggaggatcgccatctggggattctcggccccgttataagggctgaagttggtgacacaatacaggttgtgttttataatagggctagccagcctttttctatgcagcctcatggggttttttacgaaaaagattacgagggcactgtgtacaacgacggatctagctaccctgggctggtggcaaaacccttcgaaaaggtgacctacagatggacagtgccccctcacgctggacctacggctcaggaccccgcttgtctcacctggatgtacttttctgctgccgaccccattagggatacgaatagcggccttgtcggccctctgctggtctgccgagctggggcgcttggtgcagatggcaaacagaaaggagttgataaagaattctttctgttattcaccgtgcttgatgaaaacaagagctggtattcaaacgcaaaccaggcagcagccatgttggattttcggctgttgtctgaagacattgaggggttccaggactcgaatagaatgcatgccatcaacgggtttctcttctccaacctgccgaggcttgacatgtgcaagggcgacaccgtggcgtggcacctactgggcttaggaaccgagactgatgtgcacggcgtgatgttccagggcaataccgtgcagttacaaggcatgaggaaaggagcggcaatgctgtttccacatacattcgtgatggctattatgcagcccgataacctgggtacatttgagatttactgtcaggcgggatcccaccgcgaggccggcatgcgggccatctacaatgtctcccagtgcccaggacaccaggcaacaccaagacagagatatcaggctgcgcggatctattacattatggctgaggaagttgagtgggattactgtcctgatcggagttgggagagagagtggcacaaccagtcagagaaagactcttatggttatatcttcttatctaataaggacggcctgctaggaagtaggtacaagaaggctgtctttagggagtacactgatggcacctttcgaattccccgcccccggaccggacctgaagaacacttggggatcctcggccctcttatcaaaggcgaagtaggcgatattttgaccgtggtgtttaaaaataacgcctcaaggccctatagtgtgcatgcacatggcgtcttggagtctactactgtttggcccctggcggcagagccaggcgaggtggtgacctatcagtggaatatcccagaaagatccgggccaggaccaaacgattccgcttgtgtgagctggatctattattccgcagtggaccccatcaaagacatgtatagtgggctcgtgggacccttagctatttgccagaaagggatactcgagccacatggaggacgctctgacatggatagagaatttgccctgttgttcctgattttcgatgaaaataagtcatggtatctggaggagaacgtggctactcacggttcacaggatcccggttccataaacctacaggacgagacatttttggaatccaataaaatgcacgcgataaatggaaagttgtatgctaacctgcgcggcctgacgatgtaccagggcgaaagagtcgcatggtacatgctggccatgggacaggatgtggatctccataccattcactttcatgcggaatcctttctgtatcgtaacggcgaaaactatagagccgatgtggttgatctcttcccaggcactttcgaggtcgtggagatggtagcctctaacccaggcacgtggctcatgcactgtcacgttaccgatcatgtgcacgccggaatggaaactctattcacagtatttagcagaaccgagcacctgtccccacttacagtgattacgaaggagacagaaaaggccgtgcctccgagagacatcgaagagggtaatgtcaaaatgctaggtatgcagatacccattaaaaacgtagaaatgcttgctagcgttctggtcgccattagtgtgacactgctgttggttgtcctcgccctggggggcgttgtgtggtatcagcacaggcaacgcaagcttagaaggaatagacggtcaatactcgatgatagtttcaaactcttgtcattcaagcaatag

SEQ ID NO: 182296 - DNA, 2676 bp, Artificial Sequence
  derived and/or modified sequence
atgcacgccatcaatggatttgtgtttggaaacctgcctgagctgaacatgtgtgcccagaagagggtggcctggcacctgtttggcatgggaaatgaaattgatgtgcacacagccttcttccacggccagatgctgaccacccggggccaccacacagatgtggccaacatcttccctgccacctttgtgacagctgagatggtgccctgggagcccggcacctggctgatcagctgccaggtgaacagccacttcagagatggcatgcaggccctgtacaaggtgaagagctgcagcatggcccctcctgtggacctgctgaccgggaaggtgcggcagtacttcatcgaggcccacgagatccagtgggactatggccccatgggccatgatggcagcacaggcaagaacctgcgggagcccggcagcatcagtgacaagttcttccagaagagcagcagcagaattggaggcacctactggaaggtgcgctatgaggccttccaggatgagaccttccaggagaagatgcacctggaggaggacagacacctgggcatcctgggccctgtgatccgggcagaggtgggggacaccatccaggtggtgttctacaacagagccagccagcccttctccatgcagccccacggcgtcttctatgagaaggactatgagggcaccgtgtacaatgatggcagcagctacccaggcctggtggccaagccctttgagaaggtgacctaccgctggacagtgccccctcatgctggccccacagcccaggaccctgcctgcctgacctggatgtacttctctgctgctgaccccatccgggacaccaacagcggcctggtgggccccctgctggtgtgcagagctggggccctgggcgcagatggcaagcagaagggcgtggacaaggagttcttcctgctcttcaccgtgctggatgagaacaagtcctggtacagcaatgccaaccaggccgccgccatgctggacttccggctgctgtctgaggacatcgagggcttccaggacagcaacaggatgcacgccatcaatggcttcctgttcagcaacctgccccggctggacatgtgcaagggggacacagtggcctggcacctgctgggcctgggcacagaaacagatgtgcatggagtgatgttccagggcaacacagtgcagctgcagggcatgaggaaaggagctgccatgctgttcccccacacctttgtgatggccatcatgcagcctgacaacctgggcacctttgagatctactgccaggccggcagccaccgggaggccggcatgagggccatctacaacgtgtcccagtgccccggccaccaggccaccccccggcagcgctaccaggccgcccgcatctactacatcatggccgaggaggtggagtgggactactgcccagaccgctcctgggagcgggagtggcacaaccagagcgagaaggacagctatggctacatcttcctgagcaacaaggatggcctgctgggcagccgctacaagaaggctgtgttccgggagtacacagatggcaccttccgcatcccccggcccaggacaggccctgaggagcacctgggcatcctgggccccctcatcaagggggaggtgggggacatcctgactgtggtgttcaagaacaatgccagccggccctacagcgtgcacgcccacggcgtgctggagagcaccaccgtgtggcccctggccgctgagcctggagaggtggtgacctaccagtggaacatccctgagaggagcggccctggccccaatgacagcgcctgtgtgtcctggatctactacagcgctgtggaccccatcaaggacatgtacagcggcctggtgggccccctggccatctgccagaagggcatcctggagccccacggcggccgcagtgacatggaccgggagtttgccctgctcttcctgatctttgatgagaacaagtcctggtacctggaggagaatgtggccacccacggcagccaggaccccggcagcatcaacctgcaggatgagaccttcctggagagcaacaagatgcacgccatcaatggcaagctgtatgccaacctgcggggcctgaccatgtaccagggcgagcgggtggcctggtacatgctggccatgggccaggatgtggacctgcacaccatccacttccacgccgagagcttcctgtacagaaatggagagaactacagagcagatgtggtggacctcttccctggcacctttgaggtggtggagatggtggccagcaaccctggcacctggctgatgcactgccacgtgacagaccacgtgcatgctggcatggagaccctcttcaccgtcttcagcaggacagagcacctgagccccctgaccgtcatcaccaaggagacagagaaggctgtgcccccccgggacatcgaggagggcaatgtgaagatgctgggcatgcagatccccatcaagaatgtggagatgctggcctctgtgctggtggccatctctgtgaccctgctgctggtggtgctggccctgggcggcgtggtgtggtaccagcaccggcagaggaagctgcggaggaacagaagaagcatcctggatgacagcttcaagctgctgtccttcaagcagtag

SEQ ID NO: 182297 - DNA, 2676 bp, Artificial Sequence
  derived and/or modified sequence
atgcacgccatcaacggcttcgtgttcggcaacctgcccgagctgaacatgtgcgcacagaaacgggtggcttggcatctatttggtatgggtaatgagatcgacgtccacactgcattcttccacggccaaatgctaactactcgtggccatcatacagatgtggccaatatatttcccgcaacttttgttaccgccgaaatggtcccctgggaaccagggacatggcttatctcctgccaagtgaactctcacttcagggacgggatgcaggcactgtacaaggtcaagtcttgctcaatggcccctccagttgacttgctcactggaaaggtccgccagtactttattgaggcgcatgagatccagtgggattatgggcccatgggacacgacgggtcaacagggaaaaacctccgagaacccgggtccatcagcgacaaatttttccagaaatcatctagccgtattggcggcacgtactggaaagttcgatatgaagccttccaggatgagacttttcaggaaaaaatgcatttagaagaagaccgacacctgggaatcctgggacccgtgatccgcgcagaagtgggggacaccatccaggtggtattttataacagagcgagtcaaccattttcaatgcagccacacggggtgttctatgaaaaggactacgaggggaccgtgtataacgatggttcaagctaccccgggttggtggcaaaaccctttgagaaggtgacataccgatggacagtgccccctcacgctggcccaacagctcaggatcccgcatgtttgacttggatgtacttttccgcggcggatccaatccgcgataccaacagtggcttggtaggaccattactcgtctgccgcgctggcgccctgggggcagatggtaagcaaaagggggtggacaaggaatttttcctgctctttacggttttggatgaaaataaatcctggtattcgaacgctaaccaggccgctgccatgctggatttccgcctgctgagcgaggatattgagggttttcaggactctaacagaatgcatgccattaatggttttctgttcagcaatctgccacgcctcgacatgtgtaagggtgacaccgttgcctggcatctgcttggcctgggaactgaaacggatgttcatggtgtgatgtttcaagggaataccgtacaactgcaaggcatgagaaagggagcagccatgttgtttccccatacgtttgtcatggcaataatgcagcctgacaatttagggaccttcgagatctactgtcaggccggctcccaccgcgaggctggcatgcgggccatttataacgtcagccagtgtccgggacatcaagcaactcctcgtcagcggtaccaggccgcccggatctactacataatggcagaggaggtggaatgggactactgtcctgaccggtcatgggaaagggaatggcacaatcagtcagaaaaggacagttatgggtacatattcctatcaaacaaggatgggctgttgggatcgcgctacaaaaaagccgtgttcagagaatatactgatggaacctttcggatcccccgtccgcggaccgggccagaagagcatctcggaatcctggggccactgatcaagggtgaggtgggggacatcctgacagtcgtcttcaagaataacgcctcaagaccatattccgttcatgcccacggtgtcctggagtccacaaccgtgtggcccctggctgctgaaccaggggaggtcgtgacatatcagtggaacatccccgagaggtcaggcccagggccaaatgactccgcctgcgtgtcctggatttactacagcgccgtggacccaataaaggatatgtactcaggcctagtggggcccctggcaatctgtcaaaaaggtatcctggagccccacggaggccgctctgatatggaccgggaattcgccttgctctttcttatcttcgacgaaaataaatcttggtaccttgaagaaaatgtggcgacgcacggatctcaggatccaggttccattaatctgcaagatgagactttcctagagtctaacaagatgcacgcgatcaacgggaagctgtacgccaatctaagaggtctgactatgtaccagggcgagcgcgttgcttggtatatgctggctatggggcaagacgttgacctgcataccatccatttccacgctgagagctttttatacaggaacggcgagaattatagagcagatgtcgttgacctttttcctgggacttttgaggtggtggagatggtcgcttccaatcccggcacctggctgatgcactgtcacgtcactgatcacgtgcacgccggcatggaaaccctcttcaccgttttttcccggaccgagcacctgtctccattgactgtcattaccaaggaaaccgagaaggctgtcccccccagggatattgaggagggcaatgtgaagatgcttggaatgcagataccaatcaagaacgtagaaatgctcgcgtccgtgctggtggctatatccgtaaccctgctgctcgtcgtcttggccctggggggcgttgtctggtatcagcaccgacaacggaaactgaggaggaatagacgttctatcctagacgactctttcaaactgctgtcatttaaacaatag

SEQ ID NO: 182298 - DNA, 2676 bp, Artificial Sequence
  derived and/or modified sequence
atgcacgccattaacggttttgtattcggaaatctgcctgagctcaatatgtgtgctcaaaagcgcgttgcatggcatcttttcggcatgggcaacgagatcgatgtccacacagcttttttccatgggcagatgcttacaacccggggacaccatacggatgtcgccaacatctttcccgctacatttgtcacggctgaaatggttccgtgggaaccaggaacctggctgatctcttgccaagtcaattctcacttcagggatggaatgcaggccctgtacaaggtcaagagttgttccatggcccctcccgtggacctgctcactgggaaagtccggcagtacttcatcgaagcccacgaaattcagtgggactacggcccaatggggcacgatggctcgaccgggaagaatctgagggaacccggtagcatatccgacaaattcttccagaaatcctcctctcgaattggcggtacctactggaaagtgcgctacgaagctttccaggacgaaaccttccaagaaaaaatgcatctcgaagaggatagacacctaggcatcctgggccctgtaatcagggctgaggtgggagataccattcaggtggtattctataaccgcgcttctcagcctttttcaatgcagcctcatggtgtgttctacgagaaggattacgaaggcactgtgtataatgacgggagttcctaccccggtctggtcgcaaagccctttgagaaggtgacttaccgttggaccgtccctccacatgctgggcctacggctcaggatcctgcctgtttgacctggatgtactttagcgctgccgaccctatccgtgacaccaactcaggactcgttggccctctgttagtgtgccgcgctggggcactgggcgcagatgggaaacagaaaggggtagataaggagttcttccttctatttaccgttctagacgaaaataagagttggtacagtaacgcaaaccaagctgccgctatgctggactttaggctgctgtctgaggacatcgagggctttcaagactcaaatagaatgcacgcaataaatggcttcctgttctccaatcttcctcggttggacatgtgcaaaggagacactgtggcctggcatctgctcggactgggcacagaaaccgatgtccacggggttatgttccaaggcaatactgtgcagctgcagggaatgagaaagggtgccgcaatgctgtttccacacacttttgtcatggctatcatgcagcctgacaatctaggtacattcgaaatctattgtcaggcgggtagtcatcgcgaagctgggatgcgcgcaatttacaatgtcagtcagtgccctggccaccaggccactcctaggcagaggtatcaggctgcgaggatctattacatcatggccgaggaggtggagtgggactattgccctgacagatcatgggaacgagagtggcataaccagtcagaaaaagactcatatggctacatcttcttatcaaataaggatggcttactggggtccaggtataaaaaggcggtattcagggagtatactgacggaaccttcaggataccgaggccacgcacgggacccgaggaacacctcggcatacttggccctttgattaaaggtgaagtgggagatattcttactgtggtttttaaaaataatgctagcaggccatattccgtgcatgcccacggagtgttggaaagtacaaccgtgtggcccttggcggctgaacctggcgaagtcgtcacttatcaatggaatattccagagaggagcggccctggaccgaacgatagcgcgtgtgtgagttggatctactattccgccgttgaccctatcaaggatatgtactcagggctcgtgggtccactggccatttgtcagaaaggcatcctggagcctcacggaggaagaagcgatatggaccgagagttcgccctgcttttccttatattcgacgagaacaagtcctggtacctggaggaaaacgtggctacgcatggatcccaggacccgggtagtatcaacctgcaggacgaaaccttcctggaatccaacaaaatgcacgctattaacggcaaattgtacgccaacctgagaggcctgactatgtaccagggcgagagggtagcttggtatatgctcgcaatgggccaggatgttgacctacacactatccatttccacgccgagagctttctatacagaaatggtgaaaattacagggccgacgtagtggacctgttccctgggaccttcgaggtcgtagagatggttgccagtaatcccggtacttggctaatgcactgccatgtgacagaccatgttcacgcgggaatggagaccctgtttactgtgtttagccgcaccgaacacctgtctcccttaacagtcatcaccaaggaaaccgagaaggcagtgccaccaagagacattgaggagggcaatgtgaaaatgctcggcatgcagattcctataaagaatgttgaaatgctggccagcgtgctcgtggctatcagcgtgaccctccttctggtggtgttggctctggggggagtggtgtggtaccagcatcgccagcgcaagctgcgaagaaaccgtcggagtattcttgatgacagctttaagctcctaagcttcaaacagtag

SEQ ID NO: 182299 - DNA, 2676 bp, Artificial Sequence
  derived and/or modified sequence
atgcacgccatcaacggcttcgtgttcggcaacctgcccgagctgaacatgtgcgcccagaagagagtggcctggcacctgttcggcatgggcaacgagatcgacgtgcacaccgccttcttccacggccagatgctgaccaccagaggccaccacaccgacgtggccaacatcttccccgccaccttcgtgaccgccgagatggtgccctgggagcccggcacctggctgatcagctgccaggtgaacagccacttcagagacggcatgcaggccctgtacaaggtgaagagctgcagcatggccccccccgtggacctgctgaccggcaaggtgagacagtacttcatcgaggcccacgagatccagtgggactacggccccatgggccacgacggcagcaccggcaagaacctgagagagcccggcagcatcagcgacaagttcttccagaagagcagcagcagaatcggcggcacctactggaaggtgagatacgaggccttccaggacgagaccttccaggagaagatgcacctggaggaggacagacacctgggcatcctgggccccgtgatcagagccgaggtgggcgacaccatccaggtggtgttctacaacagagccagccagcccttcagcatgcagccccacggcgtgttctacgagaaggactacgagggcaccgtgtacaacgacggcagcagctaccccggcctggtggccaagcccttcgagaaggtgacctacagatggaccgtgcccccccacgccggccccaccgcccaggaccccgcctgcctgacctggatgtacttcagcgccgccgaccccatcagagacaccaacagcggcctggtgggccccctgctggtgtgcagagccggcgccctgggcgccgacggcaagcagaagggcgtggacaaggagttcttcctgctgttcaccgtgctggacgagaacaagagctggtacagcaacgccaaccaggccgccgccatgctggacttcagactgctgagcgaggacatcgagggcttccaggacagcaacagaatgcacgccatcaacggcttcctgttcagcaacctgcccagactggacatgtgcaagggcgacaccgtggcctggcacctgctgggcctgggcaccgagaccgacgtgcacggcgtgatgttccagggcaacaccgtgcagctgcagggcatgagaaagggcgccgccatgctgttcccccacaccttcgtgatggccatcatgcagcccgacaacctgggcaccttcgagatctactgccaggccggcagccacagagaggccggcatgagagccatctacaacgtgagccagtgccccggccaccaggccacccccagacagagataccaggccgccagaatctactacatcatggccgaggaggtggagtgggactactgccccgacagaagctgggagagagagtggcacaaccagagcgagaaggacagctacggctacatcttcctgagcaacaaggacggcctgctgggcagcagatacaagaaggccgtgttcagagagtacaccgacggcaccttcagaatccccagacccagaaccggccccgaggagcacctgggcatcctgggccccctgatcaagggcgaggtgggcgacatcctgaccgtggtgttcaagaacaacgccagcagaccctacagcgtgcacgcccacggcgtgctggagagcaccaccgtgtggcccctggccgccgagcccggcgaggtggtgacctaccagtggaacatccccgagagaagcggccccggccccaacgacagcgcctgcgtgagctggatctactacagcgccgtggaccccatcaaggacatgtacagcggcctggtgggccccctggccatctgccagaagggcatcctggagccccacggcggcagaagcgacatggacagagagttcgccctgctgttcctgatcttcgacgagaacaagagctggtacctggaggagaacgtggccacccacggcagccaggaccccggcagcatcaacctgcaggacgagaccttcctggagagcaacaagatgcacgccatcaacggcaagctgtacgccaacctgagaggcctgaccatgtaccagggcgagagagtggcctggtacatgctggccatgggccaggacgtggacctgcacaccatccacttccacgccgagagcttcctgtacagaaacggcgagaactacagagccgacgtggtggacctgttccccggcaccttcgaggtggtggagatggtggccagcaaccccggcacctggctgatgcactgccacgtgaccgaccacgtgcacgccggcatggagaccctgttcaccgtgttcagcagaaccgagcacctgagccccctgaccgtgatcaccaaggagaccgagaaggccgtgccccccagagacatcgaggagggcaacgtgaagatgctgggcatgcagatccccatcaagaacgtggagatgctggccagcgtgctggtggccatcagcgtgaccctgctgctggtggtgctggccctgggcggcgtggtgtggtaccagcacagacagagaaagctgagaagaaacagaagaagcatcctggacgacagcttcaagctgctgagcttcaagcagtag

SEQ ID NO: 182300 - protein, 2137 aa, Artificial Sequence
  derived and/or modified sequence
MVSQVLQLLRQGVWAALTGGWYHDPEQSKFTNSCHLYLWLFLLLLPLALHLAFPPNAIIVFFYCSAVTIFFTIIKLVSYRLHLMFDKGEVIQQKPSRKEEKPNKDKEAKGEHITNHRNPSNNRQIHNGKKEEASRNLSTPPLRCSSRGQSITSHHSSGPLELSAQETVEDLKGVILLEDHPIAPVSSTSPGIKVESLPASQAHMLETTTKSVIPVKPVATETLINGKGKERGGKGQPPLRHRSEGGLVDKGPLKKLPHLSLSQYDLLETDVSFQPWGSENSVLIPEPVSCPRGSIRERVQSKSPQDSLSSSCPQCDTIVAKPVEEPADTSCQVDTSCQGDLPLHQEVDSSDSEVAVTLIDTSQPGDPLSLHEPIKIVITMSSTPNSMTDLESSLHLRVVGTEKTSVKSDAEPTNPGAAGSPNAEQISIPVITLDLPEGGGGGVPCPEGNGSERTPERLKTRVSTNQCSGYGSGEGGNAIKDHSSSSREPWESVSRLTPDTGSESKVGKEGQTNLDPSSCKSSHEKRHARVLSVDSGTDVFLSKSSAEIVNDTEKTMPTSKSDLEAKEGQMPNESNFLEFVSLLESINTSKMTASSQLNGSAEQNEESGLLRDNCSQEKKEEILENEKPSGHSSKQGKPDLQSQDHTSTGPACTQPAKTTAFFQGNRQRQIIYRVTSQQDSSVLQVISGPETSVQEEISVDAMHVFIDEHGEIRSCYLKSGNQKEGPLQPLPSNNDCLSQAREMQVSSSSTTTSESQDPSSGDPAVSALQQQLLLMVARRTQSETPRHVSQDLEASSCSSTQGKFNREQFYKFIIFPGKWIKVWYDRLTLLALLDRTEDIKENVLAILLIVLVSLLGFLTLSQGFCKDMWVLLFCLVMASCQYSLLKSVQPDPASPIHGHNQIITYSRPIYFCVLCGLILLLDTGAKARHPPSYVVYGLKLFSPVFLQSARDYLIVFLYCFPAISLLGLFPQINTFCTYLLEQIDMLFFGGSAVSGITSAVYSVARSVLAAALLHAVCFSAVKEPWSMQHIPALFSAFCGLLVALSYHLSRQSSDPSVLMSFIQCRLFPKFLHQNLAESAADPLPKKMKDSVTDVLKWDLIVCAVVAVLSFAVSASTVFLSLRPFLSIVLFALAGAVGFVTHYVLPQLRKHHPWMWISHPILKNKEYHQREVRDVAHLMWFERLYVWLQCFEKYILYPALILNALTIDAFLISNHRRLGTHWDIFLMIIAGMKLLRTSFCNPVYQFINLSFTVIFFHFDYKDISESFLLDFFMVSILFSKLGDLLHKLQFVLTYVAPWQMAWGSSFHVFAQLFAIPHSAMLFFQTIATSIFSTPLSPFLGSVIFITSYVRPVKFWEKNYNTRRVDNSNTRLAVQIERDPGNDDNNLNSIFYEHLTRTLQESLCGDLVLGRWGNYSSGDCFILASDDLNAFVHLIEIGNGLVTFQLRGLEFRGTYCQQREVEAIMEGDEEDRGCCCCKPGHLPHLLSCNAAFHLRWLTWEITQTQYILEGYSILDNNAATMLQVFDLRRILIRYYIKSIIYYMVTSPKLLSWIKNESLLKSLQPFAKWHYIERDLAMFNINIDDDYVPCLQGITRASFCNVYLEWIQHCARKRQEPSTTLDSDEDSPLVTLSFALCTLGRRALGTAAHNMAISLDSFLYGLHVLFKGDFRITARDEWVFADMDLLHKVVAPAIRMSLKLHQDQFTCPDEYEDPAVLYEAIQSFEKKVVICHEGDPAWRGAVLSNKEELLTLRHVVDEGADEYKVIMLHRSFLSFKVIKVNKECVRGLWAGQQQELIFLRNRNPERGSIQNNKQVLRNLINSSCDQPLGYPMYVSPLTTSYLGTHRQLKNIWGGPITLDRIRTWFWTKWVRMRKDCNARQHSGGNIEDVDGGGAPTTGGNNAPSGGSQESSAEQPRKGGAQHGVSSCEGTQRTGRRKGRSQSVQAHSALSQRPPMLSSSGPILESRQTFLQTSTSVHELAQRLSGSRLSLHASATSLHSQPPPVTTTGHLSVRERAEALIRSSLGSSTSSTLSFLFGKRSFSSALVISGLSAAEGGNTSDTQSSSSVNIVMGPSARAASQATRHLSEPCEPPDATEQGQLHDRCLAEAVADTLGVVCRRASQEDMGLDDTASQQSVSDEQ

SEQ ID NO: 182301 - protein, 777 aa, Artificial Sequence
  derived and/or modified sequence
MTFYPFVASSSTRRVDNSNTRLAVQIERDPGNDDNNLNSIFYEHLTRTLQESLCGDLVLGRWGNYSSGDCFILASDDLNAFVHLIEIGNGLVTFQLRGLEFRGTYCQQREVEAIMEGDEEDRGCCCCKPGHLPHLLSCNAAFHLRWLTWEITQTQYILEGYSILDNNAATMLQVFDLRRILIRYYIKSIIYYMVTSPKLLSWIKNESLLKSLQPFAKWHYIERDLAMFNINIDDDYVPCLQGITRASFCNVYLEWIQHCARKRQEPSTTLDSDEDSPLVTLSFALCTLGRRALGTAAHNMAISLDSFLYGLHVLFKGDFRITARDEWVFADMDLLHKVVAPAIRMSLKLHQDQFTCPDEYEDPAVLYEAIQSFEKKVVICHEGDPAWRGAVLSNKEELLTLRHVVDEGADEYKVIMLHRSFLSFKVIKVNKECVRGLWAGQQQELIFLRNRNPERGSIQNNKQVLRNLINSSCDQPLGYPMYVSPLTTSYLGTHRQLKNIWGGPITLDRIRTWFWTKWVRMRKDCNARQHSGGNIEDVDGGGAPTTGGNNAPSGGSQESSAEQPRKGGAQHGVSSCEGTQRTGRRKGRSQSVQAHSALSQRPPMLSSSGPILESRQTFLQTSTSVHELAQRLSGSRLSLHASATSLHSQPPPVTTTGHLSVRERAEALIRSSLGSSTSSTLSFLFGKRSFSSALVISGLSAAEGGNTSDTQSSSSVNIVMGPSARAASQATRVRGWAGLTRTGWDGGTGSWPERGTCLAFPPFCLQNPIPFSMGLPE

SEQ ID NO: 182302 - DNA, 6414 bp, Artificial Sequence
  derived and/or modified sequence
atggtgagccaggtgctgcagctgctgagacagggcgtgtgggccgccctgaccggcggctggtaccacgaccccgagcagagcaagttcaccaacagctgccacctgtacctgtggctgttcctgctgctgctgcccctggccctgcacctggccttcccccccaacgccatcatcgtgttcttctactgcagcgccgtgaccatcttcttcaccatcatcaagctggtgagctacagactgcacctgatgttcgacaagggcgaggtgatccagcagaagcccagcagaaaggaggagaagcccaacaaggacaaggaggccaagggcgagcacatcaccaaccacagaaaccccagcaacaacagacagatccacaacggcaagaaggaggaggccagcagaaacctgagcaccccccccctgagatgcagcagcagaggccagagcatcaccagccaccacagcagcggccccctggagctgagcgcccaggagaccgtggaggacctgaagggcgtgatcctgctggaggaccaccccatcgcccccgtgagcagcaccagccccggcatcaaggtggagagcctgcccgccagccaggcccacatgctggagaccaccaccaagagcgtgatccccgtgaagcccgtggccaccgagaccctgatcaacggcaagggcaaggagagaggcggcaagggccagccccccctgagacacagaagcgagggcggcctggtggacaagggccccctgaagaagctgccccacctgagcctgagccagtacgacctgctggagaccgacgtgagcttccagccctggggcagcgagaacagcgtgctgatccccgagcccgtgagctgccccagaggcagcatcagagagagagtgcagagcaagagcccccaggacagcctgagcagcagctgcccccagtgcgacaccatcgtggccaagcccgtggaggagcccgccgacaccagctgccaggtggacaccagctgccagggcgacctgcccctgcaccaggaggtggacagcagcgacagcgaggtggccgtgaccctgatcgacaccagccagcccggcgaccccctgagcctgcacgagcccatcaagatcgtgatcaccatgagcagcacccccaacagcatgaccgacctggagagcagcctgcacctgagagtggtgggcaccgagaagaccagcgtgaagagcgacgccgagcccaccaaccccggcgccgccggcagccccaacgccgagcagatcagcatccccgtgatcaccctggacctgcccgagggcggcggcggcggcgtgccctgccccgagggcaacggcagcgagagaacccccgagagactgaagaccagagtgagcaccaaccagtgcagcggctacggcagcggcgagggcggcaacgccatcaaggaccacagcagcagcagcagagagccctgggagagcgtgagcagactgacccccgacaccggcagcgagagcaaggtgggcaaggagggccagaccaacctggaccccagcagctgcaagagcagccacgagaagagacacgccagagtgctgagcgtggacagcggcaccgacgtgttcctgagcaagagcagcgccgagatcgtgaacgacaccgagaagaccatgcccaccagcaagagcgacctggaggccaaggagggccagatgcccaacgagagcaacttcctggagttcgtgagcctgctggagagcatcaacaccagcaagatgaccgccagcagccagctgaacggcagcgccgagcagaacgaggagagcggcctgctgagagacaactgcagccaggagaagaaggaggagatcctggagaacgagaagcccagcggccacagcagcaagcagggcaagcccgacctgcagagccaggaccacaccagcaccggccccgcctgcacccagcccgccaagaccaccgccttcttccagggcaacagacagagacagatcatctacagagtgaccagccagcaggacagcagcgtgctgcaggtgatcagcggccccgagaccagcgtgcaggaggagatcagcgtggacgccatgcacgtgttcatcgacgagcacggcgagatcagaagctgctacctgaagagcggcaaccagaaggagggccccctgcagcccctgcccagcaacaacgactgcctgagccaggccagagagatgcaggtgagcagcagcagcaccaccaccagcgagagccaggaccccagcagcggcgaccccgccgtgagcgccctgcagcagcagctgctgctgatggtggccagaagaacccagagcgagacccccagacacgtgagccaggacctggaggccagcagctgcagcagcacccagggcaagttcaacagagagcagttctacaagttcatcatcttccccggcaagtggatcaaggtgtggtacgacagactgaccctgctggccctgctggacagaaccgaggacatcaaggagaacgtgctggccatcctgctgatcgtgctggtgagcctgctgggcttcctgaccctgagccagggcttctgcaaggacatgtgggtgctgctgttctgcctggtgatggccagctgccagtacagcctgctgaagagcgtgcagcccgaccccgccagccccatccacggccacaaccagatcatcacctacagcagacccatctacttctgcgtgctgtgcggcctgatcctgctgctggacaccggcgccaaggccagacacccccccagctacgtggtgtacggcctgaagctgttcagccccgtgttcctgcagagcgccagagactacctgatcgtgttcctgtactgcttccccgccatcagcctgctgggcctgttcccccagatcaacaccttctgcacctacctgctggagcagatcgacatgctgttcttcggcggcagcgccgtgagcggcatcaccagcgccgtgtacagcgtggccagaagcgtgctggccgccgccctgctgcacgccgtgtgcttcagcgccgtgaaggagccctggagcatgcagcacatccccgccctgttcagcgccttctgcggcctgctggtggccctgagctaccacctgagcagacagagcagcgaccccagcgtgctgatgagcttcatccagtgcagactgttccccaagttcctgcaccagaacctggccgagagcgccgccgaccccctgcccaagaagatgaaggacagcgtgaccgacgtgctgaagtgggacctgatcgtgtgcgccgtggtggccgtgctgagcttcgccgtgagcgccagcaccgtgttcctgagcctgagacccttcctgagcatcgtgctgttcgccctggccggcgccgtgggcttcgtgacccactacgtgctgccccagctgagaaagcaccacccctggatgtggatcagccaccccatcctgaagaacaaggagtaccaccagagagaggtgagagacgtggcccacctgatgtggttcgagagactgtacgtgtggctgcagtgcttcgagaagtacatcctgtaccccgccctgatcctgaacgccctgaccatcgacgccttcctgatcagcaaccacagaagactgggcacccactgggacatcttcctgatgatcatcgccggcatgaagctgctgagaaccagcttctgcaaccccgtgtaccagttcatcaacctgagcttcaccgtgatcttcttccacttcgactacaaggacatcagcgagagcttcctgctggacttcttcatggtgagcatcctgttcagcaagctgggcgacctgctgcacaagctgcagttcgtgctgacctacgtggccccctggcagatggcctggggcagcagcttccacgtgttcgcccagctgttcgccatcccccacagcgccatgctgttcttccagaccatcgccaccagcatcttcagcacccccctgagccccttcctgggcagcgtgatcttcatcaccagctacgtgagacccgtgaagttctgggagaagaactacaacaccagaagagtggacaacagcaacaccagactggccgtgcagatcgagagagaccccggcaacgacgacaacaacctgaacagcatcttctacgagcacctgaccagaaccctgcaggagagcctgtgcggcgacctggtgctgggcagatggggcaactacagcagcggcgactgcttcatcctggccagcgacgacctgaacgccttcgtgcacctgatcgagatcggcaacggcctggtgaccttccagctgagaggcctggagttcagaggcacctactgccagcagagagaggtggaggccatcatggagggcgacgaggaggacagaggctgctgctgctgcaagcccggccacctgccccacctgctgagctgcaacgccgccttccacctgagatggctgacctgggagatcacccagacccagtacatcctggagggctacagcatcctggacaacaacgccgccaccatgctgcaggtgttcgacctgagaagaatcctgatcagatactacatcaagagcatcatctactacatggtgaccagccccaagctgctgagctggatcaagaacgagagcctgctgaagagcctgcagcccttcgccaagtggcactacatcgagagagacctggccatgttcaacatcaacatcgacgacgactacgtgccctgcctgcagggcatcaccagagccagcttctgcaacgtgtacctggagtggatccagcactgcgccagaaagagacaggagcccagcaccaccctggacagcgacgaggacagccccctggtgaccctgagcttcgccctgtgcaccctgggcagaagagccctgggcaccgccgcccacaacatggccatcagcctggacagcttcctgtacggcctgcacgtgctgttcaagggcgacttcagaatcaccgccagagacgagtgggtgttcgccgacatggacctgctgcacaaggtggtggcccccgccatcagaatgagcctgaagctgcaccaggaccagttcacctgccccgacgagtacgaggaccccgccgtgctgtacgaggccatccagagcttcgagaagaaggtggtgatctgccacgagggcgaccccgcctggagaggcgccgtgctgagcaacaaggaggagctgctgaccctgagacacgtggtggacgagggcgccgacgagtacaaggtgatcatgctgcacagaagcttcctgagcttcaaggtgatcaaggtgaacaaggagtgcgtgagaggcctgtgggccggccagcagcaggagctgatcttcctgagaaacagaaaccccgagagaggcagcatccagaacaacaagcaggtgctgagaaacctgatcaacagcagctgcgaccagcccctgggctaccccatgtacgtgagccccctgaccaccagctacctgggcacccacagacagctgaagaacatctggggcggccccatcaccctggacagaatcagaacctggttctggaccaagtgggtgagaatgagaaaggactgcaacgccagacagcacagcggcggcaacatcgaggacgtggacggcggcggcgcccccaccaccggcggcaacaacgcccccagcggcggcagccaggagagcagcgccgagcagcccagaaagggcggcgcccagcacggcgtgagcagctgcgagggcacccagagaaccggcagaagaaagggcagaagccagagcgtgcaggcccacagcgccctgagccagagaccccccatgctgagcagcagcggccccatcctggagagcagacagaccttcctgcagaccagcaccagcgtgcacgagctggcccagagactgagcggcagcagactgagcctgcacgccagcgccaccagcctgcacagccagcccccccccgtgaccaccaccggccacctgagcgtgagagagagagccgaggccctgatcagaagcagcctgggcagcagcaccagcagcaccctgagcttcctgttcggcaagagaagcttcagcagcgccctggtgatcagcggcctgagcgccgccgagggcggcaacaccagcgacacccagagcagcagcagcgtgaacatcgtgatgggccccagcgccagagccgccagccaggccaccagacacctgagcgagccctgcgagccccccgacgccaccgagcagggccagctgcacgacagatgcctggccgaggccgtggccgacaccctgggcgtggtgtgcagaagagccagccaggaggacatgggcctggacgacaccgccagccagcagagcgtgagcgacgagcagtag

SEQ ID NO: 182303 - DNA, 6414 bp, Artificial Sequence
  derived and/or modified sequence
atggtttctcaagtgttacagctcctccgtcagggcgtctgggcggctctgacaggcggctggtaccacgacccagaacagtccaagtttacaaacagctgtcacctgtacctgtggctgttcttgctgctgctcccactcgcattgcacctagcttttccacctaatgccatcatagtgtttttctattgcagtgctgtgacaattttcttcacgattattaagctggtgtcataccggttacatttgatgtttgacaagggagaagtgatccagcagaaaccctcccggaaggaagagaagccaaataaagataaggaggcaaagggcgaacacatcaccaatcatcgcaatccctccaacaaccggcagatccataacggcaaaaaagaagaagccagtcgcaacctgtctaccccccccctgcgctgtagtagcagaggccagtcgattacctctcatcattcttccggtcctctagaactgagcgcacaagaaactgtggaggaccttaagggtgtcatcctcttagaagaccatcccatagctccagtctcgtccacaagccctggaattaaggtcgagagcctgccagcatcgcaggctcacatgctggaaacaaccaccaagagtgtgatcccagtcaaacctgtggcaaccgaaaccctgataaatggaaaaggcaaggagagggggggcaaaggccaacccccactgagacaccggagcgaggggggtctagtcgacaagggacccctcaaaaagttgccccacctctccctgagccaatacgacttgcttgagaccgatgtgtcttttcagccctggggttccgagaactcagtgttgatacctgaaccagtttcatgcccacggggatctattagagagcgtgtgcagagtaagtctccacaggattccttgtcatctagctgcccccaatgcgacacaatcgtggcaaagcctgtggaggagcccgccgatacttcttgtcaggtggatacaagttgtcaaggtgacctgccgctacatcaagaggtggactcctccgacagcgaagtagcggtcaccctcattgatacatctcagccgggcgacccactgtctctgcacgagccaatcaagatagtgatcacaatgtcgtcaacgcctaactctatgacagacctggagtcttctctccatctgagggttgtaggtacggagaagacctccgtcaagagcgatgccgaacccaccaatcctggtgcagcaggttctcccaacgctgaacagattagtatccctgtaatcaccctcgacctgcccgaaggaggcggaggaggtgtgccctgcccagagggaaacggctctgaacgcacaccagaaaggctaaagactagagtctctactaatcagtgtagcggctatggctctggcgaaggtggcaatgcaatcaaggaccactcttcaagcagcagggagccctgggagtcagtgtccaggctgacacccgataccggttctgagtcgaaggttgggaaggagggacagacgaatctggatccgtcatcctgtaaatcctcacacgagaagcggcacgctcgggtgctctctgtcgatagtggcacagacgttttcctcagcaagtcaagtgcggagatcgtcaacgacactgagaagacaatgcccacatccaaaagcgacttggaagccaaagagggccagatgccaaacgaaagtaacttcctggagttcgtctcgttgctggagtctataaacaccagcaaaatgacagcatcctcccagcttaatggcagcgcagagcagaacgaggagagcggactactgcgcgataactgttcacaggagaagaaggaggaaatattagagaatgaaaaaccatcagggcactcctcaaagcagggaaagccagacctacagtctcaggaccatacttctacagggcctgcctgtacccagccagccaagactactgccttcttccaggggaacaggcagcggcagatcatctatcgcgtgacctctcaacaggattccagtgtgctgcaagtgatctctggaccggaaaccagcgtgcaggaggaaattagcgtggatgctatgcacgtctttattgatgagcacggcgagatcagaagttgctatctgaaatcaggaaatcaaaaggaggggcctttgcagcccctgccaagcaacaatgactgtctgtcccaggctagggaaatgcaagtttcctcaagcagcacgaccacttccgaatcccaggatccctcgtcaggcgacccggccgtcagtgcgctgcagcaacaactcttactgatggtcgctagacgcactcaaagcgaaacaccaagacacgtgtcccaagacctcgaggcaagcagctgctcctccacccaggggaaatttaaccgggagcaattttacaagtttatcatcttcccaggcaaatggattaaggtttggtacgaccgtctgaccttgctggcccttctcgataggaccgaagacatcaaagaaaatgtcttggccatcctcctcatcgtgctggtcagcctactaggctttctaacgctttctcaggggttttgcaaggacatgtgggttctgctgttctgtttggtcatggctagttgccaatactctctgctgaagtccgttcagccagaccctgccagcccaatacatgggcacaatcaaatcatcacgtattcacggcccatctacttctgtgttctgtgcggattaattctgctgttggatacaggcgccaaggcacgccatccgcccagttacgtagtttatggactgaaacttttctctccggtgtttctccagtccgccagagattacctcatcgtgtttttatactgcttccctgctatcagcctgctcggcctgtttccacagataaacaccttttgcacttatctcttagaacaaatcgatatgttattcttcgggggctcagcagttagcggaattacgtcggcagtctatagcgtagccaggtcagtgctagctgccgcactgctgcacgctgtatgcttctccgccgtgaaagaaccctggagcatgcagcacattccagctctgttttctgctttctgtggtttactggtcgctctaagctaccatctgtcacgccaaagcagcgatcctagcgtgctcatgagctttattcaatgcagactcttcccgaagttcttgcatcaaaacctcgcagaatccgccgccgaccctcttcctaagaagatgaaggattcagtgaccgacgtgttgaagtgggatctgatcgtgtgcgctgttgtcgcagtattgagttttgctgtcagcgcctccaccgttttcctgagtctgagaccatttctgtccattgttttgttcgccttagctggagcagtcgggtttgtgacccactacgtacttccccagttgagaaaacatcatccctggatgtggataagccacccgatcctaaagaataaggaatatcatcagcgcgaggttagggacgtagcacacttgatgtggttcgaacgtctttatgtgtggctgcagtgtttcgagaagtatatcctgtaccccgccctcatcctgaacgccctcacgatagacgcattccttataagtaaccacagaaggctgggtacccattgggatatttttctgatgatcatcgcgggtatgaagctgctgaggacgagcttctgcaaccccgtgtaccaattcatcaacctgtcattcacggtgattttcttccacttcgactataaagacatatctgagtcgttcctgcttgacttcttcatggtgagtatattatttagtaagctgggggatctcctccataagctccagttcgttctgacttatgttgcaccttggcagatggcgtggggatcctcattccatgtgtttgcccaactgttcgctatacctcattctgccatgcttttcttccagaccattgccacctccattttcagcaccccattaagtccatttctcgggtcggtcattttcataaccagctatgttcgaccagtcaagttctgggaaaagaattacaacacccgcagagtggacaattctaatacaaggttagccgtccagattgagagagatccaggcaacgacgataacaatctgaacagcatcttctacgaacaccttacgcgcacactccaggagtcactttgcggggacctggtgctaggcagatggggcaactatagttccggcgactgttttattcttgcctccgatgacctgaatgcattcgtgcatttaattgaaatcggtaacggcttggtcactttccagctgcgcggtctcgagttccgggggacatactgtcagcagagggaagttgaggctattatggaaggagacgaggaagaccgaggctgctgctgttgtaaaccaggccacctgccacacctcctttcttgcaacgccgcgttccacttaagatggctaacttgggagattactcagacacagtacatactggagggctattctatcttggacaataacgccgcaacaatgttacaagtgttcgatctcagacgcatactgattcggtactatattaagagcatcatctactacatggtcacaagtccgaagctgctgagctggatcaaaaatgaaagcctgcttaagagcctgcagccctttgccaaatggcattacatcgagcgcgacctggccatgttcaatataaatatcgatgacgactatgtgccttgtttgcaggggatcactagagcttctttctgtaacgtctacctcgagtggattcagcactgcgcccgaaagagacaggaaccgtccacaacccttgacagcgatgaggacagccctttggtcaccctttccttcgcattgtgtaccctgggccgccgcgcactggggactgcagcccacaacatggccataagtctggattcttttttgtacggactccacgttctgttcaagggagatttcaggattacagctagggatgagtgggtgtttgctgatatggacctgctccataaggtggtggcgcccgcaatccgtatgagcctgaaactccatcaggatcagttcacttgccccgacgaatatgaagaccccgccgtgctgtacgaggccattcagagtttcgaaaagaaagtggtgatttgccatgaaggtgacccagcatggagaggcgcagtgctgtccaacaaagaggaactgctgaccctgcggcacgtggtcgatgaaggggccgacgagtataaggtgataatgttgcaccgtagttttctgagcttcaaggttattaaggtgaacaaggaatgcgtgcgaggcttatgggccgggcagcagcaggagttgatattcctcaggaacagaaatcccgagaggggatccattcagaacaataagcaggttctgagaaacttaatcaattcctcatgcgaccagcctctcggctatcccatgtacgtgtcccccctcaccacaagctaccttggcactcatcgtcaacttaaaaatatatggggaggccctataaccctcgatcgaatccgaacatggttctggacaaaatgggtgcgaatgcgcaaggattgtaatgctcggcagcacagtggggggaacattgaggacgtagacggagggggcgccccaaccactggcggcaataacgccccgtcaggaggctcccaggagtcctctgctgaacagcctagaaagggcggcgctcagcatggcgtaagtagttgcgagggaactcagaggaccggacgccgaaaggggaggtcccagtcagtgcaggcacactccgccctcagccagcggccgccaatgctctcttcctcaggccccattctcgaatcccgacaaacatttctccagacgtctacatctgtccatgaactcgcgcagagattatcaggttccaggttgagccttcacgcctccgcgacaagcctgcattcccagcctccgccagtgaccacaaccggccatctgagtgtacgtgagagagcagaagctctgatcaggtcaagccttggcagctctaccagctcgaccctatccttcctgtttgggaaacgatctttctcctcagcccttgtcatctcgggcctgtccgccgctgagggggggaacacttcagacacccaatccagctcatcagtgaacattgtgatgggaccttcagcaagggctgcatctcaagccactaggcacttatccgaaccatgcgagcccccggatgccacagaacaagggcagctgcatgatcggtgcctggccgaagctgttgctgatacacttggagtggtatgtagacgggcttctcaggaagacatggggttagacgacaccgctagccagcaaagtgtcagtgacgaacaatag

SEQ ID NO: 182304 - DNA, 6414 bp, Artificial Sequence
  derived and/or modified sequence
atggtgtcccaggtgctgcagctgctgcggcagggcgtgtgggccgccctgaccggcggctggtaccatgaccctgagcagagcaagttcaccaacagctgccacctgtacctgtggctgttcctgctgctgctgcccctggccctgcacctggccttccccccaaatgccatcatcgtgttcttctactgcagcgctgtgaccatcttcttcaccatcatcaagctggtgtcctaccgcctgcacctgatgtttgataaaggagaggtgatccagcagaagcccagcaggaaggaggagaagcccaacaaggacaaggaggccaagggggagcacatcaccaaccacaggaaccccagcaacaaccggcagatccacaacgggaagaaggaggaggccagcaggaacctgagcaccccacccctgcgctgcagcagccggggccagagcatcaccagccaccacagcagcggccccctggagctgagcgcccaggagaccgtggaggacctgaagggcgtcatcctgctggaggaccaccccatcgcccctgtgagcagcaccagccctggcatcaaggtggagagcctgcctgccagccaggcccacatgctggagaccaccaccaagagcgtcatccctgtgaagcctgtggccacagagaccctcatcaatggcaagggcaaggagcggggcggcaagggccagccccccctgcggcacaggtctgagggcggcctggtggacaagggccccctgaagaagctgccccacctgagcctgagccagtatgacctgctggagacagatgtgtccttccagccctggggctctgaaaattctgtgctgatccctgagcctgtgtcctgcccccggggcagcatccgggagcgggtgcagagcaagagcccccaggacagcctgagcagcagctgcccccagtgtgacaccatcgtggccaagcctgtggaggagcctgctgacaccagctgccaggtggacaccagctgccagggcgacctgcccctgcaccaggaggtggacagcagtgacagcgaggtggccgtgaccctgattgacaccagccagcccggggaccccctgagcctgcacgagcccatcaagatcgtcatcaccatgagcagcacccccaacagcatgacagacctggagagcagcctgcacctgcgggtggtgggcacagagaagacctctgtgaagagtgatgctgagcccaccaaccctggagctgctggcagccccaatgctgagcagatcagcatccctgtgatcaccctggacctgcctgagggcggcggcggcggcgtgccctgcccagagggcaatggaagtgagaggaccccagagcggctgaagaccagggtgtccaccaaccagtgcagcggctacggcagcggggagggcggcaatgccatcaaggaccacagcagcagcagccgggagccctgggagagcgtgtcccggctgaccccagacaccggcagcgagagcaaggtgggcaaggagggccagaccaacctggaccccagcagctgcaagagcagccatgagaagagacatgcccgggtgctgtctgtggacagcggcacagatgtgttcctgagcaagagcagcgctgagatcgtgaatgacacagagaagaccatgcccaccagcaagagtgacctggaggccaaggagggccagatgcccaatgaaagcaacttcctggagtttgtgtccctgctggagagcatcaacaccagcaagatgacagccagcagccagctgaatggcagcgctgagcagaatgaggagagcggcctgctgcgggacaactgcagccaggagaagaaggaggagatcctggagaatgagaagcccagcggccacagcagcaagcagggcaagccagacctgcagagccaggaccacaccagcacaggccctgcctgcacccagcctgccaagaccacagccttcttccagggcaaccggcagaggcagatcatctacagagtgaccagccagcaggacagctctgtgctgcaggtgatcagcggccctgagacctctgtgcaggaggagatctctgtggatgccatgcacgtgttcattgatgaacatggagagatccgcagctgctacctgaagagcggcaaccagaaggagggccccctgcagcccctgcccagcaacaatgactgcctgagccaggcccgggagatgcaggtgagcagcagcagcaccaccaccagcgagagccaggaccccagcagcggggaccctgctgtgtctgccctgcagcagcagctgctgctgatggtggcccggaggacccagagcgagacccccaggcatgtgtcccaggacctggaggccagcagctgcagcagcacccagggcaagttcaaccgggagcagttctacaagttcatcatcttccctgggaagtggatcaaggtgtggtatgaccggctgaccctgctggccctgctggacagaacagaggacatcaaggaaaatgtgctggccatcctgctgattgtgctggtgtccctgctgggcttcctgaccctgagccagggcttctgcaaggacatgtgggtgctgctcttctgcctggtgatggccagctgccagtacagcctgctgaagtctgtgcagcctgaccctgccagccccatccacggccacaaccagatcatcacctacagccggcccatctacttctgtgtgctgtgtggcctcatcctgctgctggacacaggagccaaggcccggcacccccccagctatgtggtgtatggcctgaagctgttcagccctgtgttcctgcagagcgcccgggactacctgattgtgttcctgtactgcttccctgccatcagcctgctgggcctcttcccccagatcaacaccttctgcacctacctgctggagcagattgacatgctgttcttcggcggcagcgctgtgtctggcatcaccagcgctgtgtacagcgtggcccggtctgtgctggccgccgccctgctgcatgctgtgtgcttctctgctgtgaaggagccctggagcatgcagcacatcccagccctcttcagcgccttctgtggcctgctggtggccctgagctaccacctgagccggcagagcagtgaccccagcgtgctgatgtccttcatccagtgccgcctcttccccaagttcctgcaccagaacctggccgagagcgctgctgaccccctgcccaagaagatgaaggacagcgtgacagatgtgctgaagtgggacctgattgtgtgtgctgtggtggccgtgctgagctttgctgtgtctgccagcaccgtcttcctgagcctgcggcccttcctgagcatcgtgctgtttgccctggccggggctgtgggctttgtgacccactacgtgctgccccagctgaggaagcaccacccctggatgtggatcagccaccccatcctgaagaacaaggagtaccaccagcgggaggtgagagatgtggcccacctgatgtggtttgagcggctgtatgtgtggctgcagtgctttgagaagtacatcctgtacccagccctgatcctgaatgccctgaccattgatgccttcctgatcagcaaccaccggcggctgggcacccactgggacatcttcctgatgatcatcgccggcatgaagctgctgcggaccagcttctgcaaccctgtgtaccagttcatcaacctgtccttcaccgtcatcttcttccactttgactacaaggacatcagcgagagcttcctgctggacttcttcatggtgtccatcctcttcagcaagctgggggacctgctgcacaagctgcagtttgtgctgacctacgtggccccctggcagatggcctggggcagcagcttccacgtgtttgcccagctgtttgccatcccccacagcgccatgctgttcttccagaccatcgccaccagcatcttcagcacccccctgagccccttcctgggcagcgtcatcttcatcaccagctatgtgcggcctgtgaagttctgggagaagaactacaacaccaggagagtggacaacagcaacacccggctggccgtgcagatcgagcgggaccctggaaatgatgacaacaacctgaacagcatcttctatgagcacctgaccaggaccctgcaggagagcctgtgtggggacctggtgctgggccgctggggcaactacagcagcggggactgcttcatcctggccagtgatgacctgaatgcctttgtgcacctgattgaaattggaaatggcctggtgaccttccagctgcggggcctggagttccggggcacctactgccagcagcgggaggtggaggccatcatggagggagatgaggaggaccggggctgctgctgctgcaagccaggccacctgccccacctgctgagctgcaatgctgccttccacctgcgctggctgacctgggagatcacccagacccagtacatcctggagggctacagcatcctggacaacaatgctgccaccatgctgcaggtgtttgacctgcggcgcatcctgatccgctactacatcaagagcatcatctactacatggtgaccagccccaagctgctgtcctggatcaagaatgaaagcctgctgaagagcctgcagccctttgccaagtggcactacatcgagcgggacctggccatgttcaacatcaacattgatgatgattatgtgccctgcctgcagggcatcacccgggccagcttctgcaatgtgtacctggagtggatccagcactgtgccaggaagaggcaggagcccagcaccaccctggacagtgatgaggacagccccctggtgaccctgagctttgccctgtgcaccctgggccggcgggccctgggcacagctgcccacaacatggccatcagcctggacagcttcctgtatggcctgcacgtgctcttcaagggggacttccgcatcacagccagagatgagtgggtgtttgctgacatggacctgctgcacaaggtggtggccccagccatccgcatgagcctgaagctgcaccaggaccagttcacctgcccagatgaatatgaagatcctgctgtgctgtatgaggccatccagagctttgagaagaaggtggtgatctgccatgaaggagaccctgcctggagaggagctgtgctgagcaacaaggaggagctgctgaccctgcggcacgtggtggatgagggcgcagatgagtacaaggtgatcatgctgcacaggagcttcctgtccttcaaggtgatcaaggtgaacaaggaatgtgtgcggggcctgtgggccggccagcagcaggagctgatcttcctgaggaacagaaatcctgagcggggcagcatccagaacaacaagcaggtgctgaggaacctgatcaacagcagctgtgaccagcccctgggctaccccatgtatgtgagccccctgaccaccagctacctgggcacccaccggcagctgaagaacatctggggcggccccatcaccctggaccgcatccgcacctggttctggaccaagtgggtgaggatgaggaaggactgcaatgcccggcagcacagcggcggcaacattgaagatgtggatggcggcggggcccccaccaccggcggcaacaatgcccccagcggcggcagccaggagagcagcgctgagcagcccaggaagggcggggcccagcacggcgtgagcagctgtgagggcacccagaggacaggccgcaggaagggccgcagccagagcgtgcaggcccacagcgccctgagccagaggcctcccatgctgagcagcagcggccccatcctggagagccggcagaccttcctgcagaccagcacctctgtgcatgagctggcccagaggctgagcggcagccggctgagcctgcacgccagcgccaccagcctgcacagccagcccccacctgtgaccaccaccggccacctgtctgtgcgggagagagctgaggccctgatccgcagcagcctgggcagcagcaccagcagcaccctgtccttcctgtttgggaagaggagcttcagcagcgccctggtgatcagcggcctgtctgctgctgagggcggcaacaccagtgacacccagagcagcagctctgtgaacatcgtgatgggccccagcgcccgggccgccagccaggccaccaggcacctgtctgagccctgtgagcccccagatgccacagagcagggccagctgcatgaccgctgcctggccgaggccgtggccgacaccctgggcgtggtgtgcagaagagccagccaggaggacatgggcctggatgacacagccagccagcagagcgtgtctgatgagcagtag

SEQ ID NO: 182305 - DNA, 6414 bp, Artificial Sequence
  derived and/or modified sequence
atggtgagccaggtgctgcagctgctgcggcagggcgtgtgggccgccctgacaggtggatggtatcatgatccagagcaatcaaagttcaccaacagttgtcacctttacctgtggctcttcctcttactccttcccctggccctccatctggcatttccccccaacgctatcattgtgttcttctattgtagtgccgttactatcttctttactatcattaagctggtgagctataggcttcacctcatgtttgacaagggggaagtgattcagcagaagccctcacgaaaagaagaaaaaccgaacaaggacaaagaagccaagggggaacacattacaaatcacaggaatccatccaacaaccgccaaatccataatggaaaaaaggaagaggcgtcccggaacctatcaaccccccccctgcgttgttcttcccggggccaatctattacttctcaccacagctctggccccctggaactgtctgcccaggagaccgtcgaggatctgaaaggagtgattctgctggaggaccaccctatagcacctgttagttctacatcaccaggcataaaggtggaatccctcccggcatctcaggctcacatgttggagaccacgaccaagtcagtgatcccagttaagcctgtcgctactgaaacactgatcaacggtaagggaaaagaacgagggggcaaaggtcagcctccactcaggcatcggagcgagggtgggctcgtcgataaaggccctctaaagaaattgcctcacttatccctttcacagtatgacctacttgagacggacgtcagttttcaaccctggggctccgagaactctgtactcattcccgaacctgtcagctgcccccggggctcgattcgggaaagagttcaatctaaatctcctcaagatagtcttagttccagctgtccacagtgtgacactatcgtggctaaaccagtagaagagcccgccgatacctcctgtcaagtggatacgtcttgccagggggacctgcccctgcaccaggaggtggacagctccgacagtgaagttgcagtgacgcttatagatacatcccaaccaggggatccactttctctccacgaacccatcaagatcgtgatcaccatgagcagcacccctaatagcatgacagatttggaatctagtctacatctgcgcgtggtagggactgagaagacctcggtaaagtctgacgcggaaccaactaaccccggtgctgccgggtcaccaaatgccgagcagatctccattccagtcattactctagacctacctgaagggggtggggggggcgtgccatgtcccgagggcaacggatccgaacgcacccccgagcgcttgaagacccgagtttccaccaatcagtgttccggctacggaagcggagagggaggcaacgctattaaagaccatagtagcagctcccgagagccttgggagtcagtgagccgtctcacaccggacacggggagcgagagtaaggtgggcaaggagggtcagacaaatttagacccgtcaagttgcaagtctagccacgagaaacggcacgctagagtcctgtcggtcgatagcggaaccgatgtctttctttccaaatccagtgccgagatcgtgaatgacaccgaaaaaacgatgccgacatctaagtccgatttggaggccaaagagggccagatgcccaacgagtctaactttcttgaattcgtcagcctactagagtcaattaatacaagtaaaatgacagcttccagccagctgaacggatctgccgagcaaaatgaagagagcgggttgttgcgggacaactgctcccaggagaagaaggaagagattctggaaaacgaaaaacccagcggacacagtagtaagcaggggaagcccgatctgcaatctcaggatcacacctctaccgggcctgcttgtacacagccagcaaagacgactgccttcttccagggaaatcggcagcgccaaataatataccgtgtcacatcacaacaggattccagcgtgctgcaggtgatcagcggtcctgaaacatcggtccaagaggagatctcagtggatgctatgcatgtgtttatcgacgagcacggagaaattcggagctgctacttgaaatctggaaaccagaaggagggaccgctgcaacctctgccttctaataacgattgtttatcccaggcaagggagatgcaagttagttcctcctccactacgactagtgaatctcaggaccctagttccggcgaccccgcagtaagcgctctccagcaacagctccttctgatggtagcccggcgtacacagtccgagacccccagacacgtcagccaggatctggaggcatcatcttgttcatctactcagggcaagtttaatcgggagcaattttataaattcatcatatttcccggtaagtggatcaaggtttggtacgaccgcctgacgcttctcgcgctacttgatcggactgaggatataaaagaaaatgtgctggccattcttctaatcgtgcttgtgtctctgttggggtttcttacacttagccagggattttgcaaggacatgtgggtgttgctgttctgcctggtgatggcctcctgccagtatagtcttctgaaatctgtacagcccgatcccgccagcccaatacacggccataaccaaatcataacttactcacggccaatctatttctgtgtgctgtgcggcctgattctgctcttggataccggcgccaaggcacgccatccgccctcttatgtggtttacggtctgaaattattctcgcctgttttcctacagagcgctagggactacttaatcgtcttcctgtactgctttccagccataagccttcttggactctttccccagatcaacactttttgtacttatctgttagaacagattgacatgctgtttttcggggggagcgcagtctctggaattacctctgctgtgtactcagtggcgagaagcgttctggccgctgctctcctgcatgcagtctgctttagcgcagtgaaggagccatggagtatgcagcatattccagccctctttagcgccttttgcgggctgctcgtcgccctcagctaccacctgagtcggcaaagttcggatcccagcgtgctaatgagttttattcagtgcagactcttcccgaaatttcttcatcagaatctggccgaaagcgcagcggatcctcttccaaagaaaatgaaagactctgtgaccgacgtcctgaagtgggatcttatagtttgcgctgtagtcgccgtgctgagtttcgccgtatccgcaagcaccgtctttctaagcttgcgacctttcctgagcatcgtcctctttgctttggctggagccgtaggattcgtaacccactacgtgttgccccagctgcggaagcaccatccttggatgtggatctcccatccaatcctcaaaaataaagagtatcatcagcgtgaagtgcgggacgtggcacacctgatgtggttcgagaggctgtacgtctggttacagtgctttgagaagtatattttgtatcctgccctcattctgaatgctttaacaatagatgctttcctaatcagcaatcacaggcgcctcggaacgcactgggacatctttctgatgatcattgcaggaatgaagctgctgaggacttcattttgcaatccagtctaccagttcatcaatctctcttttaccgtgatcttttttcatttcgactacaaggacatttccgagtcattcttgttggatttttttatggtatctatccttttctccaagctgggggatttgctgcacaagctccagttcgtgttgacctacgtggctccctggcagatggcatggggctcttccttccacgtcttcgctcagttgtttgccattccccattctgctatgttatttttccaaactatagctactagcatcttttccacacctctctctccctttcttggtagcgtcatattcatcacttcatatgtgaggcctgtgaagttctgggaaaagaactataatacccggcgcgtcgataattcaaacaccaggctggctgtccaaattgaaagggatcccgggaatgacgataataacttaaactcaatcttctatgaacatctgacacggactctgcaggagtccctttgcggtgatctcgttctgggtcggtggggcaactattcctccggtgactgctttatcttagccagcgatgacttgaatgctttcgtgcatctaatcgaaatcggcaatggactagtcacattccagctgaggggattggagttccgggggacctactgtcagcagcgcgaagtcgaggctataatggaaggcgacgaggaggaccgaggatgctgctgctgcaagcccggccatcttccccatctcctgtcctgcaacgccgcgttccaccttaggtggctcacctgggagattactcagacccagtatatcctcgagggctattctatcctagacaacaatgcggctaccatgctgcaggtattcgatttgcgccgcatcttaatcaggtattatattaagtctataatttactacatggtgacatctcccaagctacttagctggatcaagaatgagtccctcttgaagagtctgcaaccttttgctaagtggcactacatagaacgagacttagcaatgttcaatattaacatagatgacgactatgtgccttgcctccaaggaatcacacgggcctcattttgcaacgtttacctggaatggattcagcactgcgctagaaagcgccaggaaccttctacaacattggacagtgatgaggatagtcccctcgtcacactctccttcgcgctgtgtacactgggtagaagggccttggggaccgctgcacacaacatggccatctcgctggactctttcttgtacgggctgcatgtcctgtttaagggtgactttcggattactgcacgggacgagtgggtcttcgcagatatggatttgctccacaaagtggtggccccagccattagaatgagcttgaagctacaccaggaccagtttacatgccccgacgagtatgaagacccggccgtgctctacgaagcaattcagtcattcgaaaagaaggtggttatatgccacgagggagaccctgcttggagaggcgcagtcctgtctaataaagaggaacttcttacacttagacacgtggtagatgagggcgccgacgagtataaggtaattatgctgcaccgtagcttcctgagctttaaagtaatcaaagtaaataaagaatgcgttcgcggactgtgggctggacaacagcaggaactgatcttcctgagaaaccgcaaccctgaacgtggaagcatacagaacaacaaacaggtgttgcgcaaccttataaattcaagctgcgaccaaccactcggctatcccatgtatgtgtcacctctgactacctcatacctgggtacccatcggcagctgaaaaatatttggggaggtccaatcaccctcgaccgcattaggacctggttttggaccaaatgggtgcggatgaggaaagactgtaacgcacgacaacacagcggggggaacatagaggatgtggacggcggcggagctccaactaccggggggaacaatgccccatctggagggagccaggaaagctccgctgaacagccgcggaaaggcggagcccagcacggcgtctcttcttgcgagggaacccagaggacggggagaagaaaggggcgatcccagagtgtacaagctcactccgctctgtctcaacggccgcccatgcttagctcctcggggcccatacttgagtcaaggcagaccttcctgcaaacgtccacctccgtgcatgaattagctcagagacttagcggaagtaggctgtctctgcacgcaagtgccactagtctgcacagccagcctccacccgtcaccaccaccggtcacctgtcagtgcgggagcgggccgaggccctgatccgcagctcgttgggctcgagcacctcctctactctgtccttccttttcggaaagagaagcttctcctcagccctagtgataagcggcctgtccgccgccgagggaggaaatacttctgatactcagtcatcatcttcggtcaatattgttatgggtccgtcggccagagctgcctcacaggctaccagacatttatcagagccttgcgagccacccgatgcaacagagcagggccagttgcacgatcgatgtcttgctgaagccgtcgcagataccctgggtgttgtatgccggcgggcgagccaagaggacatgggcctggatgacaccgcctcccagcagagcgtgtcagatgagcagtag

SEQ ID NO: 182306 - DNA, 6817 bp, Artificial Sequence
  derived and/or modified sequence
tggcgctcacctgcccggccgcagcagccggctccggcgccgcggttcgcgggtccgggcggaagagcagctccagcttcaaacgtggggtggaaggaggcggcgggggcgacggcggcggcgacggcgggggcgcggcccgcgggcccgggtgttagacctgagggagcctggagatccggccggggcgcgcagggtgcagcggggcgctcaccagccccggggcgcagccggcatggtgtcccaggtgctgcagctgctccggcagggcgtgtgggccgcgctcaccgggggctggtaccacgacccggagcagagcaagttcaccaacagctgccacctctacctgtggctgttcctcctgctgctgcccctggccctgcacctggcttttcctccaaatgcgatcattgtatttttctactgcagtgcagtgactatattcttcacaataatcaaactggtcagttatcgcctacacctcatgtttgacaaaggagaagtaattcagcaaaagccctccagaaaggaagaaaagccaaataaagacaaggaggccaaaggtgaacacataactaatcacagaaatccaagcaataataggcagattcacaatggcaaaaaggaagaggccagtcgaaacctctccacgcctcccctccgctgcagctccagagggcaaagcataacctctcatcactcttctgggccattggagttgtcagcacaggaaactgtagaagatctcaaaggtgtcattctattagaagaccatcccatagcaccagtgtcatctacctcacctggtatcaaagtggaaagcttacctgcgtctcaagcacacatgctggaaaccacgaccaagtcagtaatacctgtaaaaccagttgccacagaaactctcatcaatggtaaaggaaaggaaagaggaggcaaggggcagcctcctttgcgccacagatccgagggtggcttagtggataagggacccttgaagaagttgccccacctgtctttgtctcagtatgacttactagaaacagacgtttctttccagccgtgggggagtgagaattcagtcctgattccagaacctgtcagttgtccccggggctccataagggaacgggtacaaagcaagtcacctcaggacagcctgagcagcagctgccctcaatgtgacaccatcgtggccaagcctgtggaggagccagcagacacatcctgtcaggtagatacctcctgccagggggacctgcccttgcaccaggaagtggactcctcagatagtgaggtagctgttactctcatcgatacttctcaacccggagacccactgagtctacatgagcccataaaaattgttatcacgatgagcagtaccccaaactccatgacagatttggaaagctccctccacctgagggtggttggcacagagaagaccagtgtaaagtctgacgctgagcccactaacccaggggcggccggttctccaaatgccgagcagatctcaattcctgtaatcaccctggacctgcctgagggtgggggaggaggtgttccctgtcccgaaggcaatggaagtgaaaggactccagagagactgaagacgagggtatccaccaatcagtgttctggctacggatctggggaggggggaaatgccatcaaggatcacagttcttcatcacgggaaccctgggaatcggtgtcccggcttacacctgatacaggctccgagtctaaggtggggaaggaaggccagactaaccttgacccatcgtcttgtaagtccagccatgaaaagaggcatgcccgggtgctcagtgtggacagtgggacagatgtcttcttgagtaaaagttctgcagaaattgttaacgatacagagaaaacaatgccaacttccaaatctgacctagaggctaaggaaggacaaatgccaaatgagtccaacttcctggaatttgtctccctgttagaatccattaatacttccaagatgacggcatccagtcaactgaatggctcagctgagcagaatgaagaaagtgggcttctccgagataactgttcccaggaaaaaaaggaggaaatcctggaaaatgaaaagcccagtggacacagttctaagcaaggaaaaccagatttgcaaagtcaagaccatactagcaccggccccgcatgcactcagcctgccaagaccacagccttttttcagggcaatagacaaagacagataatctacagggtaacttcccaacaagatagttctgtcttgcaagtcatcagtgggcctgaaacatctgtacaagaagagatatctgtggatgctatgcatgtcttcattgatgaacatggggaaattagatcctgttatttaaaatctggaaatcagaaagaaggccctttacagcctctaccatcaaataatgactgtctctctcaggctcgagagatgcaggtcagctcctccagtaccacaacttctgagagtcaagatccgtcttctggggaccctgccgtcagtgcccttcagcaacagctgttactgatggtggctcgcaggacccagtcggaaaccccacggcatgtgagtcaggatctggaagcctcgtcatgttcttcaacacaaggaaaatttaaccgagagcagttttacaaatttatcattttccctggcaagtggattaaagtctggtatgatcgactgaccttgctggcattacttgatcgaactgaagacatcaaggagaatgtactggcgattttactcattgtcctggtttccctccttggatttctgaccttgagccaaggcttttgcaaagatatgtgggtgctcctcttctgcctcgtcatggccagctgccagtactccctgctaaagagtgttcagcctgaccccgcctcaccaatacacggacacaaccaaatcataacatatagcagaccaatctatttttgtgtgctgtgtggccttattttgcttcttgatacaggggccaaagccaggcaccctcccagttacgttgtgtatggcctgaagctcttctctccagtgtttctacaatcagctagggactacttaatagtatttttatattgcttccctgctatttccctccttgggctcttcccgcaaatcaacactttctgcacttatcttttggagcaaattgacatgctgttttttggtggttctgctgtgtctgggataacctcggctgtttacagtgtggcccggagcgtcttggctgccgccctgctccacgcagtctgcttcagtgcagtgaaggaaccgtggagcatgcaacacatcccggcactgttttcggccttctgtggcctcttggtcgccctttcttaccatctgagccgtcagagcagtgacccatctgtactcatgtccttcatccaatgcaggctgtttcctaaatttttacatcaaaatctggcagagtcagctgctgaccctctccccaagaagatgaaagattcagtgacggatgtcttaaaatgggatctcatcgtctgcgcagtggttgctgtcctctcatttgcagtcagcgccagcactgtattcctgtcattgcgaccatttctcagcatcgtgctgtttgccttggctggagccgtggggtttgtaacacattacgtgctccctcagctccgcaagcatcatccctggatgtggatttcacaccccattctcaaaaacaaagagtatcatcaacgggaagtgagagatgttgcccatttaatgtggttcgaaagactctatgtttggcttcagtgttttgaaaaatacatcttgtacccagcgctaattttgaatgccctcactattgatgcatttttaataagcaatcaccggagacttggtacccactgggacatttttctgatgatcattgctggcatgaagctgttgcggacatcattctgcaacccggtttaccagtttattaacttgagcttcactgtcatctttttccactttgactacaaagatatttcagagagcttcttactggatttcttcatggtgtccattttatttagcaagctcggggacctgcttcacaagttacagttcgtcctgacatatgtggctccttggcagatggcttggggttcttcgtttcacgtgtttgctcagctctttgccattcctcattctgccatgcttttctttcagacgattgccacatcaatcttttctaccccattgagcccatttcttgggagtgtcattttcatcacatcatatgtcaggccagtgaaattctgggagaaaaactacaatacaaggcgagtggataattccaacacaagactggcagtccaaattgaaagagatccagggaatgatgacaacaatctcaattccattttttatgaacacttgacaaggaccctccaggagtccctctgtggagacttagttcttggacgttggggcaactacagctctggcgattgctttattttggcttcagatgacctcaatgcctttgttcacctgattgaaattggaaatggtcttgtcacctttcaacttcgaggactggaattccgaggaacctactgccagcagagggaggtagaagccatcatggagggcgacgaggaggacagaggctgctgctgctgcaaaccaggccacttgcctcacctgctgtcctgcaacgctgcctttcacctccgctggctcacctgggaaatcacgcagacccagtacatcctggagggctacagcatcctggacaacaacgcggccaccatgctgcaggtgtttgacctccgaaggatcctcatccgctactacatcaagagtataatatactatatggtaacgtctcccaaactcctctcctggatcaaaaatgaatcacttctgaagtccctgcagccctttgccaagtggcattacattgagcgtgaccttgcaatgttcaacattaacattgatgatgactacgtcccgtgtctccaggggatcacacgagctagcttctgcaatgtttatctagaatggattcaacactgtgcacggaaaagacaagagccttcaacgaccctggacagtgacgaggactctcccttggtgactctgtccttcgccctgtgcaccctggggaggagagctctgggaacagccgctcacaatatggccatcagcctggattctttcctgtatggcctccatgtcctcttcaaaggtgacttcagaataacagcacgtgacgagtgggtatttgctgacatggacctactgcataaagttgtagctccagctatcaggatgtccctgaaacttcaccaggaccagttcacttgccctgacgagtatgaagacccagcagtcctctacgaggccatccagtccttcgagaagaaggtggtcatctgccacgagggcgacccggcctggcggggcgcagtgctgtccaacaaggaagagctgctcaccctgcggcacgtggtggacgagggtgccgacgagtacaaggtcatcatgctccacagaagcttcctgagcttcaaggtgatcaaggttaacaaagaatgcgtccgaggactttgggccgggcagcagcaggagcttatatttcttcgcaaccgcaatccggagcgcggcagtatccagaacaataagcaggtcctgcggaacttgattaactcctcctgcgatcagcccctggggtaccccatgtatgtctccccactaaccacatcctacctagggacacacaggcagctgaagaacatctggggtggacccatcactttggacagaattaggacctggttctggaccaagtgggtaaggatgcggaaggattgcaatgcccgccagcacagtggcggcaacattgaagacgtggacggaggaggggccccgacgacaggtggcaacaatgccccgagtggtggcagccaggagagcagcgcagaacagcccagaaaaggcggtgctcagcacggggtgtcatcctgtgaagggacacagagaacaggcaggaggaaaggcaggagccagtccgtgcaggcacactcagcgctaagccaaaggccgcccatgctgagctcatctggccccatcttagagagccgccaaacattcctccagacgtccacctcagtgcacgagctggcccagaggctctcgggcagccggctctccttgcacgcctcggccacgtccctgcactctcagcccccgcccgtcaccaccaccggccacctgagtgtccgtgagcgggccgaggcgctcatcaggtccagcctgggctcctccaccagctccaccctgagcttcctcttcggcaagaggagcttttccagcgcgctcgtcatttccggactctctgctgcggaggggggcaataccagtgacacccagtcatccagcagcgtcaacatcgtgatgggcccctcagccagggctgccagccaggccactcggcacctctccgagccatgtgagccccctgatgccaccgagcaggggcagcttcatgaccgatgtctggctgaggctgtggcggacactctcggggttgtctgcaggagagcaagccaggaggacatgggcctggacgacacggcctcgcagcaaagtgtgtcagacgagcagtgacgggcgtgcggccgggcggggaggctggctcccccacacctcccacctgcattgctctccctcgtgctccccaaatcaccacaaccaaccaataccgcgatccatgagggactcctcctgtggaaaaggagagctgttccagaacacagaactgatctcaggtttttg

SEQ ID NO: 182307 - DNA, 6414 bp, Artificial Sequence
  derived and/or modified sequence
atggtctcacaagtcctgcagctcctgaggcagggggtgtgggcggcactgaccgggggatggtaccacgaccccgaacaaagcaaattcactaatagttgtcacttatacctttggctttttctcctgctcctgcctctggctctccacctggcctttcctcccaacgccatcatagtcttcttttactgctccgccgtgactatctttttcaccatcataaagctcgtcagttatcggctgcatctgatgttcgataagggggaggtcattcaacaaaagccatcacggaaagaggaaaaaccgaataaggacaaggaggctaagggagaacacataaccaaccaccggaaccctagcaacaaccgacaaatccacaatggcaagaaggaggaggcgtcacgaaacctatcgacacccccattacggtgctcaagtcgaggacagagcatcacatcccaccacagctcagggcctctcgagttgtccgcccaggaaaccgtcgaggacctgaaaggggtgatcctgctcgaagaccaccccatcgctcccgtttcaagtacctcccccggaatcaaagtagagagcctgccagccagccaggcccatatgttggaaaccaccactaaatcagttatcccagtgaagccagttgcgactgagacactgatcaacggtaagggtaaggagcgtggcggaaaagggcagcctcctcttcgccacaggtctgagggcggactggtcgacaaaggcccactgaagaagctgcctcacctctccctctcgcagtacgacctgttagagacagacgtcagctttcagccatggggctcagaaaattccgtgctcatccctgagcctgttagttgccccagaggaagtattcgcgaacgcgtccagtccaagtccccacaggattcactcagcagctcgtgtccccagtgcgacaccatcgtggcgaagcctgtcgaagaacccgcagacacatcctgtcaggttgatacctcctgccagggggacctccccctgcaccaggaagttgattctagcgatagtgaggtcgctgtgactttgattgacacctctcagcccggagaccccttgtccctgcacgagcccattaagatcgtgatcaccatgagttccacgcccaactcgatgacggatctcgagtcctccttacatttgcgagttgtcggaacagagaaaacctcagtgaagagcgacgccgaacccaccaaccctggggctgccggtagccctaatgccgaacagatatccattccagtcatcaccctggacctgcccgagggcggaggcggtggggtgccgtgtccggaggggaacggttctgaaaggactcctgaaaggttgaaaacccgcgttagcacaaaccaatgtagcggctacggctctggtgagggcggaaacgcaatcaaggatcactcatcctcttcccgcgagccatgggagtcagtttcccgccttacccccgatacaggttctgaatcaaaggttggtaaagagggccagacaaacttggatccaagcagttgcaagtcgagtcacgaaaagagacatgccagagtgctatcggttgacagtgggactgacgtatttctgagcaaatcctctgctgagattgtgaatgatacagagaagacaatgcccacttccaagtctgacttggaggctaaagaaggccagatgcccaacgaatctaactttctagagttcgtcagtctgctggaatccattaacactagtaagatgaccgcctcatcacaactgaatggaagcgccgagcaaaatgaggaatctggcttgttgagagacaactgtagccaggagaaaaaggaagaaatcttggagaatgagaaacccagcggccattcttcaaaacagggcaagcctgaccttcaatcacaggatcatacttctactggccctgcttgtactcagcctgcaaagactaccgcattctttcaaggtaatcggcagaggcagatcatctaccgcgtgacgtcccagcaggacagttctgtgttgcaggtgatctccggtcctgagacgtctgtacaggaagagattagcgtggacgcaatgcacgtatttattgacgaacacggagagatccggagttgctacttaaaaagtgggaatcagaaagaaggccctctccagcctcttccatcaaataacgactgtctttcccaggcacgagaaatgcaggtcagcagctcttcaaccactacatcagaaagtcaggatccttcaagtggggatcctgcagtgtctgctttacagcagcagctgttgttgatggtcgccagacggactcagtccgaaacacccaggcacgtgtctcaggatttggaggccagtagctgtagctccacccaagggaaatttaaccgggagcaattttacaagttcatcattttccctggaaaatggatcaaagtctggtacgacagattgacactcctcgctctcctggatcgaactgaagatataaaagaaaacgttctcgcaatcttacttatagttctggttagcctgctcggatttctgaccctttcccagggattttgcaaagacatgtgggtcctgctcttctgcctcgtgatggcctcatgccaatactctctgctgaagagcgtccagcccgatccagcctctcccattcacgggcacaaccaaatcataacatatagcagaccaatatatttctgtgtcttgtgcggactgatccttttacttgataccggagcgaaagctcgccatcctcccagctacgtcgtatacgggcttaagctgttctctcccgtatttctccagtcagccagagactacctcatcgtgtttctttactgctttcctgccatctcactgctggggttatttcctcagatcaatacattctgcacttatctactcgaacaaattgatatgctgttcttcggcggatcggccgtgtccggcattacctccgctgtgtacagcgtggcaaggtcagtgctggccgctgctctgctccatgcggtatgtttctcagctgttaaagagccgtggtccatgcaacacattcccgcattatttagtgccttctgcggccttctggtcgccctctcatatcatctgtctaggcagtccagcgatccatcggtccttatgtccttcatccagtgtcgcctgtttcccaaattcctccaccagaatctcgccgaatccgctgcagatcctctccctaagaaaatgaaggactctgtgaccgatgtcttaaagtgggacctcatcgtctgcgccgttgtggctgtactgtctttcgccgtcagcgcatcaacagtcttcctgtccctgcgccctttcctgtccattgtcctctttgcattggctggagcagtaggtttcgtgactcactatgtcctaccacaacttcgaaagcatcatccgtggatgtggatttctcaccctatcctcaagaacaaagaataccatcagcgagaggttcgagatgtcgctcacctcatgtggttcgaacgactctacgtttggctacagtgtttcgagaagtatatcttataccctgcactcatcctgaatgctctgactattgacgcgttccttatcagcaatcataggcgattgggtacccactgggacatatttctgatgataattgccggtatgaaactgctgcggacgagcttttgtaatccggtgtatcaatttattaatctgagttttaccgttatcttttttcattttgattacaaagacatttctgagtctttcctgttagacttcttcatggtgagcatcttgttctctaagctaggggatctgctgcacaagttgcagttcgtactcacctacgtggccccatggcagatggcctggggatcatcatttcatgtttttgcacaacttttcgctattccccatagcgctatgctgttttttcagactattgcgacttcaatcttctctacccctctgtctcccttcctagggtctgtgatttttatcacctcctacgttaggcctgtgaagttctgggaaaaaaactacaatacgagaagggtcgacaacagcaatacaaggctggctgtccagatcgagcgagacccgggtaatgatgataacaatctgaactccatcttctatgaacacttaacccggacactgcaagagagcctctgcggcgatctggtcctcggacgctggggcaactacagctccggagattgcttcatcctggcctctgatgaccttaacgcgtttgtccacctgattgagattggcaatggcctggtcacctttcagcttcgtgggttagagttccggggaacttactgccagcagagagaggtggaggccatcatggagggagacgaggaggataggggatgctgctgttgtaagcctggacacctgccacatctgctctcctgcaacgcagctttccatttgcggtggttaacatgggagatcacacagacacagtatatcttggagggctacagcatactggacaataatgccgctacgatgctccaggtgtttgaccttcggaggatattaatccgctattatataaaatccatcatttactacatggtcacgtccccaaagctcctgagctggatcaaaaatgagagtttattgaaatctctgcaaccgttcgctaagtggcattacattgagagggacctggctatgttcaatattaatattgacgatgactatgtgccatgtctgcaaggcattactagagcctcattctgcaacgtttatctggagtggattcagcattgtgctcgcaaacgccaggaaccctctacaacgttagactcagatgaagacagccccctcgtgactctgagttttgcactgtgtacgttagggaggcgggctcttggcacggccgcacataacatggctatttcccttgattcattcctctatggcttgcacgtcttgttcaaaggcgatttccggatcacggcccgtgatgaatgggtcttcgccgacatggatctgcttcacaaggtggtcgccccagccatcagaatgtcactgaagctgcaccaggatcagtttacctgtcctgatgagtatgaagaccctgcggtgctctacgaggcaattcagagctttgagaaaaaggttgtcatctgccacgaaggcgatccagcttggcggggagctgtcctttccaataaagaggaactgctgactctgagacacgtcgttgatgaaggagctgatgaatataaggtgattatgctgcatcggtcttttttgagtttcaaagtcataaaggttaataaagagtgtgtgagagggttgtgggccggtcagcagcaagaactgatatttctgcgcaataggaacccggagagagggtcgatccaaaacaataagcaggtattacgaaatctgattaactcttcctgcgatcagcctctcggctatcctatgtacgtgagccctctgacaactagctatctggggacccatcgacagctgaaaaacatctggggtgggccaattaccctcgatcgtatccgaacctggttctggaccaaatgggtgcgcatgagaaaggattgcaacgccaggcagcattcaggagggaacatagaagatgtagacggagggggagccccaacaactgggggtaataacgcaccatccggaggttctcaggagagctccgcggagcagccacgcaaagggggtgcgcaacacggagtgagctcctgtgaagggactcagcggacaggcagacggaagggaagatctcaatcagtccaggcccattctgccttgagtcagagaccaccaatgctaagttcttccggcccaattctggaatctaggcagactttcctgcagacctccaccagcgttcatgaactcgcacaaaggttgagcggctcccgcttatcactgcatgctagcgctacctctctccattcccagcctcccccagttacaacaacggggcatcttagtgtgagggaaagagctgaagcgctgattagatcaagcctgggctcttccacgagcagcactctgtccttcttgtttggcaaacgtagtttcagcagcgccctggtcatctctggcctgtcagccgctgagggcggtaatactagcgatacacaaagtagcagcagcgttaacatcgtgatgggacctagcgccagggccgctagccaggccactaggcacttgtctgagccttgcgagcccccagacgcgacagaacaagggcagctgcatgacagatgtcttgcagaggccgttgccgatacactcggagtggtgtgtagacgcgcaagccaggaggatatggggttggacgacacggcatcccaacagtcagtctctgacgaacagtaa

SEQ ID NO: 182308 - protein, 1000 aa, Artificial Sequence
  derived and/or modified sequence
MPGKLKVKIVAGRHLPVMDRASDLTDAFVEVKFGNTTFKTDVYLKSLNPQWNSEWFKFEVDDEDLQDEPLQITVLDHDTYSANDAIGKVYIDIDPLLYSEAATVISGWFPIYDTIHGIRGEINVVVKVDLFNDLNRFRQSSCGVKFFCTTSIPKCYRAVIIHGFVEELVVNEDPEYQWIDRIRTPRASNEARQRLISLMSGELQRKIGLKVLEMRGNAVVGYLQCFDLEGESGLVVRAIGTACTLDKLSSPAAFLPACNSPSKEMKEIPFNEDPNPNTHSSGPSTPLKNQTYSFSPSKSYSRQSSSSDTDLSLTPKTGMGSGSAGKEGGPFKALLRQQTQSALEQREFPFFTLTAFPPGFLVHVGGVVSARSVKLLDRIHNPDEPETRDAWWAEIRQEIKSHAKALGCHAVVGYSESTSICEEVCILSASGTAAVLNPRFLQDGTVEGCLEQRLEENLPTRCGFCHIPYDELNMPFPAHLTYCYNCRKQKVPDVLFTTIDLPTDATVIGKGCLIQARLCRLKKKAQAEANATAISNLLPFMEYEVHTQLMNKLKLKGMNALFGLRIQITVGENMLMGLASATGVYLAALPTPGGIQIAGKTPNDGSYEQHISHMQKKINDTIAKNKELYEINPPEISEEIIGSPIPEPRQRSRLLRSQSESSDEVTELDLSHGKKDAFVLEIDDTDAMEDVHSLLTDVPPPSGFYSCNTEIMPGINNWTSEIQMFTSVRVIRLSSLNLTNQALNKNFNDLCENLLKSLYFKLRSMIPCCLCHVNFTVSLPEDELIQVTVTAVAITFDKNQALQTTKTPVEKSLQRASTDNEELLQFPLELCSDSLPSHPFPPAKAMTVEKASPVGDGNFRNRSAPPCANSTVGVVKMTPLSFIPGAKITKYLGIINMFFIRETTSLREEGGVSGFLHAFIAEVFAMVRAHVAALGGNAVVSYIMKQCVFMENPNKNQAQCLINVSGDAVVFVRESDLEVVSSQQPTTNCQSSCTEGEVTT

SEQ ID NO: 182309 - DNA, 3003 bp, Artificial Sequence
  derived and/or modified sequence
atgcccggcaagctgaaggtgaagatcgtggccggcagacacctgcccgtgatggacagagccagcgacctgaccgacgccttcgtggaggtgaagttcggcaacaccaccttcaagaccgacgtgtacctgaagagcctgaacccccagtggaacagcgagtggttcaagttcgaggtggacgacgaggacctgcaggacgagcccctgcagatcaccgtgctggaccacgacacctacagcgccaacgacgccatcggcaaggtgtacatcgacatcgaccccctgctgtacagcgaggccgccaccgtgatcagcggctggttccccatctacgacaccatccacggcatcagaggcgagatcaacgtggtggtgaaggtggacctgttcaacgacctgaacagattcagacagagcagctgcggcgtgaagttcttctgcaccaccagcatccccaagtgctacagagccgtgatcatccacggcttcgtggaggagctggtggtgaacgaggaccccgagtaccagtggatcgacagaatcagaacccccagagccagcaacgaggccagacagagactgatcagcctgatgagcggcgagctgcagagaaagatcggcctgaaggtgctggagatgagaggcaacgccgtggtgggctacctgcagtgcttcgacctggagggcgagagcggcctggtggtgagagccatcggcaccgcctgcaccctggacaagctgagcagccccgccgccttcctgcccgcctgcaacagccccagcaaggagatgaaggagatccccttcaacgaggaccccaaccccaacacccacagcagcggccccagcacccccctgaagaaccagacctacagcttcagccccagcaagagctacagcagacagagcagcagcagcgacaccgacctgagcctgacccccaagaccggcatgggcagcggcagcgccggcaaggagggcggccccttcaaggccctgctgagacagcagacccagagcgccctggagcagagagagttccccttcttcaccctgaccgccttcccccccggcttcctggtgcacgtgggcggcgtggtgagcgccagaagcgtgaagctgctggacagaatccacaaccccgacgagcccgagaccagagacgcctggtgggccgagatcagacaggagatcaagagccacgccaaggccctgggctgccacgccgtggtgggctacagcgagagcaccagcatctgcgaggaggtgtgcatcctgagcgccagcggcaccgccgccgtgctgaaccccagattcctgcaggacggcaccgtggagggctgcctggagcagagactggaggagaacctgcccaccagatgcggcttctgccacatcccctacgacgagctgaacatgcccttccccgcccacctgacctactgctacaactgcagaaagcagaaggtgcccgacgtgctgttcaccaccatcgacctgcccaccgacgccaccgtgatcggcaagggctgcctgatccaggccagactgtgcagactgaagaagaaggcccaggccgaggccaacgccaccgccatcagcaacctgctgcccttcatggagtacgaggtgcacacccagctgatgaacaagctgaagctgaagggcatgaacgccctgttcggcctgagaatccagatcaccgtgggcgagaacatgctgatgggcctggccagcgccaccggcgtgtacctggccgccctgcccacccccggcggcatccagatcgccggcaagacccccaacgacggcagctacgagcagcacatcagccacatgcagaagaagatcaacgacaccatcgccaagaacaaggagctgtacgagatcaacccccccgagatcagcgaggagatcatcggcagccccatccccgagcccagacagagaagcagactgctgagaagccagagcgagagcagcgacgaggtgaccgagctggacctgagccacggcaagaaggacgccttcgtgctggagatcgacgacaccgacgccatggaggacgtgcacagcctgctgaccgacgtgcccccccccagcggcttctacagctgcaacaccgagatcatgcccggcatcaacaactggaccagcgagatccagatgttcaccagcgtgagagtgatcagactgagcagcctgaacctgaccaaccaggccctgaacaagaacttcaacgacctgtgcgagaacctgctgaagagcctgtacttcaagctgagaagcatgatcccctgctgcctgtgccacgtgaacttcaccgtgagcctgcccgaggacgagctgatccaggtgaccgtgaccgccgtggccatcaccttcgacaagaaccaggccctgcagaccaccaagacccccgtggagaagagcctgcagagagccagcaccgacaacgaggagctgctgcagttccccctggagctgtgcagcgacagcctgcccagccaccccttcccccccgccaaggccatgaccgtggagaaggccagccccgtgggcgacggcaacttcagaaacagaagcgcccccccctgcgccaacagcaccgtgggcgtggtgaagatgacccccctgagcttcatccccggcgccaagatcaccaagtacctgggcatcatcaacatgttcttcatcagagagaccaccagcctgagagaggagggcggcgtgagcggcttcctgcacgccttcatcgccgaggtgttcgccatggtgagagcccacgtggccgccctgggcggcaacgccgtggtgagctacatcatgaagcagtgcgtgttcatggagaaccccaacaagaaccaggcccagtgcctgatcaacgtgagcggcgacgccgtggtgttcgtgagagagagcgacctggaggtggtgagcagccagcagcccaccaccaactgccagagcagctgcaccgagggcgaggtgaccacctag

SEQ ID NO: 182310 - DNA, 3003 bp, Artificial Sequence
  derived and/or modified sequence
atgccgggcaagttgaaagtgaagatcgtggcagggcgccacttacctgttatggatagggcgtctgatctgacggatgcatttgtggaagtcaaattcggaaatactacatttaagacagatgtgtacctgaaaagcctcaatcctcagtggaatagcgagtggttcaaattcgaggtggacgacgaggatcttcaagacgaacccctgcagatcacggtcctggaccatgacacctactccgccaatgatgctatagggaaagtttacattgatattgatcctctgttgtattcagaggccgctaccgtcattagcggctggttccctatctacgacacgattcacggaatcaggggggaaatcaatgttgtcgtgaaggtcgatctcttcaatgacctgaatagattcagacaatccagctgcggcgtcaagtttttctgcaccaccagcatcccaaaatgctacagagccgtgattatccacggcttcgtggaagagctggtagttaacgaggatcctgaatatcaatggatcgaccgtatcagaacaccgcgggcgtcaaatgaggcaaggcagcggctcatttctctgatgagcggtgagttgcaacgaaagattggccttaaggtcctggaaatgaggggcaacgccgtggtcggatacctgcaatgttttgatctcgagggcgagtctggtcttgtggtcagggcaatcggcacagcgtgtacattggacaagttgagttctcctgcagcctttcttcccgcttgtaatagtccctccaaggagatgaaggagataccctttaatgaggaccccaatcctaatacccactcgagcgggcctagtaccccattaaaaaaccagacatacagtttttcaccatccaaatcctattcccgacagtcctccagctctgacaccgacctgtctctgactcccaagaccggtatgggttcagggagcgcgggtaaggaaggtgggccgttcaaggccctcctcaggcagcagacacagtctgctctcgaacaacgggaattcccgttctttaccctcactgcgttcccaccggggtttttagtccacgtgggaggggtggtgtcagctcgcagcgtcaagctgctcgacaggattcataatcctgacgagcccgagacacgagatgcatggtgggcagagatccgccaggagattaaatcgcacgctaaggctctaggatgccatgccgttgtggggtatagcgagagtacaagtatttgtgaggaggtttgcattctatccgcctctggcactgctgcggtgctgaaccctagatttctccaggatgggacagtggaagggtgcttggaacagcgtttagaggaaaatctacccactcggtgtggtttctgtcacataccttatgacgaactgaatatgcccttcccagcacacttaacctattgctacaactgccgtaagcagaaagtgccggacgttctgtttacgactatcgatctgccaaccgatgcaaccgtgatcggcaagggctgcctgatacaagccaggctgtgtaggctgaagaaaaaggctcaggcagaagctaacgcaacagctatatccaacctgctgcccttcatggagtatgaggtgcatactcaactcatgaataaactcaaattgaagggaatgaacgcactgttcggtcttagaattcagatcacagtgggcgagaatatgctaatgggtctggcaagtgccactggagtttacctggccgccctgcctacgccaggtgggatacagatcgcaggtaaaacccctaacgacggctcgtacgaacagcacattagccacatgcagaaaaaaatcaacgacaccattgctaagaataaggaattgtacgagatcaaccccccggagattagtgaagagattattggctctcccatacctgagccgcggcagcggagccgactgctccgctcccaatctgaaagctccgacgaggtcacagaactggacctgagtcatggcaaaaaggatgcatttgtactggagattgatgacacagacgccatggaagatgtccatagccttttgaccgatgtgccgcccccatccggtttctattcatgtaatactgagatcatgccaggcatcaataattggacctctgagatccagatgttcacaagtgtgagggtgatcagacttagcagtttaaatctgaccaaccaggccctcaataaaaatttcaatgacctgtgcgaaaacctgttgaagagcctttacttcaagctgcggtcaatgatcccttgttgcctgtgccacgtgaattttaccgttagcctccctgaggacgaactgatacaagtcactgtgacagccgtcgccatcaccttcgataagaatcaggcactgcagaccacaaaaacacccgtggaaaagtctctccagcgtgcgtctaccgacaatgaagagctgctgcaattccctctcgaactgtgtagcgactcactgccaagtcatccctttcctcccgccaaagctatgactgtggaaaaggcatcgccggtgggggatgggaatttcaggaatcggagtgcccctccttgcgctaattccaccgtcggagtcgtgaaaatgacacctctgtcctttatcccgggtgctaagattacaaaatacctgggcatcattaacatgttttttatacgggagaccacatccctccgtgaggaaggtggagtctctggatttcttcatgccttcatcgcagaagtgttcgctatggtacgagcccatgtagccgccctgggaggcaacgccgtcgtttcctacatcatgaagcagtgtgtttttatggagaatccaaataaaaaccaggcacagtgtctgatcaatgtgagcggtgacgctgtggtgtttgtgagagaaagtgaccttgaggtggtaagctcccagcagccaacaacaaattgccagtcatcctgtacggaaggcgaagtgaccacctag

SEQ ID NO: 182311 - DNA, 3003 bp, Artificial Sequence
  derived and/or modified sequence
atgcctgggaagctgaaggtgaagatcgtggccggccgccacctgcctgtgatggaccgggccagtgacctgacagatgcctttgtggaggtgaagtttggaaacaccaccttcaagacagatgtgtacctgaagagcctgaacccccagtggaacagcgagtggttcaagtttgaggtggatgatgaggacctgcaggatgagcccctgcagatcaccgtgctggaccatgacacctacagcgccaatgatgccatcggcaaggtgtacattgatattgaccccctgctgtacagcgaggccgccaccgtcatcagcggctggttccccatctatgacaccatccacggcatccggggggagatcaacgtggtggtgaaggtggacctcttcaatgacctgaaccgcttccggcagagcagctgtggggtgaagttcttctgcaccaccagcatccccaagtgctaccgggccgtcatcatccacggctttgtggaggagctggtggtgaatgaagatcctgagtaccagtggattgaccgcatccgcaccccccgggccagcaatgaggcccggcagaggctcatcagcctgatgtctggagagctgcagaggaagattggcctgaaggtgctggagatgagaggaaatgctgtggtgggctacctgcagtgctttgacctggagggggagagcggcctggtggtgcgggccatcggcacagcctgcaccctggacaagctgagcagccctgctgccttcctgcctgcctgcaacagccccagcaaggagatgaaggagatccccttcaatgaagaccccaaccccaacacccacagcagcggccccagcacccccctgaagaaccagacctacagcttcagccccagcaagagctacagccggcagagcagcagcagtgacacagacctgagcctgacccccaagacaggcatgggcagcggcagcgctgggaaggagggcggccccttcaaggccctgctgcggcagcagacccagagcgccctggagcagcgggagttccccttcttcaccctgacagccttccccccaggcttcctggtgcacgtgggcggcgtggtgtctgcccggtctgtgaagctgctggaccgcatccacaacccagatgagcctgagaccagagatgcctggtgggccgagatccggcaggagatcaagagccacgccaaggccctgggctgccacgctgtggtgggctacagcgagagcaccagcatctgtgaggaggtgtgcatcctgagcgccagcggcacagctgctgtgctgaacccccgcttcctgcaggacggcaccgtggagggctgcctggagcagaggctggaggagaacctgcccacccgctgtggcttctgccacatcccctatgatgagctgaacatgcccttccctgcccacctgacctactgctacaactgcaggaagcagaaggtgcctgatgtgctcttcaccaccatcgacctgcccacagatgccaccgtcatcggcaagggctgcctgatccaggcccggctgtgccgcctgaagaagaaggcccaggccgaggccaatgccacagccatcagcaacctgctgcccttcatggagtatgaggtgcacacccagctgatgaacaagctgaagctgaagggcatgaatgccctgtttggcctgcgcatccagatcaccgtgggggagaacatgctgatgggcctggccagcgccaccggggtgtacctggccgccctgcccacccctgggggcatccagattgctgggaagaccccaaatgatggcagctatgagcagcacatcagccacatgcagaagaagatcaatgacaccatcgccaagaacaaggagctgtatgagatcaaccccccagagatcagcgaggagatcatcggcagccccatccctgagccccggcagaggagccggctgctgcggagccagagcgagagcagtgatgaggtgacagagctggacctgagccacggcaagaaggatgcctttgtgctggagattgatgacacagatgccatggaggatgtgcacagcctgctgacagatgtgcccccacccagcggcttctacagctgcaacacagagatcatgcctggcatcaacaactggaccagcgagatccagatgttcacctctgtgcgggtcatccggctgagcagcctgaacctgaccaaccaggccctgaacaagaacttcaatgacctgtgtgagaacctgctgaagagcctgtacttcaagctgcgctccatgatcccctgctgcctgtgccacgtgaacttcaccgtgtccctgcctgaagatgagctgatccaggtgacagtgacagctgtggccatcacctttgacaagaaccaggccctgcagaccaccaagacccctgtggagaagagcctgcagagggccagcacagacaatgaggagctgctgcagttccccctggagctgtgcagcgacagcctgcccagccaccccttccccccagccaaggccatgacagtggagaaggccagccctgtgggagatggcaacttcaggaacagaagtgccccaccctgtgccaacagcacagtgggcgtggtgaagatgacccccctgtccttcatccctggggccaagatcaccaagtacctgggcatcatcaacatgttcttcatccgggagaccaccagcctgcgggaggagggcggcgtgtctggcttcctgcacgccttcatcgccgaggtgtttgccatggtgcgggcccacgtggccgccctgggcggcaatgctgtggtgtcctacatcatgaagcagtgtgtgttcatggagaaccccaacaagaaccaggcccagtgcctgatcaacgtgtctggagatgctgtggtgtttgtgcgggagagtgacctggaggtggtgagcagccagcagcccaccaccaactgccagagcagctgcacagaaggagaggtgaccacctag

SEQ ID NO: 182312 - DNA, 3003 bp, Artificial Sequence
  derived and/or modified sequence
atgcccggcaagctgaaggtgaagatcgtggccggccggcacctgccggtaatggatagggcctctgacctcactgatgcattcgtagaagtgaagttcggcaatacaacctttaagaccgacgtttacctcaagtctctgaatccacaatggaattctgagtggttcaagttcgaagtcgatgatgaggaccttcaggatgagcctcttcagataactgtgctagatcacgatacttatagcgcgaatgacgcaattggcaaagtctatatcgacatagaccctctgctgtattctgaagcagcaacggtgatctctggatggttccctatctatgatactatccatggaataaggggtgaaataaatgtggtcgtgaaagtcgacttgtttaacgatctgaaccgcttcaggcagagcagttgtggggtaaaattcttttgtacgacttcaatacccaagtgttatagagcagtcatcatccacggtttcgttgaggagctggtggtgaatgaggaccctgagtaccaatggatcgatagaattaggactccaagagcttctaacgaggcacggcagaggttgatttccttgatgtcaggtgagctgcagagaaaaatcggtcttaaggtcctggaaatgcgggggaacgccgtagttgggtacctgcagtgtttcgacttggagggggaaagtggtctggttgttcgcgcaatcggaacagcctgcaccctcgacaaattgagtagcccggctgcatttttgcccgcctgcaacagcccatccaaagagatgaaggaaataccatttaatgaggatccaaaccctaatacccattcttccggaccctccacccctttaaagaaccaaacctacagcttctcaccatcaaaatcatattcccgacagagttcttccagcgatacagacctctctctgactcccaaaacaggcatgggcagcggctctgccggcaaagaaggaggcccattcaaagctcttttgcgccaacagactcaaagtgccctggagcagcgcgagttcccattttttacactaactgcattccctcctggctttcttgttcatgtgggtggcgtggtgtcagcccggagcgtaaagctgttagaccggatccataatcccgatgaaccagagactcgggacgcctggtgggccgagattcgacaggaaattaaatctcacgctaaggcattggggtgtcacgctgtagttgggtattctgaatctacaagtatttgcgaggaggtctgcattctgtcagcctctggcacagcagccgtactgaaccctaggtttctgcaagacgggacagtagaaggttgtctggaacagagactagaggaaaatctgcccacacggtgcggattttgccatattccctatgacgaacttaatatgccgttcccggcccacctgacctactgttacaactgccgtaagcagaaggttccagacgtattgtttacaaccatcgacctcccaaccgacgcaactgttatcggtaaaggatgtctgatccaggctagactctgcagacttaagaagaaagcgcaggcagaagcaaacgccacagcgatctccaaccttctcccttttatggagtacgaagttcatacccagctcatgaacaagcttaagctgaaaggaatgaatgcccttttcgggctccgtatccagattacagtcggagaaaatatgctgatgggcttggctagcgcgactggggtgtacttagcagcactccctactcctggtggaatccagatagccggcaagacccccaacgatggatcttatgaacagcacatctcccacatgcagaaaaagataaatgacactattgccaaaaacaaagaattgtacgaaatcaatcctcctgaaatctccgaagagatcattggctcccccataccagaacctagacagaggagcaggctgctacgcagccagtcagagtcctccgatgaggttaccgaactggatctgagccacggcaagaaggacgcatttgtgctcgaaatagacgatacggatgccatggaagatgtgcactcgttgttgacagatgtccctccccccagcggattttacagctgtaacactgaaatcatgcccggaataaataattggacttctgagatacaaatgttcacctctgtcagagttataagactgtcaagcctcaatctgacaaaccaagctctgaataaaaatttcaatgatctgtgcgaaaacttactcaaaagcctttattttaaactgaggtcaatgattccatgctgcctgtgccacgtaaacttcacagtgtccctccctgaggacgagctcattcaggtcacagttacagctgtcgctattaccttcgacaagaatcaggccctacagacaacgaaaactcccgtagagaagtccttgcagcgtgcttccacggataacgaagaattgctccagtttcccctcgagctgtgtagtgatagcctaccttcgcaccctttccctccggccaaggcgatgacagttgagaaagcaagccctgtgggcgatggtaacttcagaaatcgcagcgctcctccctgcgccaattcaaccgtcggggtggtaaaaatgacacctctctcttttatccccggggcaaaaataaccaaatatttaggcatcatcaatatgttcttcatacgcgagacaacttccctgagagaggagggcggggtaagtggcttccttcacgcctttattgccgaggtgttcgccatggtgcgcgcccacgtagccgccctgggaggaaatgcagtggtgagctatattatgaagcagtgtgtcttcatggaaaacccgaataaaaaccaggcacagtgcctgattaacgtgagcggtgatgccgtggttttcgtgagagaatccgatctggaagttgtgagttcccagcaaccaactacaaattgccaatcctcctgcaccgagggtgaggtgaccacgtag

SEQ ID NO: 182313 - DNA, 3003 bp, Artificial Sequence
  derived and/or modified sequence
atgcccggaaagctcaaggtgaagattgtggctgggagacacttgcccgtgatggatcgggctagtgatctgacagatgctttcgtggaagttaaatttggcaataccacttttaagaccgacgtctatctcaagtcccttaaccctcagtggaactcagaatggtttaagttcgaagtggatgacgaagatctgcaggatgagccactgcaaataacggtacttgaccacgacacctattccgcgaatgacgccattggcaaagtttatattgacattgatcctcttctgtattccgaagctgccaccgtaatttctggctggttccctatctacgatacgatccatggcattagaggagagataaacgtggtggtgaaggtagatctttttaatgatctaaacagattcaggcagagtagctgcggggtcaaattcttctgcacgacttccattcccaaatgctatagagctgtgattatccacggtttcgtggaggagttggtggtgaacgaggaccccgaataccagtggatagatcgcatcaggacacccagagcgtccaatgaggcccgtcagaggttgataagtcttatgtcaggagaactgcaacggaaaatcggtcttaaggtactcgagatgcgcggaaacgcagtggtggggtatctgcagtgcttcgacttggaaggcgaaagcggactggtcgttcgcgctattggaaccgcctgcacactcgacaaacttagcagtccagccgcattcttgcccgcttgcaatagcccctctaaggagatgaaggaaatcccgttcaatgaagacccaaaccctaacactcactcgtccgggccttcaacacccctgaaaaatcagacatacagcttctcaccttctaaatcctatagcaggcagtcgtcaagtagcgacaccgacctgagcctcacacccaaaactggtatggggtcagggtccgccggaaaagaggggggaccatttaaagccttactgcggcagcaaacccagtcggcactcgagcagagggagttccccttttttaccctgacggccttccctccgggattccttgtgcacgtcggaggcgtggtttccgcccgatcagtgaaactactggaccgcatccacaatcccgatgaacctgaaacccgggacgcctggtgggcagaaattagacaagagataaagagccacgctaaagctttagggtgtcatgccgtggttggatatagtgaaagcacctccatttgcgaagaagtttgtatcctgagtgccagcggcaccgcagctgtgttgaatcctcgcttcttgcaagacggtaccgtcgaaggctgtttagagcagagactcgaagagaatttgccaacccgatgcggtttctgccacatcccctatgatgagttgaacatgccttttccagcccatctcacctattgttacaactgtagaaaacagaaggtgcctgatgtgctgtttacgacgatcgatttgcccactgatgccacagtaataggtaagggatgtctgattcaggctcgcctgtgtcggctcaagaaaaaagcacaggctgaggcaaacgccaccgcaatttctaacctcttgccatttatggagtacgaagtgcacacacagctcatgaacaagttgaagcttaagggtatgaatgcattatttggtctgagaatccagatcacagtcggagaaaacatgctcatgggtctagcatccgccaccggagtatatctcgccgcactccccacacctggcggaatccagatcgccggaaagactccgaatgatggatcatacgaacagcatatttcccatatgcagaaaaaaatcaatgacaccatagccaaaaacaaggaactctatgaaattaaccctcctgaaatatccgaagagattattggctctcccataccggagccccgacaacgttcccggctgctgcggagccagagcgaatccagcgatgaggtcactgagctggatctatcgcacggcaaaaaggacgcctttgttttggagatcgatgataccgacgcaatggaggacgtacattcgcttttaactgatgtgcctcctcctagcggtttctactcatgcaacaccgagattatgcctgggatcaacaactggaccagtgagatccagatgtttactagtgttcgggtcatcagactgagttccttgaatctcacaaatcaagccttaaataagaattttaacgacttgtgcgagaacttattaaaatcactgtactttaagctgcggtcaatgatcccttgttgtctctgccatgttaattttaccgtgagcttgcccgaagatgagctaattcaggtgacggtcacggccgtggcaattaccttcgataagaaccaggcgcttcaaaccaccaagactcctgttgagaaatcacttcagcgcgcttctaccgataacgaggagttgctgcagttccccctggagctctgttctgacagcctgcctagtcaccccttcccgccagcaaaagcgatgacagtggaaaaagctagccccgtgggtgacgggaattttcgaaacagaagcgcacccccatgtgccaattcaacggtcggcgtggtcaaaatgactcccctgtcattcatcccaggagccaagatcactaaatatctcggtattataaatatgttctttatccgtgagacgacttccctaagagaggaaggaggtgtcagcggttttttgcacgcattcatcgcagaagttttcgcaatggtgcgcgcacacgtggccgctttgggcggtaacgctgttgtgagctatattatgaagcaatgcgtattcatggagaaccctaacaaaaaccaggctcagtgccttataaacgtgtcaggcgatgccgtggtgtttgtgagggagtctgacctggaggttgtaagcagtcaacaacccacgaccaactgccagtcatcctgcactgagggcgaggttacaacatag

SEQ ID NO: 182314 - DNA, 4436 bp, Artificial Sequence
  derived and/or modified sequence
gaacgatcgatgctttcttccgcgccccgagagccgccatttttgagagcgggggaggagagacaagcaggggcggcagaggctcaacgggatgctgactgggttttgcttttcgtcccagccttgtggggccgggacggaagaacccatcaaagcccttcctcccgccgcctctccggaatgaggtctcagcacccgcgcgggacagcacccttcctcctgcgacagagcccaagaagaggccgaaaccgagaccatgccagggaagctgaaggtgaaaatcgtggccgggcgccatttgccagtgatggaccgtgctagtgacctgactgatgccttcgtggaggtaaaatttggtaataccacctttaaaacagatgtgtaccttaagtcactcaaccctcagtggaactcggagtggtttaaatttgaggtggatgatgaagacttacaagatgaacctttacagatcacagttcttgaccatgatacttacagtgcaaatgatgccattggtaaagtgtacattgatattgatcctttactgtatagtgaagctgcaacagtcatctcaggatggtttccaatttatgacaccatacatggtatccgtggggaaatcaatgtagttgtcaaagtagacctcttcaatgatttaaatcgatttaggcagtcatcatgtggagtcaaattcttttgcacaacgtctattccaaaatgctatagagctgtgataattcatggatttgtagaagaacttgtggtcaatgaagacccagaatatcagtggattgatcgaattcgcacaccaagggcatcaaatgaggccagacagagactcatttcgttaatgtcaggtgagctgcagaggaagattggcttgaaagtacttgaaatgagaggaaatgcagttgtggggtacttacagtgtttcgatctggagggcgagtctgggttagtggtgcgagccataggaacggcgtgtactctggataaattaagtagcccagcagcattccttcctgcatgtaattccccatccaaagaaatgaaggagattcccttcaatgaagatcccaatcccaatactcactcatcaggaccctcaacccctctgaaaaaccaaacttattccttttcaccttccaagtcctacagtcgacagtcctcttcttctgacacagatttgagtttgacacccaaaactggaatgggaagtggtagtgctggaaaagaaggggggccctttaaagctcttttaagacaacagactcaatcagcgttggaacagagggaatttccattttttaccttgacggcatttcctcctggattccttgtacacgttgggggtgtagttagtgcacgttctgtgaagcttttggatcgtatccacaatcctgatgaaccagaaactcgagatgcatggtgggcagaaatcagacaagaaataaaatcacatgctaaagcattaggctgtcatgctgtagtgggctacagtgaatcaactagcatctgtgaagaggtctgcattttatctgcatctggcacagcggctgtactgaatcctagatttctgcaggatggcaccgtggaaggctgtttggaacagaggcttgaagaaaatttgcctacacgttgtggattttgtcatataccatatgatgaactgaatatgccatttccagctcatctcacatattgctataactgcaggaaacaaaaagttcctgatgttctgtttacaactatagacctcccaacagatgcaacagttattggaaaaggttgtcttattcaagcaaggttatgtcgcttaaaaaagaaagcacaggcagaagcaaatgctacagctatcagtaatctcttgccatttatggaatatgaagtgcatactcagctaatgaataaactaaaactcaaaggaatgaatgctttgtttggactaagaattcagatcacagtgggtgaaaatatgttgatgggcttagcgtctgccacaggtgtgtatttagcagctttaccaactcctggtggtattcagattgctgggaagactcctaatgatggctcatatgaacaacacatctctcatatgcagaagaagataaatgacacaattgctaaaaacaaagagttatatgaaatcaatcctccagagatatctgaagagattataggatcacccatcccagaacctaggcaacgctcaagacttctaagatctcaatcagaaagctcggatgaagttacagaattagacctttcacatgggaaaaaagatgcttttgttttggagattgatgacacagatgccatggaagatgtccattctctacttactgatgttcctcctccttcaggcttttatagttgtaatacagaaattatgcccggtataaataattggacctctgaaatacagatgttcacttcagtaagagtaatcagattaagcagcctcaacctgactaatcaagctctcaataagaactttaatgatctctgtgaaaatttgctcaagagcctgtactttaaactacgatctatgatcccctgctgcctttgccatgtaaattttacagtatctctgcctgaagatgaattaattcaggttacagtcacggcagtcgcaatcacttttgacaaaaatcaggctttacaaaccacaaaaacccctgttgaaaagtcattgcaaagagcctcaacagataatgaagaacttttacaatttccactggaactgtgttcagattcacttccttctcatccttttccaccagctaaagccatgacagttgaaaaagcaagtccagtgggtgatggaaatttccggaatcgttctgctccaccttgtgcaaattccacagttggggttgttaagatgacacctctttcttttattcctggagcaaaaataactaagtatcttgggataattaacatgttttttattcgagagactacttctcttcgggaggaaggaggagtcagtggttttctccatgcttttattgctgaagtgtttgcaatggtgagagctcatgttgctgcattaggagggaatgctgttgtctcctacataatgaagcagtgtgtcttcatggagaatccaaataaaaaccaggcacagtgtcttataaatgtaagtggtgatgcagtggtttttgttcgtgaatctgacttagaagtggtgtcatctcagcaacctactaccaactgccagtcatcatgtactgaaggcgaagttacaacctgaggaaaattaggaaaaaagagctcaactaaatgaaattcatcaatctctgttattttgtcattaattatcttcttagacttaaaattgaacttgagataaataaggaagaattgagtagatttgatttgcctggagtcttttggaggcatgagaattttctaatcttgacattttgtttgcctgttctagacaggccctgtggggtcttgacccttcagtaagttaagataaatttttaaaagaaccgtagcaaagatggaacctttgtaatttatgttgattttaataaaatcataatttaaaaaatgaaatgggaagattgtcaggaaattaggatagctactctagtataatttagaaaaactaagcaagagattctccagttgctagtgagtaagcactctgatttgagaaatgtgtggggacaatggagaaaagttttcagaaaactgctatgtagatttctgaatgtgttgtattttgctgaggaattcggtaacaactgaaagggaaaagtgcttcagccatcttttgaaaacaagttaaaattctggaacttgtatctgtaatacatcctaactcttgtaaaagaaaataatttatcatagctggtgtcctttcattgaaagttgtaatactgtctctaaggagggaggaaaagattattatataattttataactggcaacatttgagttagtattgactttgtctaaaagaggcttgacttcaactgggataaaaatgtcagtgaattttgttaaagtagtaaaaatgcagttgacttagtaggaacataaaattatttcctaataagataatattgcactcctaccaaataaacaggattttagtaatatctgagggattgttgatggtgagttagactgtatttggcatagaatttggaaatgtaacttgaatgtaaatatgctgcaaaatgttgaatgtatacatagaaagactttttctgtcgacgccaaatgcccgttgtaaatgaaccttaaatattacattcctcctttgcacaataatatttctttataacacttatgattttttcccccaggacaacaaactgcccttaagagtcatttccttgttatcacaggtgtcaatatttttctgtattttgtttataattttattttttaaataaaaagtgtataaaaataaa

SEQ ID NO: 182315 - protein, 607 aa, Artificial Sequence
  derived and/or modified sequence
MWMTPKRSKMEVDEALVFRPEWTQRYLVVEPPEGDGALCLVCRRLIVATRERDVRRHYEAEHEYYERYVADGERAALVERLRQGDLPVASFTPEERAARAGLGLCRLLALKGRGWGEGDFVYQCMEVLLREVLPEHVSVLQGVDLSPDITRQRILSIDRNLRNQLFNRARDFKAYSLALDDQAFVAYENYLLVFIRGVGPELEVQEDLLTIINLTHHFSVGALMSAILESLQTAGLSLQRMVGLTTTHTLRMIGENSGLVSYMREKAVSPNCWNVIHYSGFLHLELLSSYDVDVNQIINTISEWIVLIKTRGVRRPEFQTLLTESESEHGERVNGRCLNNWLRRGKTLKLIFSLRKEMEAFLVSVGATTVHFSDKQWLCDFGFLVDIMEHLRELSEELRVSKVFAAAAFDHICTFEVKLNLFQRHIEEKNLTDFPALREVVDELKQQNKEDEKIFDPDRYQMVICRLQKEFERHFKDLRFIKKDLELFSNPFNFKPEYAPISVRVELTKLQANTNLWNEYRIKDLGQFYAGLSAESYPIIKGVACKVASLFDSNQICEKAFSYLTRNQHTLSQPLTDEHLQALFRVATTEMEPGWDDLVRERNESNP

SEQ ID NO: 182316 - DNA, 1824 bp, Artificial Sequence
  derived and/or modified sequence
atgtggatgacccccaagagaagcaagatggaggtggacgaggccctggtgttcagacccgagtggacccagagatacctggtggtggagccccccgagggcgacggcgccctgtgcctggtgtgcagaagactgatcgtggccaccagagagagagacgtgagaagacactacgaggccgagcacgagtactacgagagatacgtggccgacggcgagagagccgccctggtggagagactgagacagggcgacctgcccgtggccagcttcacccccgaggagagagccgccagagccggcctgggcctgtgcagactgctggccctgaagggcagaggctggggcgagggcgacttcgtgtaccagtgcatggaggtgctgctgagagaggtgctgcccgagcacgtgagcgtgctgcagggcgtggacctgagccccgacatcaccagacagagaatcctgagcatcgacagaaacctgagaaaccagctgttcaacagagccagagacttcaaggcctacagcctggccctggacgaccaggccttcgtggcctacgagaactacctgctggtgttcatcagaggcgtgggccccgagctggaggtgcaggaggacctgctgaccatcatcaacctgacccaccacttcagcgtgggcgccctgatgagcgccatcctggagagcctgcagaccgccggcctgagcctgcagagaatggtgggcctgaccaccacccacaccctgagaatgatcggcgagaacagcggcctggtgagctacatgagagagaaggccgtgagccccaactgctggaacgtgatccactacagcggcttcctgcacctggagctgctgagcagctacgacgtggacgtgaaccagatcatcaacaccatcagcgagtggatcgtgctgatcaagaccagaggcgtgagaagacccgagttccagaccctgctgaccgagagcgagagcgagcacggcgagagagtgaacggcagatgcctgaacaactggctgagaagaggcaagaccctgaagctgatcttcagcctgagaaaggagatggaggccttcctggtgagcgtgggcgccaccaccgtgcacttcagcgacaagcagtggctgtgcgacttcggcttcctggtggacatcatggagcacctgagagagctgagcgaggagctgagagtgagcaaggtgttcgccgccgccgccttcgaccacatctgcaccttcgaggtgaagctgaacctgttccagagacacatcgaggagaagaacctgaccgacttccccgccctgagagaggtggtggacgagctgaagcagcagaacaaggaggacgagaagatcttcgaccccgacagataccagatggtgatctgcagactgcagaaggagttcgagagacacttcaaggacctgagattcatcaagaaggacctggagctgttcagcaaccccttcaacttcaagcccgagtacgcccccatcagcgtgagagtggagctgaccaagctgcaggccaacaccaacctgtggaacgagtacagaatcaaggacctgggccagttctacgccggcctgagcgccgagagctaccccatcatcaagggcgtggcctgcaaggtggccagcctgttcgacagcaaccagatctgcgagaaggccttcagctacctgaccagaaaccagcacaccctgagccagcccctgaccgacgagcacctgcaggccctgttcagagtggccaccaccgagatggagcccggctgggacgacctggtgagagagagaaacgagagcaacccctag

SEQ ID NO: 182317 - DNA, 7439 bp, Artificial Sequence
  derived and/or modified sequence
gcttgcgcgttagagatcgctgtccgctcttcctattggttcgtttttaggagctcggggaatacgaaatatccagccaataggagcagagatgccggaaccgggcttgtgtgcctctgctgaggtgatctggcgcagagcggaggaggtgcttggcgcttctcaggctcctcctctccccttgcggcctttctaacgttggccctgctcttgtggcctcccgcagaatgtggatgacgcccaaaagaagcaagatggaagtcgacgaggctctagttttccggcccgagtggacccagcgttatttggtggtggagcctccggagggcgatggggccctgtgcctggtctgtcgccgcctcatcgtagctacccgcgaacgcgacgtcaggcgccactacgaggctgagcacgaatactacgagcggtatgtggcggacggcgagcgcgcggccctggtggagcgtctgcgtcagggcgacttgcccgtggcctccttcactcctgaagagagagctgctcgtgcaggcctcgggctctgccgcctcttggccttgaagggtcgcggctggggtgagggggactttgtataccagtgcatggaggtgttgctgagagaggtactgcccgagcatgtaagcgtcctgcaaggcgttgacttatctccagatatcacaaggcagaggatcctgagcattgacaggaatctacgcaaccagctttttaaccgagccagggactttaaagcctattctcttgccttggacgaccaggcttttgtggcctatgagaactacctcctggtctttatccgcggtgtaggccctgagttggaggtgcaagaagatcttctgaccataatcaacctgactcatcatttcagtgttggtgcgctcatgtcggcaatcctagagtccctgcagacagcagggcttagcttgcagagaatggttggactgaccacgacccatactttgaggatgattggtgagaactcaggactcgtctcatacatgagagaaaaggccgtaagccccaactgttggaatgtcattcattattcaggatttcttcacttggaactgttgagctcctatgatgtagatgttaatcagatcataaataccatatccgaatggatagttttgattaagaccagaggcgttaggcgacctgaatttcagactttactaacggaatctgaatcagagcatggtgaaagggttaatggacgatgtctgaacaattggcttaggagagggaaaactttaaaactaatattctctctaagaaaagaaatggaagcgttcttggtttcagtaggggcaacaacagtccacttctcagacaaacaatggctttgtgactttggcttcttggtggacattatggaacaccttcgagaactcagtgaagaattacgagttagtaaagtctttgctgctgctgcctttgaccatatttgtactttcgaagttaagctgaatttatttcaaagacatattgaggaaaaaaatctaacagactttcctgccctcagagaagttgttgatgagctaaaacagcaaaataaggaagatgaaaaaatatttgatcctgataggtatcaaatggtgatctgtcgtctccaaaaagaatttgagagacattttaaggacctcaggttcattaaaaaggacttagaacttttttcaaatccatttaactttaaacctgaatatgcacctatttcagtgagggtggagctaacaaaacttcaggcaaacactaatctttggaatgaatacagaatcaaagacttggggcagttttatgctggattgtctgctgaatcctacccaattatcaaaggggttgcctgtaaggtggcatccttgtttgatagtaaccaaatctgtgaaaaggctttttcatatttgactcgaaaccaacacactttgagtcagccattaacagatgagcatctccaagccctgtttcgggttgccacaactgaaatggagcccggttgggatgaccttgtgagagaaagaaatgaatctaatccataaggctttgtagtacaagattgaaaaactcaacaagaatttaattctaaaagcaaaaattggtttgagttttcaagtttactaatttggattgtgagaaagtaccaagtaccagccgtccaaactgatcacaattaaaattctgacagttgccttttttttcatctcaaatggcagcatgggactgaaacatgagaatgccaccttttttaaaacttagtttagtgacaaagtcattgtcttttatgatatagttaattttaaagagatttagtattaatgtgagttgaatttgcagtctgttttttaggtgttctgaagataaatgccaaaaatttcagctcttattttaatggagtgttaaaattctgattcatatagtcttaaattatcaactccttaaatgtgcttttgaaccaatttgcagaagctcacatagcaagttcataagtttccaaaaaggaagcccatacataacagtggaggtgttttgtctaaccatcaaaatgtttgagacttttttttaaacatttctgagttcgaaggtaatactgacagatttcttccctcttccctccccatcacccacctcagtgataacacattactgatagaggaagtcattagaatcatttttaagtttcagatataggagacttcatgcaatttggagataagactaattattgggggttttccttggattttttttttaataactgggggctattttatcagcttgcctattaaaggactatggtaagtatagaatcttaatggttgccagttagtaattctttttttttttttttttactgtagacacaagtttggccctatcaaaaacgatgaggaaaaaagattgcactccaggattaggaggtgtgagatattttagcttttttgtcttatctgcgtgggtattgctgctttattttaaaaaatcctgcctaaagtaaacactttgttttaaaatgatacagtatcagattttgttagatgctagaaatggatttattctaaaatttggaactgtcgtacacattctatatgtaagatagcacacaagtagaaatatttaaaagcagtcttattcacagattgcagtaattctgtatttctactaagataatctgctttgtgccaaaacagtaatttccaaacttctgttcaccatgaaaaggcaatcttaaagttcattatgtaaaactaattataaacaggacccaatttatattcatagatcctctcaagtattatacaatttaaaaactcttgttccaaagtcctgtcttaactattgaaacaccttaatctgtggttactaatccagcaaattcaaggaaccaggctatgactaagaatttaggtggaattgatgtctgggcaattaaaataaatggcataagagcttaaaaaccaaagttgtgccagtggctttcaactagaggcagtaacctgtcattccagaggatgctgagaaatgtgtaggggcacttttttggttgtcatatttactaggggcttctgttggcatttaagcctaaagacactcacccctgcagtgcatgggacagcctggcacaatgaagaattagccctcccaaaatgtagattattttatttcaagggatagggcagattaccattagaagcaaaattaaaagtacaagctgggcaaactgacagaatactagataggagagactaattccaaccttctaaatttggctagtaaagtgcaataaaggcattgataagttctgttagctcaccatagcacttgtaaatcaggaattaataattgaatcagatttaagggctctgtcctgttatacatatttaaggcagaaaaaaagttacatgtcgattaggtacttatcaagaatggtcaagctgagattttggttaatagagtaagcttacatatctagagaaacaacatagtggaaaaccgaaaaaaaaaaacagaaaaatctaccggtaatttcccaatagctttgaatattcacagcagagctttattacttgagagaaagactggaagacctgaaagccacttctgctttctaaccccagttccttaaatattgaaatcttgtacattttgtgaaattccagtatgttttgcttaaggtgttaataaaattagtttgcatcatgtagtcattgagtgagggggagatataagccaaggattttaaattgacccttagctatagagaatttgctataagctagtcttgtttgtaaaaaaaaaaaaaaaaaaagaaaaagaaaaaagtgtattttactgttttctgtattaagtaattctgtaactgcatggcagtctttttttttttaaataaatatagttgttactggtcctgttgtagcagtgaatatagttaaaatacgtacattaaaaaaaaaattattaggtccttaccagttactgtcctatagctcattcctactagttttcttgacagatttgtattcccagtgtcccgtattgccactcaaattgctctactatgctaagtccttgttaatagtcttaccctccttgaaacacttgaacacttgatgactttagctttgaggagataccatctccaggtgtgctttcttagtctttgcaggcacctcttcccttcaatatctgttcttcgtatttttaaaaaaatttgttttagactgccttgttctgtgtcagctcgctagctgatctcatttccttccatggtttccttaccatttatatgcaaatgactgtcagattcatatctcctttctagatcttccctaattgatgtatctaattgctaacaaatgctctttgctgtctcaggcactacatgtcattgatcttgcccccaatcctgctcctcctctcatgtttcctctttgactaaatggcattaccactaccaaccattcatttgtcctttttaccaattctccaatgctgccattttaattcaggccatcaacctacctaaattatagcaacagcctccttattagtctccctgttttttatttttattcctttctacactacaaccaaattgctccaaaagacttactgatcatgtcactgcattgctttcaccattgctcttagggtacaatacaaatttatcttcatctttaaggtctcagtatgccacttcatctaggaaaccttcattgatgccctctagattaggtgcccttactatccattccctatacaccctgttctttcccagacatacacttggcacactttattgttactgcttattgatcactgctagactgtaagctttgtaagggcagggaccatataagccttgttcactgttatatctctagtgcttagcacaatgcctggcatttcaataaatgtttggacaaacgaatatttgtgtagtgttttacaatttttgaagctctttcacagtcttatttgaccttcacagtcattctgccttagactgtccattgggtaacttttatccacatattactaattgaaaaatgaagacaagttctttgtaactagggacctcgttgtattctcagaatttagtgtagtgcttagcatgtgacttaaatatgtattatgtgactgttaaacaaattgtggttttctctgttgtatgaaaggagagaaggataacaaattgcggttttccctggtaaacacagtaagtagtaaactcaggattcaaaaccaaatatacacaccaaatccactatgtaatattaagtttgcatatccatgtatagaatcttatttttttttaccctttgtaaacagtgtcatatatatatatatattttttttttttttttaaatttccaaaggaacctacatatagagggaaaagattagacaactacttagtgaactaaaacaatatgtttttactaaatgttacatttagtattggaaaaagataatgccgcctaagagttaataatcatttttccttttgtaggcatcaacactaggagaaaatggcatgctatttacttgctactttcctttacagatgatttttggctcttctgggatttaaaagtaagtaaatttaacaaagtagaagactgactcagcccttctggtcactatatattcagttcacttgtttttacacctgcagaatgtccttatcacccaaagggagatgacccaaaagtgacatctagttaatgtatacttctaaagtttgctgtattcctttgccttcttgttcccatgcctctctgaacttaatttctgggtaactgaggcttttcaggcttaggtgggaaagccacacccttagtctgtttccttaagccattttgaccaatttatgggattaactagtataatcttagttggagttttagtctgaggcatattaagtcattcagagatcttaacagtaggtgtcatagtcatccagtgatttggtgcttgctgcaaaactggcttttttttttttttttttttttgaggcggggtctcactttgtcacccaggctggagtgcagaggtacaatctcagctcaatgcaatctctgccttcctggctcaagcaattctcccactgcagcctcctaagtagctgggaatacaggtatacacgagtacacccagctaatttttgtatttttatgtggagacagggtcttgctgtattccccaggctagtctcgaattcctggactcaagcagtccgcccgcctcgggctcccaaaatgttggtgttatacgtgtgagcctctgcacccggcggcaaaactggcttttaatcaaccttttggctaaaggatttctctttttatttatttgtaaaaggatttcccatttttatctttctttttgatattaaaatgttgcctcatcctacccagtaagtacttgaatttgaattctcttccttttcatttttgcctgcaaactgaccagtcttttctgagttcatctcttctgtacgttttgtcaagtgcagtgaacagcaactacaaaatattttgtttttctgtctttttctttagtaaagggtagatgatctgcctttcaggttatctcaaggggcagtttcacctttccataatataaattacccttgtgtaagttatttcttccatcttctgatagcaatttcctgaatgcctgccagctaaccattaagccagtgttcagtattttagcattttaaaaaacaagggaccaatttctgtgtcagcatgggctagcttgccattgaataacaaaggcaaaatctcactgtctcacacaacttttctattgcaacttgcctagggactttggtttagatcataggttggccatgatcaaactatggtccatgggcaaaatctgtctagctccttatttatctaaataaagttttactggaatata

SEQ ID NO: 182318 - DNA, 1824 bp, Artificial Sequence
  derived and/or modified sequence
atgtggatgacaccaaaacgctcgaaaatggaggttgacgaggcactggtcttccgccccgagtggacccagcgatacctagtggttgagccacccgagggagacggagctttgtgcctggtttgccgacgcttgatagtggcgacacgagaaagggatgtgagaaggcactatgaagccgaacacgagtattatgagcgctatgttgctgacggcgaacgggctgccctggttgaaaggctgagacagggagatctccccgtagcctcctttactccggaagagagggctgcgagggccgggttggggctgtgccggctgctggctctgaaaggtcggggctggggcgaaggcgattttgtgtatcagtgcatggaagtgcttctgcgagaagtcctgcccgagcacgtctctgtgctccagggtgttgacctgtcccccgatatcactcggcagcgcatcctgtcaattgataggaatctccggaaccaactgtttaacagagcacgggatttcaaggcctactctctcgcactggacgaccaggcgttcgtggcatacgagaactacctgctggtgttcattagaggcgtcgggccggagttggaagtccaggaggacctgcttacgattatcaacctaacccaccattttagcgttggcgccctgatgtcggccatactggaatccttacaaacagcaggactctctctccaaaggatggtcggacttacaacaacgcacacactgcggatgatcggtgagaattcaggattagtgtcctacatgcgtgaaaaagccgttagccccaactgttggaatgtgattcactactccggtttcctccacctggaacttttgagctcttacgatgtcgatgtgaatcagattattaataccatcagtgagtggattgttctgataaagacacgcggagtccgccgccccgaatttcaaaccctgcttaccgagtccgagagtgagcacggggaaagagtcaacggccgctgcctgaataattggctgcggcgcggaaagactttaaaactcattttttccctcagaaaggagatggaggccttcctggtcagtgtgggggccaccactgtgcatttcagtgataagcaatggctatgtgattttggcttcctggtcgacatcatggagcacttgcgcgagctcagcgaagaactgagggtgagcaaggtgttcgccgcagccgcttttgatcatatttgcactttcgaggtcaaattaaatctctttcagcgccatatagaggagaaaaaccttaccgattttcccgctctgcgcgaagtcgtagacgagcttaaacaacaaaataaggaggacgaaaaaattttcgaccccgaccgatatcagatggttatttgcagactgcagaaggagttcgaaaggcactttaaagacctccgcttcatcaagaaggacctggaattgttttctaatccattcaatttcaaacccgagtacgcacctatttctgtgagagtggagctgacaaagcttcaagcaaacactaacttgtggaatgagtatagaataaaggatttggggcagttctacgccggcttatctgccgagtcatatcccatcatcaaaggcgttgcgtgtaaggtggcgtccttatttgactctaaccagatttgcgaaaaggccttctcctatttaacacgaaaccaacatacgctttctcaaccgttaaccgatgagcacttacaggctctcttccgggttgcgacgacggagatggagccaggttgggatgacctggtccgggaacggaatgaatctaacccctag

SEQ ID NO: 182319 - DNA, 1824 bp, Artificial Sequence
  derived and/or modified sequence
atgtggatgacccccaagaggagcaagatggaggtggatgaggccctggtgttccggcctgagtggacccagcgctacctggtggtggagcccccagaaggagatggagccctgtgcctggtgtgcagaagactcatcgtggccacccgggagagagatgtgagaagacactatgaggccgagcacgagtactatgagcgctacgtggctgatggagagagagctgccctggtggagcggctgcggcagggcgacctgcctgtggccagcttcaccccagaggagagagctgcccgggccggcctgggcctgtgccgcctgctggccctgaagggccggggctggggcgagggggactttgtgtaccagtgcatggaggtgctgctgcgggaggtgctgcctgagcacgtgtctgtgctgcagggcgtggacctgagcccagacatcacccggcagaggatcctgagcattgacaggaacctgaggaaccagctgttcaacagagcccgggacttcaaggcctacagcctggccctggatgaccaggcctttgtggcctatgagaactacctgctggtgttcatccggggcgtgggccctgagctggaggtgcaggaggacctgctgaccatcatcaacctgacccaccacttctctgtgggcgccctgatgtctgccatcctggagagcctgcagacagctggcctgagcctgcagaggatggtgggcctgaccaccacccacaccctgaggatgattggagaaaattctggcctggtgtcctacatgagggagaaggctgtgagccccaactgctggaatgtcatccactacagcggcttcctgcacctggagctgctgagcagctatgatgtggatgtgaaccagatcatcaacaccatcagcgagtggatcgtgctgatcaagacccggggcgtgcggcggcctgagttccagaccctgctgacagaaagtgaaagtgaacatggagagcgggtgaatggccgctgcctgaacaactggctgcggcggggcaagaccctgaagctgatcttcagcctgaggaaggagatggaggccttcctggtgtctgtgggcgccaccaccgtgcacttcagtgacaagcagtggctgtgtgactttggcttcctggtggacatcatggagcacctgcgggagctgtctgaggagctgcgggtgtccaaggtgtttgctgctgctgcctttgaccacatctgcacctttgaggtgaagctgaacctcttccagaggcacatcgaggagaagaacctgacagacttccctgccctgcgggaggtggtggatgagctgaagcagcagaacaaggaggatgagaagatctttgatcctgaccgctaccagatggtgatctgccgcctgcagaaggagtttgagcggcacttcaaggacctgcgcttcatcaagaaggacctggagctgttcagcaaccccttcaacttcaagccagaatatgcccccatctctgtgcgggtggagctgaccaagctgcaggccaacaccaacctgtggaatgagtaccgcatcaaggacctgggccagttctacgccggcctgtctgctgagagctaccccatcatcaagggcgtggcctgcaaggtggccagcctgtttgacagcaaccagatctgtgagaaggccttctcctacctgaccaggaaccagcacaccctgagccagcccctgacagatgagcacctgcaggccctcttccgggtggccaccacagagatggagcccggctgggatgacctggtgcgggagagaaatgaaagcaacccctag

SEQ ID NO: 182320 - DNA, 1824 bp, Artificial Sequence
  derived and/or modified sequence
atgtggatgacccccaagcggagcaagatggaggtggacgaggccctggtgtttcgacccgagtggacccaaagatacttggtcgtggagcctccggaaggggacggcgccctctgccttgtctgtcgtcgcctgatagtcgcaaccagggagagagacgtacgacgccactacgaagctgagcatgaatattacgaacgttacgtggctgacggcgaaagagccgccctggtcgagcgcctccggcaaggggatctccccgttgcttcattcactccagaagagagagctgcccgcgcaggactcggcctgtgccggcttctggcactgaaaggacgggggtggggcgaaggagactttgtgtaccagtgcatggaagtgcttctgcgagaggtcttgccagaacacgtgagcgtgctccaaggagtggacttgagtcccgacatcacgcgccagcggattctctctattgaccgcaatctgagaaaccaattgttcaatagagctcgggattttaaggcatacagcctcgctctcgatgaccaggccttcgtggcctacgaaaactatctgctggtgtttataaggggggtcggaccagaattggaggtgcaggaggacctgcttaccatcatcaacttaacccaccatttcagtgtaggtgctctaatgagtgcaattttagagtccttacagaccgcaggactatccctccagagaatggtaggcctgacaaccacccacaccttgcgcatgatcggtgagaatagcggattagtgagctacatgcgcgaaaaagccgtcagccccaactgctggaatgtgatccattacagtggttttttgcatttggagcttctctcatcttacgatgtagacgtgaaccagattataaacacaatttctgagtggattgtgttaattaaaaccaggggggttaggcggccggagttccagactctgctgacagagtctgaaagcgagcatggagaaagggttaacgggcgttgtttgaacaactggctccgtcgaggcaaaactttaaagcttatattcagcctgcgaaaggagatggaggcctttttagtgtcagtaggggctaccactgtgcacttttccgacaagcaatggctttgtgactttggattccttgtggatattatggaacacttgagggaactctctgaggaattaagggtcagcaaggttttcgccgctgccgcgtttgaccatatatgtacattcgaagttaagcttaacctgttccaacgccacatcgaggagaagaacctgacagattttcccgccctccgagaggtcgtcgatgagctcaagcagcaaaataaagaggatgaaaagatcttcgaccccgatagatatcagatggttatctgtaggctccagaaggaattcgaaagacacttcaaggatttgcggttcattaaaaaggaccttgagctcttttccaacccattcaacttcaagcccgagtatgccccaatcagcgtacgcgtggagctcacaaagctccaggccaataccaacctctggaatgaataccgaatcaaggacctaggccagttctacgctggcctgagtgctgagagctaccccatcatcaagggagtggcctgcaaggttgcaagcctttttgattctaaccagatctgtgagaaggcgttcagttacctgacacgaaaccagcacaccttgagtcagccgctgacagacgagcacctccaggctcttttcagggttgcaaccacagaaatggagccggggtgggatgacctcgtgagagagcggaatgagtcaaacccctag

SEQ ID NO: 182321 - DNA, 1824 bp, Artificial Sequence
  derived and/or modified sequence
atgtggatgacacccaagcggagcaagatggaggtagacgaggccctggtgtttcggccagaatggacacagcggtacctcgtcgtggagccaccggagggcgacggtgctttgtgtctcgtctgccgcaggctcatcgtagcgacgagagaacgcgacgttcgccgacattacgaagcagaacacgaatattatgaacgttatgtagccgacggggagagggctgccctggttgagcgcttacgacagggagacctgcctgtggcgagttttactcccgaggaaagagccgctcgggcagggttgggcttgtgcaggctgctggccctcaagggaaggggatggggtgaaggggactttgtttaccagtgcatggaagtcctgctgagggaggtgttgccagagcacgtcagtgtactgcagggggtcgacctttctcctgacatcacaagacagcgtatactaagcattgataggaatctgagaaatcaattgttcaaccgagctcgcgactttaaggcttatagccttgcgctcgatgaccaagccttcgtggcttatgagaattacctgctggtgtttattaggggcgtgggaccagagctggaagtgcaagaagacctcctgactatcatcaatctgacacatcacttcagcgtgggcgctctgatgtctgcgatcctggagtcccttcagacggccggactgtcactccagaggatggtggggctgacaactactcacacattgcgaatgataggagaaaattccggcctggtgtcttacatgcgcgaaaaagccgtttcccctaattgctggaacgtcatccactactccggttttctgcatctcgagttgttaagttcgtatgatgttgatgtgaatcaaattatcaacaccatctccgagtggattgtgctcatcaagacccgcggtgtgaggcggccagagttccagactctcctcactgaaagcgaatcggaacacggcgaacgcgtgaatggaagatgtctgaacaactggcttcgtcggggaaaaacgttaaagctgatcttcagtctcaggaaggagatggaagccttcctggtgtcagtaggcgcaaccactgtgcacttttcagataaacagtggctctgcgactttgggttcctggttgacataatggaacatctccgggaattgtctgaggagctgagggtgtcaaaggtgttcgcagccgcagcatttgatcacatatgtacttttgaggtcaagttaaacctgtttcagcgacatatcgaggaaaaaaatctcaccgattttccagccctcagggaggtggttgacgagttgaagcaacaaaataaggaagatgagaaaattttcgaccctgatcgatatcagatggtcatttgtcggctacaaaaagaattcgagagacacttcaaggacctgcgcttcattaagaaggacctggagctgttctctaaccccttcaatttcaagcccgagtatgcgcctattagcgtgcgcgttgaacttacaaagctgcaggctaatacaaacctttggaacgaatataggattaaggatctcgggcagttttacgccggactgagtgccgaatcatatcccattattaagggggtcgcatgtaaggtggcatccctgtttgacagcaatcagatttgtgagaaggccttttcctatctgactcgcaatcagcacaccttgtcccagccactgaccgatgagcaccttcaggccctttttagagtggccactaccgagatggaacccggatgggatgacttggtgagagagaggaacgagtcaaatccttag

SEQ ID NO: 182322 - protein, 1054 aa, Artificial Sequence
  derived and/or modified sequence
MGEIEGTYRVLQTAGMRLGAQTPVGVSTLEPGQTLLPRMQEKHLHLRVKLLDNTMEIFDIEPKCDGQVLLTQVWKRLNLVECDYFGMEFQNTQSYWIWLEPMKPIIRQIRRPKNVVLRLAVKFFPPDPGQLQEEYTRYLFALQLKRDLLEERLTCADTTAALLTSHLLQSEIGDYDETLDREHLKVNEYLPGQQHCLEKILEFHQKHVGQTPAESDFQVLEIARKLEMYGIRFHMASDREGTKIQLAVSHMGVLVFQGTTKINTFNWSKVRKLSFKRKRFLIKLHPEVHGPYQDTLEFLLGSRDECKNFWKICVEYHTFFRLLDQPKPKAKAVFFSRGSSFRYSGRTQKQLVDYFKDSGMKRIPYERRHSKTHTSVRALTADLPKQSISFPEGLRTPASPSSANAFYSLSPSTLVPSGLPEFKDSSSSLTDPQVSYVKSPAAERRSGAVAGGPDTPSAQPLGPPALQPGPGLSTKSPQPSPSSRKSPLSLSPAFQVPLGPAEQGSSPLLSPVLSDAGGAGMDCEEPRHKRVPADEAYFIVKEILATERTYLKDLEVITVWFRSAVVKEDAMPATLMTLLFSNIDPIYEFHRGFLREVEQRLALWEGPSKAHTKGSHQRIGDILLRNMRQLKEFTSYFQRHDEVLTELEKATKRCKKLEAVYKEFELQKVCYLPLNTFLLKPIQRLLHYRLLLRRLCGHYSPGHHDYADCHDALKAITEVTTTLQHILIRLENLQKLTELQRDLVGIENLIAPGREFIREGCLHKLTKKGLQQRMFFLFSDMLLYTSKGVAGTSHFRIRGLLPLQGMLVEESDNEWSVPHCFTIYAAQKTIVVAASTRLEKEKWMLDLNSAIQAAKSGGDTAPALPGRTVCTRPPRSPNEVSLEQESEDDARGVRSSLEGHGQHRANTTMHVCWYRNTSVSRADHSAAVENQLSGYLLRKFKNSHGWQKLWVVFTNFCLFFYKTHQDDYPLASLPLLGYSVSIPREADGIHKDYVFKLQFKSHVYFFRAESKYTFERWMEVIQGASSSAGRAPSIVQDGPQPSSGLEGMVRGKEE

SEQ ID NO: 182323 - protein, 134 aa, Artificial Sequence
  derived and/or modified sequence
MGEIEGTYRVLQTAGMRLGAQTPVGVSTLEPGQTLLPRMQEKHLHLRVKLLDNTMEIFDIEPKCDGQVLLTQVWKRLNLVECDYFGMEFQNTQSYWIWLEPMKPIIRQIRRPKNVVLRLAVKFFPPDPGQLQEE

SEQ ID NO: 182324 - DNA, 3165 bp, Artificial Sequence
  derived and/or modified sequence
atgggcgagatcgagggcacctacagagtgctgcagaccgccggcatgagactgggcgcccagacccccgtgggcgtgagcaccctggagcccggccagaccctgctgcccagaatgcaggagaagcacctgcacctgagagtgaagctgctggacaacaccatggagatcttcgacatcgagcccaagtgcgacggccaggtgctgctgacccaggtgtggaagagactgaacctggtggagtgcgactacttcggcatggagttccagaacacccagagctactggatctggctggagcccatgaagcccatcatcagacagatcagaagacccaagaacgtggtgctgagactggccgtgaagttcttcccccccgaccccggccagctgcaggaggagtacaccagatacctgttcgccctgcagctgaagagagacctgctggaggagagactgacctgcgccgacaccaccgccgccctgctgaccagccacctgctgcagagcgagatcggcgactacgacgagaccctggacagagagcacctgaaggtgaacgagtacctgcccggccagcagcactgcctggagaagatcctggagttccaccagaagcacgtgggccagacccccgccgagagcgacttccaggtgctggagatcgccagaaagctggagatgtacggcatcagattccacatggccagcgacagagagggcaccaagatccagctggccgtgagccacatgggcgtgctggtgttccagggcaccaccaagatcaacaccttcaactggagcaaggtgagaaagctgagcttcaagagaaagagattcctgatcaagctgcaccccgaggtgcacggcccctaccaggacaccctggagttcctgctgggcagcagagacgagtgcaagaacttctggaagatctgcgtggagtaccacaccttcttcagactgctggaccagcccaagcccaaggccaaggccgtgttcttcagcagaggcagcagcttcagatacagcggcagaacccagaagcagctggtggactacttcaaggacagcggcatgaagagaatcccctacgagagaagacacagcaagacccacaccagcgtgagagccctgaccgccgacctgcccaagcagagcatcagcttccccgagggcctgagaacccccgccagccccagcagcgccaacgccttctacagcctgagccccagcaccctggtgcccagcggcctgcccgagttcaaggacagcagcagcagcctgaccgacccccaggtgagctacgtgaagagccccgccgccgagagaagaagcggcgccgtggccggcggccccgacacccccagcgcccagcccctgggcccccccgccctgcagcccggccccggcctgagcaccaagagcccccagcccagccccagcagcagaaagagccccctgagcctgagccccgccttccaggtgcccctgggccccgccgagcagggcagcagccccctgctgagccccgtgctgagcgacgccggcggcgccggcatggactgcgaggagcccagacacaagagagtgcccgccgacgaggcctacttcatcgtgaaggagatcctggccaccgagagaacctacctgaaggacctggaggtgatcaccgtgtggttcagaagcgccgtggtgaaggaggacgccatgcccgccaccctgatgaccctgctgttcagcaacatcgaccccatctacgagttccacagaggcttcctgagagaggtggagcagagactggccctgtgggagggccccagcaaggcccacaccaagggcagccaccagagaatcggcgacatcctgctgagaaacatgagacagctgaaggagttcaccagctacttccagagacacgacgaggtgctgaccgagctggagaaggccaccaagagatgcaagaagctggaggccgtgtacaaggagttcgagctgcagaaggtgtgctacctgcccctgaacaccttcctgctgaagcccatccagagactgctgcactacagactgctgctgagaagactgtgcggccactacagccccggccaccacgactacgccgactgccacgacgccctgaaggccatcaccgaggtgaccaccaccctgcagcacatcctgatcagactggagaacctgcagaagctgaccgagctgcagagagacctggtgggcatcgagaacctgatcgcccccggcagagagttcatcagagagggctgcctgcacaagctgaccaagaagggcctgcagcagagaatgttcttcctgttcagcgacatgctgctgtacaccagcaagggcgtggccggcaccagccacttcagaatcagaggcctgctgcccctgcagggcatgctggtggaggagagcgacaacgagtggagcgtgccccactgcttcaccatctacgccgcccagaagaccatcgtggtggccgccagcaccagactggagaaggagaagtggatgctggacctgaacagcgccatccaggccgccaagagcggcggcgacaccgcccccgccctgcccggcagaaccgtgtgcaccagaccccccagaagccccaacgaggtgagcctggagcaggagagcgaggacgacgccagaggcgtgagaagcagcctggagggccacggccagcacagagccaacaccaccatgcacgtgtgctggtacagaaacaccagcgtgagcagagccgaccacagcgccgccgtggagaaccagctgagcggctacctgctgagaaagttcaagaacagccacggctggcagaagctgtgggtggtgttcaccaacttctgcctgttcttctacaagacccaccaggacgactaccccctggccagcctgcccctgctgggctacagcgtgagcatccccagagaggccgacggcatccacaaggactacgtgttcaagctgcagttcaagagccacgtgtacttcttcagagccgagagcaagtacaccttcgagagatggatggaggtgatccagggcgccagcagcagcgccggcagagcccccagcatcgtgcaggacggcccccagcccagcagcggcctggagggcatggtgagaggcaaggaggagtag

SEQ ID NO: 182325 - DNA, 4051 bp, Artificial Sequence
  derived and/or modified sequence
ggggtcagggcggggcgcgctgcgcgggggctgccggcgggcagttgggagcaggcgacgccgacgcgagtctggcggctgctgcttgcgactgcggaggccgggcgaggccggtgaggacgcggcgggcgagcgagaggccgaggtgttttcttcactcatggtgaagaatgggggagatagaaggaacatacagagtcctgcagactgcagggatgcgcttgggtgcccagacccctgtgggagttagcacccttgagcctgggcagactctcttgcccagaatgcaagagaagcacctgcacctcagagtaaagctgctggacaacaccatggaaatatttgacattgagcctaaatgcgatggccaggtattactgacacaagtgtggaagcgtttaaacctggtagaatgtgactacttcgggatggagtttcaaaatactcagtcctactggatttggcttgaacctatgaaacccatcattaggcaaatacgaaggccaaagaatgtggtgcttcgcctagctgtaaaattttttccacctgatcctggtcagctacaagaagaatatacaagatacttgtttgccttgcaacttaagagagacctgctggaagagcgtttgacctgtgctgacaccacagcggcccttctcacgtcccatctcctgcagtcggaaataggagattacgatgaaacgctggaccgagagcacctcaaagtgaacgagtatttgcctggccagcagcactgccttgagaagatactagaattccatcagaagcacgtgggccagacacctgctgagtcggatttccaggtgctcgaaattgctcgaaagttggaaatgtacggcatcagatttcacatggcttctgacagggaaggaaccaagattcaactggcagtttcccacatgggtgtactcgtgttccagggcaccaccaaaatcaacactttcaactggtccaaggtccgtaaactaagcttcaagaggaaaagatttcttatcaaacttcatccagaggttcatggaccttaccaggacacattagaatttttgttgggtagtagagatgaatgtaagaacttctggaagatttgtgtggagtatcacaccttttttagacttttggaccaacctaagccaaaagcaaaagccgtcttcttcagccggggctcctccttcagatacagtggaagaactcagaaacaactagtagattatttcaaagacagtggaatgaagagaattccatatgaaagaaggcacagcaagacccacacgtccgttcgagctctgactgcagacctaccaaaacagagcatctcattccccgagggattgaggactcctgcctccccatcttcagcgaatgccttttactcgctctctccctccactctggtcccctctggcctgccagagtttaaggacagcagcagctccctcacagatccccaggtttcctacgtcaagagtccagctgcagagaggcgcagtggagcagtggctggaggccccgacacaccatcggcccagcccctcgggccccccgcactccagcctggtccaggcctttccacgaagagtcctcagccttctccctccagccggaagagccccctgagtctgagccctgcatttcaggtgcctttgggcccagctgaacagggctcatccccactcctgagccctgtcctcagtgatgctggcggagccgggatggactgcgaggagcccagacacaagcgcgtgcctgcagacgaggcctacttcatagtcaaagagattctcgctacagaacgaacatacctcaaggatttagaagttattaccgtgtggttccgcagcgcagtggtgaaggaggacgccatgcctgcgactctgatgacgctgctcttctccaacatcgatcccatctatgagttccacagaggcttcctgcgcgaggtggagcagaggctggcactctgggaagggccctccaaagcccacacaaaaggcagtcatcaacgaatcggggacatcctgctcaggaacatgcgccagttaaaggagtttaccagctacttccaaagacatgacgaggtcctaacagaactggaaaaggctaccaaacgctgtaagaagttggaggcagtgtacaaggagtttgagctgcagaaggtctgctacttgcctctcaacacgttcctgctgaagcccatccagcggctgctgcactaccgcctgctgctgcgccgcctatgcggacattacagccccgggcaccatgactacgctgactgccatgacgccctgaaagccatcacagaggtgaccaccacactacagcacattctcatccggctggagaacctgcagaagctaacggagctgcagcgggacctggtgggcatagagaacctcattgctcctggcagggagttcatccgtgagggctgccttcacaagctcaccaagaagggcctgcagcagaggatgttttttctgttctcagatatgttgctgtacacaagcaaaggagttgcagggaccagccacttccggatccggggcctccttcccctccaaggcatgctggtggaagaaagtgataacgagtggtctgttccacactgtttcaccatctacgcggctcagaaaacaatcgtggtggcagccagcactcggctggagaaagagaagtggatgctggacctgaactccgcgatccaagcagccaagagtggcggtgacacggcccctgcactgccaggccgcactgtgtgcactcgtccccccagatcccccaacgaggtatctctggagcaggagtcagaagatgatgctcggggtgtccgcagctccctggaggggcatggccagcaccgggccaacaccacaatgcacgtgtgctggtaccggaacaccagcgtgtccagggcagaccacagtgcagctgtcgagaaccagctttcaggatatctgctaagaaagttcaaaaacagtcatggctggcagaagctctgggtcgtctttaccaacttctgtttgttcttctacaaaactcatcaggatgactacccactggccagcctcccgctgctgggctacagcgtgagcatccccagggaggccgatggcatacacaaagactatgttttcaagctccagttcaaatcccacgtctacttcttccgggctgagagcaagtacacatttgaaaggtggatggaggtgatccagggggccagcagctcagccgggagggccccaagcatcgtgcaggatggcccccaaccctcctcagggctggaggggatggtcagggggaaggaggaatgacgctcaacctgcccaggtttggacacaactacaaagaacagcaggacacagaggtgacctctgtcctgaggcttctcaacagatgggaagtggctgtggtctcactggatccccactggcaccagcagtgtgggtgggcctcatgtaacatctgggaggggcttcatccccccacccaggacctagtgcatgccagcagctatctggggccctgggaaaaatgtgcgagtcttgagcgcggagccgctcaagccacagctcccaggcccctggctcaaagacgcagacaaggcctgagcagtgctctcggcatcggaccaaagcctgggcacaccctgcctctctccccagagcagggtccctgccgaggactggcctagagcaagcactggaaaagaggccctgccatacaccctgcgtacccactgccaggaccctctcagacaagcgtggcacagccatgctgaccttccatctggtgaaccaagtggcagccccaggggcctgccctgcaggtcacagctaaacaagtctggcagaagccacgcttgttccccatgtacctctagagaagcagaaaccaaagtccccctgtgccctgggagggtggggccgtctaatttattactgcccagcattccttccaacgggaagtagatgggcgactgctttgttcacacacatttgattaaaaataaacaaacagcatctcccca

SEQ ID NO: 182326 - DNA, 3165 bp, Artificial Sequence
  derived and/or modified sequence
atgggggagatcgagggaacgtaccgggtgttgcagactgcaggaatgaggctcggcgcccaaacgcctgtgggcgtctccacactcgagccgggtcaaaccctactaccgaggatgcaggagaagcatctgcatctccgggttaaactgctcgataatacaatggagattttcgatatcgaacccaagtgcgacggccaggtgctgcttactcaagtatggaagcggttgaacttggtcgagtgtgattacttcggcatggagttccagaacacccagtcgtattggatttggttagagccgatgaaaccaattattcggcagatcaggaggcccaaaaatgttgtgctgcgcctcgcagtcaaatttttcccacccgatccaggacagctgcaggaggaatacaccagatacctgttcgcgctacaactgaagagggacctcctggaggagcgccttacatgtgcggacacaaccgccgctttgctaaccagtcatcttctgcagagcgaaattggagattatgacgaaacccttgatagagagcacctcaaagtgaacgagtatctgcccgggcagcaacattgtctggaaaagatcctggagtttcaccagaaacacgtaggacagaccccagcagagtccgatttccaggtgctagaaattgcccgcaaattggagatgtatggaattcgattccatatggctagtgacagggaaggcacaaaaatacaactagctgtatctcatatgggagtgctggtgttccagggaaccacaaaaatcaacacttttaactggagtaaagtccggaagctgtcctttaaacggaagcgcttcctgatcaagctgcatccagaggtgcatggcccatatcaagatactttagagttcctgctggggagtagggatgagtgcaagaatttttggaagatttgtgtggaataccacacattctttcggctgttggatcagccaaagcccaaggcaaaggctgtgttctttagtaggggctcctctttcagatactccggacgtacacagaagcagctcgtcgattattttaaggacagcggaatgaaacggatcccgtacgaacggcgccatagtaagacacacaccagcgtgcgagctctgacggctgacctgcctaaacagagcatcagcttccctgaaggtctccgcacgcctgcttccccttcatcagccaatgcattttattccctctccccttccactttggtgccctctgggctgcccgagttcaaagacagctcaagctcactgaccgacccacaggtgtcttacgtaaagtcaccagcagccgagcgccggtcaggagcagtcgctggcggacctgacaccccttccgcacagccactaggcccgcccgcgcttcagcccgggccaggattaagtactaaatcccctcagccttcaccttcgtcaaggaagtcccccttgtccctgagccccgcgtttcaagttcctctaggccctgccgaacaaggatcatccccgctgctcagtccggtgctgtctgatgccggcggagcaggtatggactgcgaagagccccgccataaaagagtgccagccgacgaggcatattttatcgtgaaagaaattctggccactgagaggacctatctgaaagaccttgaggtcattaccgtctggtttaggtcagccgttgtgaaagaggacgccatgcctgcgaccctgatgaccctcctctttagcaatatagaccctatttacgagttccacagagggttcctccgcgaagtggaacaacggctggcactgtgggaaggcccaagtaaagcccacacaaagggtagccaccagcggatcggcgatattttgttgagaaatatgcggcagttgaaggagttcacgtcctactttcaacgtcacgatgaagtactgaccgagctcgaaaaggccacaaaaagatgtaaaaaactcgaggcggtgtacaaggagttcgaacttcagaaggtgtgctatctgcctttgaacacctttctgctgaaaccaatccagaggcttttacactaccggctgcttctgcgcaggctttgcggacactactcccctgggcaccacgattacgccgattgtcacgacgccctgaaggctattaccgaagtgacaactactctccagcacattctgataagactcgagaatttacagaagctcaccgaattgcaacgcgatttagtgggcatcgaaaatctaattgcccctggacgcgagttcataagagagggttgccttcacaaactaactaagaagggcctgcagcaaagaatgttcttccttttcagcgatatgctcctctatacctccaagggcgtggctgggaccagccatttcaggattcgcggcctgctgccactccagggcatgctggttgaggaaagcgataatgagtggagtgtgccccactgcttcaccatctatgccgcccagaaaacaatcgttgtggccgcctcaacacgccttgagaaagaaaaatggatgctggatttaaatagcgccatacaagcggcaaagtccgggggcgataccgctcctgccctgcctggtagaacagtctgcactagaccccctaggagccccaatgaagtgagcctggaacaggagagtgaggacgatgcccggggcgttaggagtagcctggaaggccatggacaacatcgggccaatactacgatgcacgtttgctggtatcggaatacctctgtaagccgggccgaccactcagcagccgttgagaaccaattaagtggctacttgcttaggaaattcaagaactcccatgggtggcagaaactgtgggttgtcttcactaacttttgcctgttcttttacaagacacatcaagacgattaccctctggctagtctgcctctgctgggatactccgtgagtatccccagggaggccgacgggattcacaaggattatgtgtttaagttgcaattcaagagtcacgtgtacttcttccgggccgagtccaagtatacctttgagcggtggatggaagtgattcagggtgcttctagttctgcgggtagagccccaagcatcgtacaggacggaccccagccctcctctggtctggagggcatggtcagaggtaaggaagagtag

SEQ ID NO: 182327 - DNA, 3165 bp, Artificial Sequence
  derived and/or modified sequence
atgggagaaattgagggcacctacagagtgctgcagacagctggcatgaggctgggcgcccagacccctgtgggcgtgtccaccctggagcccggccagaccctgctgcccaggatgcaggagaagcacctgcacctgcgggtgaagctgctggacaacaccatggagatctttgacatcgagcccaagtgtgatggccaggtgctgctgacccaggtgtggaagaggctgaacctggtggagtgtgactacttcggcatggagttccagaacacccagagctactggatctggctggagcccatgaagcccatcatccggcagatccggcggcccaagaatgtggtgctgcggctggccgtgaagttcttccccccagaccccggccagctgcaggaggagtacacccgctacctgtttgccctgcagctgaagagggacctgctggaggagcggctgacctgtgccgacaccacagctgccctgctgaccagccacctgctgcagagcgagatcggggactatgatgagaccctggaccgggagcacctgaaggtgaatgagtacctgcccggccagcagcactgcctggagaagatcctggagttccaccagaagcacgtgggccagaccccagctgagagtgacttccaggtgctggagatcgccaggaagctggagatgtatggcatccgcttccacatggccagtgaccgggagggcaccaagatccagctggccgtgagccacatgggcgtgctggtgttccagggcaccaccaagatcaacaccttcaactggagcaaggtgaggaagctgtccttcaagaggaagcgcttcctgatcaagctgcaccctgaggtgcacggcccctaccaggacaccctggagttcctgctgggcagcagagatgagtgcaagaacttctggaagatctgtgtggagtaccacaccttcttccggctgctggaccagcccaagcccaaggccaaggctgtgttcttcagccggggcagcagcttccgctacagcggccgcacccagaagcagctggtggactacttcaaggacagcggcatgaagaggatcccctatgaaagaagacacagcaagacccacacctctgtgcgggccctgacagctgacctgcccaagcagagcatctccttccctgagggcctgcggaccccagccagccccagcagcgccaatgccttctacagcctgagccccagcaccctggtgcccagcggcctgcctgagttcaaggacagcagcagcagcctgacagacccccaggtgtcctatgtgaagagccctgctgctgagcggcgcagcggggctgtggccggcggccctgacaccccatctgcccagcccctgggccccccagccctgcagcccggccctggcctgagcaccaagagcccccagcccagccccagcagcaggaagagccccctgagcctgagccctgccttccaggtgcccctgggccctgctgagcagggcagcagccccctgctgagccctgtgctgagtgatgctgggggcgccggcatggactgtgaggagcccaggcacaagagggtgcctgcagatgaggcctacttcatcgtgaaggagatcctggccacagagaggacctacctgaaggacctggaggtgatcaccgtgtggttccgctctgctgtggtgaaggaggatgccatgcctgccaccctgatgaccctgctcttcagcaacatcgaccccatctatgagttccaccggggcttcctgcgggaggtggagcagaggctggccctgtgggagggccccagcaaggcccacaccaagggcagccaccagagaattggagacatcctgctgaggaacatgaggcagctgaaggagttcaccagctacttccagagacatgatgaggtgctgacagagctggagaaggccaccaagcgctgcaagaagctggaggccgtgtacaaggagtttgagctgcagaaggtgtgctacctgcccctgaacaccttcctgctgaagcccatccagaggctgctgcactaccgcctgctgctgcggcggctgtgtggccactacagccctggccaccacgactatgctgactgccatgatgccctgaaggccatcacagaggtgaccaccaccctgcagcacatcctgatccggctggagaacctgcagaagctgacagagctgcagagggacctggtgggcattgaaaatctcatcgcccctggccgggagttcatccgggagggctgcctgcacaagctgaccaagaagggcctgcagcagaggatgttcttcctgttcagtgacatgctgctgtacaccagcaaaggagtggccggcaccagccacttccgcatccggggcctgctgcccctgcagggcatgctggtggaggagagtgacaatgagtggagcgtgccccactgcttcaccatctatgctgcccagaagaccatcgtggtggccgccagcacccggctggagaaggagaagtggatgctggacctgaacagcgccatccaggccgccaagagcggcggggacacagccccagccctgcccggccgcacagtgtgcaccaggcctcccaggagccccaatgaggtgtccctggagcaggagagtgaagatgatgcccggggcgtgcgcagcagcctggagggccacggccagcaccgggccaacaccaccatgcacgtgtgctggtacagaaacacctctgtgtccagagctgaccacagcgctgctgtggagaaccagctgagcggctacctgctgaggaagttcaagaacagccacggctggcagaagctgtgggtggtgttcaccaacttctgcctcttcttctacaagacccaccaggatgactaccccctggccagcctgcccctgctgggctacagcgtgtccatcccccgggaggctgatggcatccacaaggactatgtgttcaagctgcagttcaagagccacgtgtacttcttccgggcagagagcaagtacacctttgagcgctggatggaggtgatccagggcgccagcagcagcgctggccgggcccccagcatcgtgcaggacggcccccagcccagcagcggcctggagggcatggtgcggggcaaggaggagtag

SEQ ID NO: 182328 - DNA, 3165 bp, Artificial Sequence
  derived and/or modified sequence
atgggcgagatcgagggcacctaccgggtgctgcagaccgccggcatgaggcttggggcacaaactcctgtaggcgtcagcactcttgagccaggccagactctccttccgagaatgcaggaaaaacatcttcatctcagggtgaagcttttggataacacaatggagatttttgatatcgaaccaaaatgcgatggccaggtcctgctcacacaggtttggaaacgactgaacctcgtggaatgtgactacttcggaatggaatttcagaacactcaatcgtattggatttggctggagcccatgaaacctatcatccggcagataaggcggcccaagaatgtagtcctgcgcctggcagtgaaattcttccccccagaccccggtcagctccaagaggagtatacccgttatctctttgctcttcaacttaaaagggacttattagaagagcggctgacctgtgcagataccaccgccgcattgctgactagccacctactccaatcagaaatcggggactacgatgagaccttggaccgcgaacacctgaaggtgaacgagtatctgcctggacagcagcattgtctggagaaaattctggagtttcatcagaagcacgtgggacagacgcctgcggaatcagacttccaagtgttggagatagccagaaaattggaaatgtatggcatccgctttcacatggctagtgatagggaagggacaaagatccaacttgctgtgagtcatatgggagttctggtgtttcagggcactaccaagataaacacgttcaactggagtaaggtgcgaaagctgagcttcaaacgtaaaaggtttctcataaaattgcacccggaggtccatggtccataccaggatacactcgaattcctgttaggttccagggacgagtgcaagaacttctggaaaatttgtgtcgaatatcacacattcttcaggcttctggatcagcctaagcccaaagccaaagctgtattcttttctcgaggcagcagcttccggtactccggtaggacccagaagcagttagttgactacttcaaggacagcggaatgaaacgtattccatatgagagacgccattctaagacccacacatcagtgcgggccctcacagcagacttgcccaagcaaagcatatctttccctgagggactgcggactcctgcttccccttcaagtgccaacgctttttactcactatccccgtctacactggtgccatctgggctgcccgagtttaaggattcatccagctcacttaccgacccccaggtgagctacgttaagtccccagcggcagaacggcgatccggcgccgtagccggcggaccagatacaccatctgcacagcctctaggcccccccgctttacagccaggtccagggttaagtactaagtctccccaacccagcccttcatcccgaaagtccccactcagtctgagtcccgcattccaggtccccttaggaccagcggagcaaggctccagtccactgctctctcctgtgctatccgacgcaggcggtgcaggaatggactgcgaagagccccggcataagagggtgcccgctgacgaagcgtacttcattgtgaaggagatcctggcaactgagaggacatacctgaaggacctcgaggtgataactgtttggtttaggagcgcagtggtgaaggaagatgccatgccagcaactctgatgaccctgctttttagtaacattgatcccatatatgagtttcaccgaggttttcttcgagaggtagagcagaggctggcgctgtgggaaggaccgtccaaggcccatacaaaaggatcccaccaacgcattggggatatcttgcttcgcaacatgagacagctgaaagagtttacatcttattttcagaggcatgacgaagtgctgacagagctggaaaaagctactaagcggtgtaagaaattagaagctgtgtacaaggaatttgagcttcagaaagtctgctacctgccattaaacacctttcttctcaaacctatccagcggctgctacactaccggttgcttctgcggagattgtgtggccattacagtccaggccaccatgactacgctgattgccacgatgctcttaaagctataacagaggtgacgaccacacttcaacacattctgatcaggctcgagaatttgcagaaactgaccgaactacagcgggatctcgtcggtattgagaacctgatcgctccagggagggaattcatcagagaaggatgcctgcacaagctcacaaagaagggactgcagcagcgaatgtttttcctgtttagcgacatgctcctttatacctccaaaggagtcgccgggacatctcactttcgcatacgcgggctgctgccactccagggtatgcttgtagaagaaagtgacaatgagtggtcagtgccccactgctttacaatctatgccgctcagaagaccatagtggtcgcggcttctacccggctggagaaggagaagtggatgctcgacctaaatagcgcaatccaagctgccaaatctggaggcgatacagctcccgccctgccgggacgcacagtctgcacacggccaccaagatcaccaaatgaggtctcattggaacaagaaagcgaagatgacgctcgtggagtgcgttctagccttgaagggcatggtcagcaccgagccaacaccaccatgcatgtctgctggtaccggaacacctccgtgtctcgcgcggatcactccgctgccgttgagaatcagttgagtgggtacttactgcgaaaatttaaaaattctcatggatggcagaagctgtgggtagtctttaccaacttctgtctttttttttataagacacatcaggacgattaccctctcgcaagtcttccgctgttgggctacagcgtgagcattccgagggaagcagatgggattcacaaggactacgtgtttaagctgcagttcaagagtcatgtttacttctttcgcgccgagagtaagtacactttcgagcggtggatggaggtgattcagggagcaagttctagtgcagggagagcgccctcaattgtgcaggatggccctcagcctagcagtggcctggagggtatggtccgggggaaagaggaatag

SEQ ID NO: 182329 - DNA, 3165 bp, Artificial Sequence
  derived and/or modified sequence
atgggtgagatcgaaggcacctatagggtcttgcaaacggccggtatgcggcttggtgcccagaccccggtgggggtctccacactcgagcccggacagaccttgctgcccaggatgcaggagaaacacctccacctgagagtgaaactgctcgacaacaccatggagatcttcgatatcgaacctaagtgtgacggacaggtgcttctcacccaggtgtggaagaggctcaatttagtagagtgtgattacttcggcatggagtttcaaaatacccaatcgtattggatatggctggaacccatgaaaccaatcattcgccagatcagaaggcctaagaacgtggtcctccgtctagctgttaaatttttcccacctgacccgggacaactgcaagaggaatacacaagatatttgttcgctctccagctgaaaagggatctgctggaggagcggctcacatgtgccgacaccactgccgcactgcttacatcccatctgctgcagagcgagatcggtgactatgacgagactttagatagagaacacttaaaggtcaacgagtacctgcccggacaacaacactgcctcgaaaaaatattagaatttcatcagaagcacgtgggccagactcctgctgaatctgacttccaggtgctggaaattgccaggaaacttgaaatgtacggcatcaggttccacatggcctccgatcgcgaggggaccaagatccagctagcagtcagccatatgggagttttggtgtttcaggggacaactaagataaataccttcaactggagtaaggtgagaaaactctcttttaagcgcaagcgctttctcattaaattgcacccagaagtgcacgggccataccaggacacactggaatttctgttggggtctcgtgacgaatgcaagaatttttggaaaatttgtgtagagtaccatactttttttcggctcttggatcaaccaaagcctaaggcgaaggctgtgtttttctcaagaggatcgtcatttcgatattctggacggacccaaaagcagctggtcgattacttcaaagatagcggaatgaagcgcatcccttacgagaggagacactctaagacccacacatcagtacgggcactgacggccgatctcccgaaacagtctatcagcttcccagaaggactgaggactccagcaagcccatcctcagctaatgccttctacagcctgagtccctctacattggtaccgagcggactgcccgaatttaaggatagtagctctagcctgacagatccccaggtatcttacgtaaagtcacccgctgcggaacggcgtagcggcgctgttgccggaggccctgacacacctagcgcccagcctcttggacctccggcactgcagccaggcccaggactgagcactaaaagcccacaaccgagtccaagctcaaggaaatctcccctttctctctccccggcttttcaggtgcccctgggacccgctgaacagggtagcagcccattgctcagtccagtcctttctgatgccggaggcgcaggaatggactgtgaggaacccaggcacaagagagtccctgctgatgaggcctacttcattgtgaaggaaatcttggctaccgaacggacctatttaaaagatttggaagtgattactgtgtggtttcggtccgccgtggtgaaagaggatgctatgccggcaacactcatgacacttctgtttagtaatatcgacccgatatatgaatttcacagaggctttctacgcgaagtggagcagcgcctggccttatgggagggacccagcaaagctcacacaaaggggtcccatcagcggatcggggacatactgctcagaaatatgagacagttgaaggaatttacatcatactttcagcggcacgacgaagtactgactgagctggaaaaggctactaagagatgcaagaaattggaggccgtttacaaggagtttgagctgcagaaggtgtgttacttgcccttgaatacattcttgttgaaacccattcagcggttactccattatcgtctcctgcttaggcggctgtgtggccactattcccccggtcaccacgactacgcggattgtcacgacgctttgaaagctattacagaggttaccacaacccttcagcatattttgatcaggctggagaatctccagaagctgacggagcttcaacgagatctggtgggaatcgagaatctgattgcgccaggcagagaatttatccgcgaaggctgcctccacaagctgacgaagaagggcctgcagcaacgaatgtttttcttattctctgacatgctgctgtacacatcgaaaggagtagcaggtacgagtcacttccgaatccgcggattgctacctctacagggtatgttggtggaggaatccgacaatgagtggtccgtgccccattgctttactatctacgccgctcagaagaccatcgttgttgcagcgtcaactcgcctcgaaaaggagaagtggatgctggatctgaatagcgccatccaagcagctaagtccggcggtgacaccgctccagcgcttccgggacgcaccgtgtgcaccaggcctccccgttctccgaacgaggtgagtctcgagcaggaatccgaggacgacgcacggggtgtgagatctagcctggaggggcacggacagcatagagccaacaccaccatgcacgtgtgttggtatagaaatacctctgtcagcagggcagatcatagtgcggcagtggagaaccagctgtctggttatctgctgagaaagttcaaaaactctcatggctggcagaagctctgggtggtcttcactaatttctgccttttcttttataaaactcatcaagacgactatccccttgcgagccttcccttattaggttacagcgtatcaatcccccgtgaagcagacggcatacacaaggattacgtgttcaagttacaattcaagtcccatgtgtacttcttccgggcagaaagcaagtatactttcgagcgctggatggaagtcattcagggagctagctcatctgccggacgagcacctagcattgtccaggatggccctcaaccgtcatccggtctcgaaggcatggtgagagggaaagaggaatag

SEQ ID NO: 182330 - protein, 1072 aa, Artificial Sequence
  derived and/or modified sequence
MAPPTGVLSSLLLLVTIAGCARKQCSEGRTYSNAVISPNLETTRIMRVSHTFPVVDCTAACCDLSSCDLAWWFEGRCYLVSCPHKENCEPKKMGPIRSYLTFVLRPVQRPAQLLDYGDMMLNRGSPSGIWGDSPEDIRKDLTFLGKDWGLEEMSEYSDDYRELEKDLLQPSGKQEPRGSAEYTDWGLLPGSEGAFNSSVGDSPAVPAETQQDPELHYLNESASTPAPKLPERSVLLPLPTTPSSGEVLEKEKASQLQEQSSNSSGKEVLMPSHSLPPASLELSSVTVEKSPVLTVTPGSTEHSIPTPPTSAAPSESTPSELPISPTTAPRTVKELTVSAGDNLIITLPDNEVELKAFVAPAPPVETTYNYEWNLISHPTDYQGEIKQGHKQTLNLSQLSVGLYVFKVTVSSENAFGEGFVNVTVKPARRVNLPPVAVVSPQLQELTLPLTSALIDGSQSTDDTEIVSYHWEEINGPFIEEKTSVDSPVLRLSNLDPGNYSFRLTVTDSDGATNSTTAALIVNNAVDYPPVANAGPNHTITLPQNSITLNGNQSSDDHQIVLYEWSLGPGSEGKHVVMQGVQTPYLHLSAMQEGDYTFQLKVTDSSRQQSTAVVTVIVQPENNRPPVAVAGPDKELIFPVESATLDGSSSSDDHGIVFYHWEHVRGPSAVEMENIDKAIATVTGLQVGTYHFRLTVKDQQGLSSTSTLTVAVKKENNSPPRARAGGRHVLVLPNNSITLDGSRSTDDQRIVSYLWIRDGQSPAAGDVIDGSDHSVALQLTNLVEGVYTFHLRVTDSQGASDTDTATVEVQPDPRKSGLVELTLQVGVGQLTEQRKDTLVRQLAVLLNVLDSDIKVQKIRAHSDLSTVIVFYVQSRPPFKVLKAAEVARNLHMRLSKEKADFLLFKVLRVDTAGCLLKCSGHGHCDPLTKRCICSHLWMENLIQRYIWDGESNCEWSIFYVTVLAFTLIVLTGGFTWLCICCCKRQKRTKIRKKTKYTILDNMDEQERMELRPKYGIKHRSTEHNSSLMVSESEFDSDQDTIFSREKMERGNPKVSMNGSIRNGASFSYCSKDR

SEQ ID NO: 182331 - DNA, 3219 bp, Artificial Sequence
  derived and/or modified sequence
atggcccccccaacgggggttctgagttctcttctcctgctggtgaccatagcgggctgcgccaggaagcagtgttctgaagggaggacatacagcaacgccgtgatttcgccgaatctcgagactacgcgaattatgagagtctcacacactttccccgtggtggattgtacggcggcctgctgtgacctgagctcatgtgacctagcttggtggtttgaggggcgctgctacctcgtcagctgtccacataaggagaactgcgaaccaaagaagatgggccctatccgcagttacctgacatttgtgctgaggccggtgcagaggcccgcccagctgctggattatggcgatatgatgttaaacaggggttctccttcgggcatctggggagactccccggaggatattcgaaaggatctcacatttctgggaaaggattggggactggaggaaatgagcgagtacagcgacgactatagagaactggaaaaggatctgttgcagccttccggcaaacaggaacctcgcggttccgcagaatacactgattggggcctcttaccaggaagcgagggggcctttaactcaagtgtcggcgattctcctgccgttccggctgagactcagcaggaccctgaactccattacttgaatgagagtgcttcaacacctgctcccaagttgccagagaggtcagtattacttcctctgccaaccaccccaagctcaggcgaggttctggaaaaagagaaggcttcacaactccaggaacagtcatcaaacagcagtggcaaagaagtcctgatgccctcacattctttgccacccgcatcactggagctctcctcagtgaccgtcgaaaagtcacccgtactgaccgtcacaccaggctccaccgaacactctattccaaccccccctacctctgcggcgccaagcgagtctactccgagcgagttgcccatctccccaacaacggcacctcgaacagtcaaggaactcaccgtctcagctggggacaatttgatcatcacacttccggataacgaagtcgaactaaaagcttttgtagcccccgctccgcctgttgagaccacttataactacgagtggaacttgatctcacaccctaccgactatcagggcgagatcaagcagggccataagcagactctcaacttaagccagctatccgtcgggctgtacgtgttcaaagtgacagtgagctccgagaacgcattcggggaagggttcgtgaatgttactgtgaaaccggcacgccgagttaatctcccacctgtagctgtcgtctctcctcagctgcaggagctcaccctcccgctcacctcagcacttatcgatggatctcagagcacagacgacactgaaatcgtgagctaccactgggaagaaataaacggcccattcattgaagagaaaacatcagtggactcgccggtgctgaggctgagcaacctggacccaggtaattactcctttagacttactgttacagatagcgatggagcaacaaactcgactacggccgctcttatcgtcaataatgctgtggattacccacctgtggcaaatgccggacccaatcatactattacccttcctcaaaactccattacgctcaacggcaaccagtcaagtgatgaccaccagatcgtcttatacgaatggtcactgggacctggtagcgaagggaagcatgtcgtgatgcagggcgtgcagacaccttatctgcatctcagtgctatgcaggagggtgattacacctttcagttgaaggtcaccgattcttccagacagcagtccacagctgtagttacagtgatcgttcagccagagaacaatcgaccaccagtggccgtggcagggcctgacaaggagctaatattccccgtcgagagcgctaccttagacgggagctccagttccgacgaccatggcatagtgttttaccattgggaacacgtgcggggaccctccgctgtggaaatggaaaacattgacaaagccattgccacggtcacagggctccaggtgggaacctaccattttagactcacagtgaaagaccagcaaggactgtcatccacttcgacccttacggtcgctgtcaaaaaggagaacaacagtccgcctagagcaagagccggtgggagacacgtgctcgtcctccctaacaactctatcaccttagatggctctcgttccacagatgaccagagaattgtgagctacttgtggatacgggacggccaatctcccgccgctggcgacgttatagatggatccgaccactctgtggctctccagcttacgaatctagttgaaggcgtgtacacatttcacctccgtgttacggattcccaaggtgcctctgacacagatacggcgacggttgaagtgcagcctgacccacggaaatcaggattagtagaactgacactgcaggtgggggtgggccaactgaccgagcaacggaaggatactctcgtcagacaattggccgtacttctgaacgtactggactccgacattaaggtgcagaagatacgtgctcactcagacctctccaccgtgatagtcttctacgtgcagtccaggccaccattcaaagtgctgaaagcagcggaggtcgcccgaaatcttcatatgcgtctatctaaagaaaaggcagatttcctcctgttcaaagttctgagggttgataccgccggctgtctgctaaaatgctcggggcacggccactgtgatccactcaccaagcgctgcatttgctcccatctgtggatggaaaacttgatccaacgttacatctgggatggagagtcaaattgcgagtggagtattttctacgttacagtgctagccttcactttaatcgtgcttacaggaggctttacatggctctgcatctgctgctgcaagcggcaaaaaaggaccaagattcgcaagaaaacaaagtatacaatcttagataatatggacgagcaggagcgcatggagctgaggccgaagtatggcatcaagcaccggagcacagaacacaattcttccttaatggtctctgagtctgagttcgacagtgaccaggataccatcttctcacgggagaagatggagcgaggcaatccaaaggtgagcatgaatggctctattagaaatggcgccagcttctcatattgctccaaagataggtag

SEQ ID NO: 182332 - DNA, 3084 bp, Artificial Sequence
  derived and/or modified sequence
atgagggtatctcacacattccccgtcgtggattgtaccgccgcttgttgtgatctgagtagttgcgatttagcatggtggtttgaagggcgttgttatctggtttcttgtccacacaaagagaattgcgagcctaaaaagatgggccccatccgatcctatctaactttcgttctgcgacccgttcagagaccagcccagctgttggactacggggacatgatgctcaacaggggatcccccagcgggatctggggagattcaccagaggacatccgtaaagacctgacattcctaggcaaggactggggattggaggaaatgtcagaatacagcgatgattaccgggagctcgaaaaagatctgctgcagccttccggaaaacaggagccacgaggaagtgctgagtacaccgactggggcctgctgcccgggagtgagggcgcttttaacagctcagtgggcgactcacctgctgtgccagcagagacacaacaggacccagaattacactatcttaacgagtccgcttcaacccctgcacctaagctgcccgaaagaagtgtcctgctgcctctgccaaccaccccaagctctggcgaagttctggagaaagaaaaggccagccaactgcaggaacagagctccaactcttcagggaaggaagtcctgatgccttcccatagtcttccaccagcttctctggaactcagctcagtcaccgtggagaaatctccagtgctcaccgtgaccccgggttcaacggagcacagtatccccactcctcctacttctgccgcccccagtgagagcactccgagcgaactgccaataagtccgaccacagcccctaggaccgtgaaggaactgaccgtatcagctggtgataatctcatcatcaccttgccagacaacgaggtagaactgaaggcatttgtagctccagcgccccccgtcgaaaccacttacaattatgaatggaacctgatctcccaccctacagactaccagggagaaatcaaacaggggcacaaacagacacttaatctatcccagctgagtgtcggattgtacgtgtttaaggtcacagtgtcaagcgagaatgcttttggggaaggtttcgtgaacgtgactgtgaagccagcacggagggttaaccttccccctgtggccgttgtgtctccccagttgcaggaattgactctgcccctgaccagcgccctcattgacggttctcagagcactgatgataccgaaatagtcagctaccactgggaagaaatcaacggcccatttattgaggaaaaaacttctgtcgacagcccagtcctcaggctgtcaaatctcgacccaggtaattatagcttcaggttaacagtcacggattcggatggggctacgaattccacgaccgccgccttgattgtcaacaacgctgtcgactacccaccggtcgctaacgctggaccaaaccacacaatcactttgccacagaactccattaccctgaatggaaatcagagttccgatgaccatcaaatcgtactgtacgagtggtccctcggcccaggctctgaagggaagcatgttgtgatgcagggcgttcagactccctacctgcacctatctgctatgcaagagggagattacacatttcagctcaaggtcaccgactcatcaaggcagcagagtactgcggttgtcacagtcattgtccaaccagaaaacaaccggccccccgtagccgtcgcaggccccgataaagagctgatcttccctgtggagtccgctaccctcgatggctcctcatctagcgatgaccatgggatagtgttctaccattgggagcatgtgcggggcccctccgctgttgagatggagaacatagacaaagctatagccaccgtgactggccttcaggtcggcacttatcacttccgcctgacagtaaaagaccagcagggtttgtcctcaactagtactctcaccgtagccgtgaaaaaagaaaataactcccctccccgagcacgggccggcggtcgccacgtcttggtgctgcccaataacagcattactctggacggcagccggagcaccgatgatcagagaattgttagctatctgtggatccgcgacggtcaaagcccagccgctggggacgtgatagatggttcggaccattcagttgctctgcagctgacaaatttggttgagggagtttacaccttccatcttcgggttacagacagccagggcgccagtgatacagacactgcgacggttgaagtgcagcccgacccacggaagagtggactggtagagctcaccctgcaggtgggggttgggcagcttaccgaacagcgcaaggacactttagtgcggcaacttgcagtcctcctcaacgtattggattcagacataaaagtccaaaaaatacgcgctcacagcgacttaagcactgtgattgtcttctatgttcagagccgccccccttttaaggtgttgaaagctgcagaggtcgcccggaacctccacatgagactctctaaggagaaagcagacttcctgctgtttaaggtgttgcgggtggacaccgccgggtgcctgctaaagtgctcagggcacggccattgtgatcccctcacaaaacgttgcatctgttcgcacctgtggatggaaaatctgatccagcgttacatctgggatggagaaagtaattgcgaatggtccatcttctacgtcaccgtcctcgcctttaccctgattgtactaactggaggcttcacgtggctgtgtatttgctgctgtaaaagacaaaaacgcaccaagatccgcaaaaaaacgaaatacaccatcctcgacaacatggatgagcaggagaggatggagctgaggccaaagtatgggattaaacacagatctacggaacataatagctcgttgatggtgagtgagtcagagttcgattccgatcaggataccatattttcccgtgagaaaatggaacgaggcaacccaaaagtgagcatgaacggtagtatccggaacggcgcatccttttcatattgttctaaggatcgttag

SEQ ID NO: 182333 - DNA, 3219 bp, Artificial Sequence
  derived and/or modified sequence
atggccccacctactggggtacttagttcactactgttgttggtcaccattgctgggtgcgcgaggaagcaatgctctgagggccgcacttacagcaacgccgttatcagtcctaatctcgaaacaaccagaatcatgagggtgtctcacacattccctgtagtggattgtacagcagcctgttgtgacctgagctcatgtgatctagcatggtggtttgagggacggtgttatttagtcagttgtccacataaggagaattgtgagcccaagaaaatgggtccaatcaggtcttatctgacattcgtcctacggcccgtgcagagaccagcccagttgctggactacggcgatatgatgcttaatagaggcagcccatctggaatttggggcgactcgcccgaagacataaggaaggatctcacctttctgggaaaagattggggactcgaagagatgtccgagtactctgatgattatcgggaactagagaaagatttgttgcagccaagcggcaaacaggagccccgaggctctgccgagtacacagactggggcctgcttcccggctctgagggagcctttaactccagcgtgggggactctcctgccgtgcccgccgaaacgcagcaagaccccgaattacactacctgaacgagtcggctagcacccccgcccccaagctaccagaaagatcggtcctgctgccactcccaaccactcctagcagcggagaagtgctagagaaggagaaagccagccaactgcaagagcagagcagcaactctagcggcaaggaagtgctgatgccatcacacagcctaccccccgcttctctggagctctcgtccgtgaccgtggaaaagtctcccgttctcaccgtcacccccggttcaacagagcacagtatcccaactcctccgacctccgctgcgcctagcgaaagcaccccttccgagcttcctatttcacccaccaccgccccccgcacggttaaagaattaaccgtaagcgcaggtgacaacttgattattacactaccagataacgaggtggagctaaaggccttcgtggctcccgcccctcccgttgaaactacatacaactatgagtggaatctcatatcccatcccaccgattatcagggggagatcaagcaggggcacaagcagacactaaacctgagccagttgtctgttggcctgtatgtgttcaaggtgactgttagttcggagaacgctttcggtgaaggcttcgttaatgttacagtaaaacccgccaggcgagtgaacctaccccccgtggccgtagtcagtcctcagctgcaagagctgaccctgccgctgacttcagcactcattgacggaagccagtcgaccgacgacacggagatcgtgtcataccactgggaggagatcaacggtccctttatcgaggagaaaacatccgtggacagtcctgtgcttcgactgtctaacctcgatccaggaaactatagctttcggctgaccgttaccgactccgatggcgctacgaactcgaccacagcagcactcattgtgaacaacgccgttgattacccacccgttgccaacgcaggccctaatcacaccataactctccctcagaattccattaccttgaatggaaatcagagcagtgacgatcatcaaattgtgctgtatgagtggagccttggcccggggtcagaaggaaagcatgtcgtgatgcagggggtgcaaacgccctacctgcacctgagtgcaatgcaagagggagactacacttttcagctgaaagttaccgacagctcccgccagcagtcaacagccgtcgtcactgttattgttcagccagagaacaatagacccccagttgcggtggccggacccgacaaggagttaatttttccagtcgagtccgccaccttggacggctcaagcagctccgacgaccatgggattgtcttttaccattgggaacatgtaaggggcccgtcggcagttgagatggagaacatcgacaaagctatcgccaccgtgacagggttgcaggtaggtacttatcacttccgactgaccgtgaaagaccaacagggcctgagcagtacctcaacattgacagtcgccgtgaaaaaggagaacaactcaccgccgcgcgcacgcgctggtggacggcatgtgttagtgctgcctaacaactcgattaccctggatggcagtagaagcaccgacgaccaaagaatcgtgagttacctgtggatccgcgatggtcagtcgcctgccgcgggcgacgtcatcgacggctctgatcattctgtggctctccagttgacaaacctggtggagggcgtgtacaccttccaccttagggtgaccgactcccaaggggctagtgataccgatactgcgaccgttgaggttcagccagacccccgtaaaagcgggctcgtggaactgactctccaggtgggcgtgggacagctgaccgagcaaagaaaggatacactagttcggcagctagctgtgttactgaatgtgctggattccgatattaaagtccagaagattcgggcacattctgatttgtccacagtcatagtgttttacgttcaatcccggcctcccttcaaggttctgaaagcagcggaggtggctcggaacctgcacatgcgactgagcaaggagaaagccgactttttattgtttaaggtgctgcgggtcgacactgcgggctgcttgttgaaatgtagcggccacggccactgtgacccactgactaagaggtgcatctgcagtcatctgtggatggagaacctcattcagcgctatatttgggacggtgaatccaactgtgagtggagcatcttctatgtgaccgtcctcgctttcactctgatcgtcctgaccgggggctttacttggttgtgcatctgctgttgtaagcgacagaagcgaaccaaaatccggaagaagacaaagtacaccatactggataacatggatgaacaggagcggatggagctccgcccaaagtacggcatcaagcaccggtctaccgagcataattcaagtctgatggtgagcgaatctgagttcgactccgaccaagatacaatcttctctagagaaaagatggaacggggcaaccctaaggtctctatgaacgggagtatacgtaacggggcatccttctcttactgcagcaaagataggtag

SEQ ID NO: 182334 - DNA, 3219 bp, Artificial Sequence
  derived and/or modified sequence
atggcccccccaactggagtgctgagcagcctgctgctgctggtgaccatcgccggctgtgccaggaagcagtgcagcgagggccgcacctacagcaatgctgtgatcagccccaacctggagaccacccgcatcatgagggtgagccacaccttccctgtggtggactgcacagctgcctgctgtgacctgagcagctgtgacctggcctggtggtttgagggccgctgctacctggtgtcctgcccccacaaggagaactgtgagcccaagaagatgggccccatccgcagctacctgacctttgtgctgcggcctgtgcagaggcctgcccagctgctggactatggagacatgatgctgaacagaggcagccccagcggcatctggggagacagccctgaggacatcaggaaggacctgaccttcctgggcaaggactggggcctggaggagatgtctgagtacagtgatgactaccgggagctggagaaggacctgctgcagcccagcggcaagcaggagccccggggcagcgctgagtacacagactggggcctgctgcccggcagcgagggcgccttcaacagctctgtgggggacagccctgctgtgcctgctgagacccagcaggaccctgagctgcactacctgaatgaaagtgccagcaccccagcccccaagctgcctgagaggtctgtgctgctgcccctgcccaccacccccagcagcggggaggtgctggagaaggagaaggccagccagctgcaggagcagagcagcaacagcagcggcaaggaggtgctgatgcccagccacagcctgcccccagccagcctggagctgagctctgtgacagtggagaagagccctgtgctgactgtgaccccaggcagcacagagcacagcatccccaccccacccaccagcgctgcccccagcgagagcaccccatctgagctgcccatcagccccaccacagcccccaggacagtgaaggagctgactgtgtctgctggggacaacctgatcatcaccctgcctgacaatgaggtggagctgaaggcctttgtggccccagcccctcctgtggagaccacctacaactatgagtggaacctgatcagccaccccacagactaccagggcgagatcaagcagggccacaagcagaccctgaacctgagccagctgtctgtgggcctgtatgtgttcaaggtgacagtgtccagtgaaaatgcctttggagagggctttgtgaatgtgacagtgaagccagcccggcgggtgaacctgccccctgtggccgtggtgagcccccagctgcaggagctgaccctgcccctgaccagcgccctgattgatggcagccagagcacagatgacacagaaattgtgtcctaccactgggaggagatcaatggccccttcatcgaggagaagacctctgtggacagccctgtgctgcggctgagcaacctggaccccggcaactacagcttccggctgactgtgacagacagtgatggagccaccaacagcaccacagctgccctgattgtgaacaatgctgtggactacccacctgtggccaatgccggccccaaccacaccatcaccctgccccagaacagcatcaccctgaatggaaaccagagcagtgatgaccaccagatcgtgctgtatgagtggagcctgggccctggcagcgagggcaagcacgtggtgatgcagggcgtgcagaccccctacctgcacctgagcgccatgcaggagggggactacaccttccagctgaaggtgacagacagcagccggcagcagagcacagctgtggtgaccgtcatcgtgcagcctgagaacaaccggccccctgtggccgtggccggccctgacaaggagctgatcttccctgtggagagcgccaccctggatggcagcagcagcagtgatgaccatggaattgtgttctaccactgggagcacgtgcggggccccagcgctgtggagatggagaacatcgacaaggccatcgccaccgtgacaggcctgcaggtgggcacctaccacttccggctgactgtgaaggaccagcagggcctgagcagcaccagcaccctgactgtggccgtgaagaaggagaacaacagccccccccgggcccgggccggcggcagacatgtgctggtgctgcccaacaacagcatcaccctggatggcagccgcagcacagatgaccagagaattgtgtcctacctgtggatcagagatggccagagccctgctgctggagatgtgattgatggcagtgaccacagcgtggccctgcagctgaccaacctggtggagggcgtgtacaccttccacctgcgggtgacagacagccagggcgccagtgacacagacacagccaccgtggaggtgcagcctgaccccaggaagagcggcctggtggagctgaccctgcaggtgggcgtgggccagctgacagagcagaggaaggacaccctggtgcggcagctggccgtgctgctgaatgtgctggacagcgacatcaaggtgcagaagatccgggcccacagcgacctgagcacagtgattgtgttctacgtgcagagcaggcctcccttcaaggtgctgaaggctgctgaggtggccaggaacctgcacatgaggctgagcaaggagaaggctgacttcctgctcttcaaggtgctgcgggtggacacagctggctgcctgctgaagtgcagcggccacggccactgtgaccccctgaccaagcgctgcatctgcagccacctgtggatggagaacctgatccagcgctacatctgggatggagagagcaactgtgagtggagcatcttctacgtgacagtgctggccttcaccctgattgtgctgaccggcggcttcacctggctgtgcatctgctgctgcaagaggcagaagaggaccaagatcaggaagaagaccaagtacaccatcctggacaacatggatgagcaggagaggatggagctgcggcccaagtatggcatcaagcacaggagcacagagcacaacagcagcctgatggtgtctgagagcgagtttgacagcgaccaggacaccatcttcagccgggagaagatggagcggggcaaccccaaggtgtccatgaatggcagcatcagaaatggagccagcttctcctactgcagcaaggacagatag

SEQ ID NO: 182335 - DNA, 3084 bp, Artificial Sequence
  derived and/or modified sequence
atgagggtgagccacaccttccctgtggtggactgcacagctgcctgctgtgacctgagcagctgtgacctggcctggtggtttgagggccgctgctacctggtgtcctgcccccacaaggagaactgtgagcccaagaagatgggccccatccgcagctacctgacctttgtgctgcggcctgtgcagaggcctgcccagctgctggactatggagacatgatgctgaacagaggcagccccagcggcatctggggagacagccctgaggacatcaggaaggacctgaccttcctgggcaaggactggggcctggaggagatgtctgagtacagtgatgactaccgggagctggagaaggacctgctgcagcccagcggcaagcaggagccccggggcagcgctgagtacacagactggggcctgctgcccggcagcgagggcgccttcaacagctctgtgggggacagccctgctgtgcctgctgagacccagcaggaccctgagctgcactacctgaatgaaagtgccagcaccccagcccccaagctgcctgagaggtctgtgctgctgcccctgcccaccacccccagcagtggagaggtgctggagaaggagaaggccagccagctgcaggagcagagcagcaacagcagcggcaaggaggtgctgatgcccagccacagcctgcccccagccagcctggagctgagctctgtgacagtggagaagagccctgtgctgactgtgaccccaggcagcacagagcacagcatccccaccccacccaccagcgctgcccccagcgagagcacccccagcgagctgcccatcagccccaccacagcccccaggacagtgaaggagctgactgtgtctgctggggacaacctgatcatcaccctgcctgacaatgaggtggagctgaaggcctttgtggccccagcccctcctgtggagaccacctacaactatgagtggaacctgatcagccaccccacagactaccagggcgagatcaagcagggccacaagcagaccctgaacctgagccagctgtctgtgggcctgtatgtgttcaaggtgacagtgtccagtgaaaatgccttcggggagggctttgtgaatgtgacagtgaagccagccaggagagtgaacctgccccctgtggccgtggtgagcccccagctgcaggagctgaccctgcccctgaccagcgccctgattgatggcagccagagcacagatgacacagagatcgtgtcctaccactgggaggagatcaatggccccttcatcgaggagaagacctctgtggacagccctgtgctgcggctgagcaacctggaccccggcaactacagcttccggctgactgtgacagacagtgatggagccaccaacagcaccacagctgccctgattgtgaacaatgctgtggactacccacctgtggccaatgccggccccaaccacaccatcaccctgccccagaacagcatcaccctgaatggaaaccagagcagtgatgaccaccagatcgtgctgtatgagtggagcctgggccctggcagcgagggcaagcacgtggtgatgcagggcgtgcagaccccctacctgcacctgagcgccatgcaggagggggactacaccttccagctgaaggtgacagacagcagccggcagcagagcacagctgtggtgacagtgattgtgcagcctgagaacaacagacctcctgtggccgtggccggccctgacaaggagctgatcttccctgtggagagcgccaccctggatggcagcagcagcagtgatgaccacggcatcgtgttctaccactgggagcacgtgcggggccccagcgctgtggagatggagaacatcgacaaggccatcgccaccgtgacaggcctgcaggtgggcacctaccacttccggctgactgtgaaggaccagcagggcctgagcagcaccagcaccctgactgtggccgtgaagaaggagaacaacagccccccccgggcccgggccggcggccgccacgtgctggtgctgcccaacaacagcatcaccctggatggcagccgcagcacagatgaccagagaattgtgtcctacctgtggatcagagatggccagagccctgctgctggagatgtgattgatggcagtgaccacagcgtggccctgcagctgaccaacctggtggagggcgtgtacaccttccacctgcgggtgacagacagccagggcgccagtgacacagacacagccaccgtggaggtgcagcctgaccccaggaagagcggcctggtggagctgaccctgcaggtgggcgtgggccagctgacagagcagaggaaggacaccctggtgcggcagctggccgtgctgctgaatgtgctggacagcgacatcaaggtgcagaagatccgggcccacagcgacctgagcaccgtcatcgtgttctacgtgcagagccggccccccttcaaggtgctgaaggctgctgaggtggccaggaacctgcacatgaggctgagcaaggagaaggctgacttcctgctcttcaaggtgctgcgggtggacacagctggctgcctgctgaagtgcagcggccacggccactgtgaccccctgaccaagcgctgcatctgcagccacctgtggatggagaacctgatccagcgctacatctgggatggagagagcaactgtgagtggagcatcttctacgtgacagtgctggccttcaccctcatcgtgctgactggaggcttcacctggctgtgcatctgctgctgcaagaggcagaagaggaccaagatcaggaagaagaccaagtacaccatcctggacaacatggatgagcaggagaggatggagctgcggcccaagtatggcatcaagcacaggagcacagagcacaacagcagcctgatggtgtctgagagcgagtttgacagcgaccaggacaccatcttcagccgggagaagatggagcggggcaaccccaaggtgtccatgaatggcagcatcagaaatggagccagcttctcctactgcagcaaggacagatag

SEQ ID NO: 182336 - DNA, 3219 bp, Artificial Sequence
  derived and/or modified sequence
atggccccccccaccggcgtgctgagcagcctgctgctgctggtgactatagcgggttgtgctcgcaagcagtgctcggagggcagaacatacagcaatgctgtaatcagtcccaatcttgaaactactagaatcatgagggtcagccatacttttcccgtggtcgactgcaccgctgcctgctgtgacctgagttcatgcgacctggcttggtggttcgaggggcgctgctacttggtcagctgtcctcataaagagaactgcgaaccgaagaaaatgggacctatcaggtcgtatttgacctttgttctccgacctgtccagagaccggctcaactgctggactatggcgatatgatgctaaatcgcgggtcaccatctggaatatggggtgacagcccagaggacatccgaaaggacctgaccttcctggggaaggactgggggctcgaagagatgagcgagtatagcgatgactatagagagctcgaaaaagacctcctgcagccgtccggaaagcaggaaccacgaggttccgctgagtataccgattggggtttgctaccaggcagcgaaggggcctttaacagtagcgtgggtgatagccctgctgtgccagccgaaacccaacaggacccggaactgcactatctgaacgagtccgcgtctactcccgcccctaagctgccggaaagatccgtgctgttgccactgcctacaaccccttccagtggggaagtactggaaaaggagaaggctagtcagctgcaggagcaaagcagcaatagcagtggcaaggaagttttgatgccctcccacagcctgcctcccgcttcattggaactgagctccgtcacagtggagaagagtcctgtcctcactgtgacccctggctccaccgagcattccatcccaactccccctactagtgctgctcccagcgagagcaccccctctgaacttccaattagtcctaccaccgcgccacgcacagtgaaggaacttacggtctccgccggcgacaatctgattattacactgcctgataacgaggtggagttgaaagcctttgtggccccagcgccaccggtggagacaacatacaactatgagtggaacctaattagtcatcctaccgattaccaaggagagattaaacagggccacaaacagactttgaacctcagccagctttcagtcggtctgtatgtgttcaaagtcacagtgtcttctgaaaacgccttcggcgaagggttcgtcaacgtgaccgtgaagcccgctcggcgagtgaatctgccccctgtggccgtagtttccccacagctccaggagctgacgcttcctctgacgagtgcactgatagatggaagccagagcactgatgatactgagattgtaagctaccattgggaggagattaatggccccttcatcgaagagaaaacatccgtcgatagtccagttctgcggctgtccaacctcgaccccggaaactactcatttaggctgaccgtcacagacagcgatggggcaactaatagcaccaccgcagcactcatcgttaacaacgccgtggattaccctcccgtcgctaatgccggaccgaatcataccattaccctcccgcagaatagcatcacattaaatggaaaccagtcctccgatgatcaccagatcgtgctttatgaatggagtttaggtcccggctccgaaggcaagcacgtcgttatgcagggggtgcagactccgtacttgcacctctctgccatgcaagagggagattacactttccaactgaaggtgacagactcttcacggcaacagagcaccgctgtcgtgactgtcatagtccagcccgagaacaaccgcccacccgtagccgtggccgggcccgacaaggagttaatctttccagtcgagtcagccaccttagacggctcatcttcctccgatgaccatggcatcgttttctatcactgggagcatgttcggggccctagtgcagtggaaatggagaacatcgacaaggctatcgcaacggtgactggactacaagtgggcacttaccacttccgcctgaccgtgaaggaccaacaggggctttcctcaacatccactctgaccgtggccgtgaagaaggaaaacaacagcccacccagggccagagccgggggaaggcacgtgcttgtacttcccaacaactctattaccctggatgggagtaggagcactgatgatcagcgcatagtctcgtatctgtggatcagggacgggcagagccctgcagccggcgatgtgatcgatggaagcgaccactccgttgcattgcagctcactaatcttgtggaaggcgtatacacatttcatctcagggtgaccgattcacaaggtgccagtgacaccgacacagcgacagtcgaggtccagccagacccaaggaagagtggtcttgtagagctgacactgcaagtgggcgtaggacagttaacagagcaaagaaaggataccctggtgcgccaactcgccgttctgcttaatgtccttgactcagatatcaaggtccagaaaattcgggcccatagcgatctgagcacggtgatcgtgttctatgtccagagccgacccccattcaaggtgctgaaagcagcagaggttgctagaaacttacacatgcgtttatccaaggagaaagccgactttctgcttttcaaggtgcttagggtggatacagcaggatgtctgctgaagtgttcggggcatgggcattgcgatccgctcaccaaaaggtgcatctgctcccatctatggatggaaaacctgattcagagatacatctgggacggagagtcaaactgcgagtggtcaatcttttatgtcaccgtgctggccttcacattaattgtgctcacaggggggttcacttggctctgcatctgttgctgcaagagacagaagcgcaccaaaattcggaagaagaccaagtatacaatcctcgacaacatggacgagcaggagcggatggagcttagaccaaaatatgggattaagcacaggagcaccgaacacaattcatctctaatggtgtctgaaagcgaattcgactcggatcaagacaccatcttctccagagaaaagatggagcgcggcaaccccaaggtgtcgatgaatggcagcattaggaatggagcctcctttagctattgttccaaagaccgctag

SEQ ID NO: 182337 - DNA, 3084 bp, Artificial Sequence
  derived and/or modified sequence
atgcgggtgagccacaccttccccgtggtggactgcaccgccgcctgttgcgatctctccagttgcgatcttgcatggtggttcgagggtcgttgctacctggttagttgtccccacaaggaaaactgcgagcccaaaaagatggggccgattagatcctaccttacatttgtattgcgacccgttcagcgccccgcccagctgcttgactatggcgatatgatgctgaacagaggctcccctagcggcatctggggtgacagccccgaagatattcgcaaggatctgacctttctgggtaaggattgggggttggaggaaatgtcagaatattcagacgattacagagagctggagaaggacctgctgcagccctctggcaaacaggagccacgggggtctgctgaatataccgactgggggctgctgcccggaagtgagggggcatttaactccagtgtgggtgacagccccgctgtgcccgctgagactcaacaggatcccgaattgcattatctgaacgagtccgcaagcacacctgcgccaaagcttcccgagcggagtgttctgcttccattgcctaccacccctagttcgggcgaggttttggaaaaggagaaggctagccagcttcaggagcaatcctcaaatagctccgggaaagaagtgctaatgccttcccattccctaccacccgccagcttggaactttcctctgtgactgtggagaagtctccggtgctaactgtgacgcccgggagcacggaacactccatccccacaccacccacgtccgcagcaccgtcggaaagcaccccgtctgagctacctatttcacctacaactgcccctagaacagtgaaggaattaacagtcagtgccggggataacttaatcatcaccctaccagataatgaggtggagttgaaggccttcgttgccccagctccaccagtggagactacttataactacgaatggaatcttatatctcacccgaccgactatcaaggggaaatcaaacaggggcacaaacagacccttaatctgtcccagctgagtgtcggtctatatgtctttaaagtgactgtctccagcgagaacgccttcggtgaagggttcgtcaatgtcactgtcaaacccgcccgcagggtgaacttaccccccgtcgctgtagtgagcccccagctgcaggagttgaccctgcccctgacatcggctttaatcgatggatcacaatccacagacgacaccgagattgtgagctatcattgggaagagatcaacggaccattcatcgaggagaaaacgtctgtagatagccccgtactcagactaagtaatctggacccgggtaattatagtttccgcctgacagtgaccgattctgacggtgctaccaatagtaccaccgccgctcttattgttaacaacgctgtcgattatccccccgtggctaatgctggccctaaccacacgataaccctaccacagaattccatcaccttaaacggaaaccagagttcagacgatcatcagattgtgctgtacgaatggtcgttgggcccgggaagtgagggtaaacacgttgtaatgcaaggagtccagaccccatatctgcatctctctgccatgcaggagggagactacacgtttcagctgaaggtcactgattcttcaaggcagcagtccactgcggtggtgacagtgatcgttcagcctgagaataaccgacctccagtggctgttgcgggccctgacaaagagctgatattcccagtggagagtgcaaccttggacgggagctcgtccagtgatgatcacggcattgttttctaccattgggagcacgttcgcggtccgtcagctgtcgaaatggaaaacatcgataaagctatagctactgttaccggactgcaggttggaacctaccacttcagattaacagttaaagatcagcagggcctctctagtacttctaccttaaccgtggccgttaaaaaggagaataactctccacctcgtgcaagagctggagggaggcatgtcctggtgttgccgaacaacagtatcactttagacggaagccgctctaccgatgatcagcggattgtatcatatctgtggatccgggatggccagagtcctgcagctggcgatgttatcgatggtagcgaccactctgtggccttgcagctgaccaacctggtggagggcgtctatacctttcatcttcgtgtaactgattctcaaggcgcgtcggacactgatactgctaccgtggaggttcagcctgatccacggaaatcaggcctggtagagcttacactacaggtcggagtgggccaattgaccgagcagcgaaaggataccctggtacggcagctcgcggtgctcctgaatgttctagattccgatatcaaagtgcagaagattcgggcccacagtgaccttagtacagtgattgtattctacgtgcagagccgccccccttttaaggtgttaaaggccgcagaagtggcccggaatctgcatatgcgtttgtccaaagagaaagcggacttcctgctctttaaagtcctgagggtcgatacagcaggctgcctgctgaagtgctccggccacggtcactgtgaccccctcacaaaaaggtgcatatgcagccatctctggatggagaatctgattcaaagatacatttgggacggcgagtccaattgcgagtggagcatcttttacgtgaccgtacttgcttttacacttatcgtgctgactgggggctttacctggctgtgtatctgctgctgcaaaagacagaagcgtacaaagatcagaaaaaaaactaaatataccatcctcgacaacatggacgagcaggaaagaatggagctaagacctaaatacggcataaaacatcgaagcaccgagcacaactcaagtcttatggtgagcgagtctgaatttgattccgatcaagatacaatcttttctcgtgagaagatggagcgcgggaatccaaaagtgtctatgaacggatcaatcaggaatggggctagcttcagctattgctcaaaagacaggtag

SEQ ID NO: 182338 - DNA, 3219 bp, Artificial Sequence
  derived and/or modified sequence
atggccccccccaccggcgtgctgagcagcctgctgctgctggtgactattgcggggtgcgcgaggaagcagtgttctgagggacggacctacagcaacgccgtcataagtcccaacctagagaccaccaggattatgcgcgtgtctcacactttccccgtggttgattgcacggcggcctgttgcgatctgtcttcatgcgacctcgcctggtggtttgagggtaggtgttacttggtaagttgtcctcacaaagaaaactgtgagccaaagaagatgggacctatccgctcttatcttacctttgtcctgcgccctgttcagagacccgcacaactcctagactatggcgacatgatgttaaaccgagggtccccatccggcatatggggcgactccccagaggacattcgcaaggaccttaccttcctcggtaaggattggggcctggaggagatgtctgagtactctgacgattatcgcgaacttgaaaaagatctcttacaaccttcaggcaagcaggaaccaagggggtcagccgaatacactgattggggcctgctaccaggatcagagggagcgtttaactcttccgtgggggactctcctgccgtgccagctgaaacgcagcaggaccctgaactgcactatctgaatgagagtgcgtctactccagcccccaagcttcctgaacgttcagtgctcctgccactcccaactacgccatcatctggagaagtattggaaaaagagaaggctagccagttacaggaacagagtagtaactcctccggcaaggaggtacttatgcctagccacagtttaccacccgcctctttggagctgtccagtgtgaccgtcgagaagtcccccgtcctgacagtgacgcctggcagtaccgagcactctatcccaaccccaccaacaagcgctgcacccagcgagagcaccccttcggagcttccaatctctccaaccaccgcccctaggaccgtgaaggaattgaccgttagcgccggtgacaatctaattatcacactgcccgacaacgaagttgaactgaaagcctttgtggcccccgccccgcctgtagaaactacatacaattatgagtggaacctgataagccaccccacagattaccagggtgaaatcaagcagggacataagcagactctcaacctttcccagctgtctgtgggtttatatgtattcaaggtgaccgtctccagcgagaacgccttcggagaggggtttgtgaatgtaacggtcaaacccgcccgccgcgttaacctgcctcctgtcgcggtcgtgtctccgcagctgcaagaactcacactccccttaacttccgccttgattgacggcagtcagagtaccgacgatacagaaattgtctcctaccactgggaggagataaatggcccttttatagaggaaaaaacaagtgtcgactctcctgtgttacgcttaagcaacttagatccaggcaactactcattcaggctgacagtcacagattcagacggagccactaattctacaaccgcagctctcatcgtgaacaatgccgtcgactatcctcccgtggcgaatgctggacccaatcatacaattaccctgccgcaaaattctataacactcaacggtaaccagagtagcgatgaccatcagatcgtcctgtatgaatggagtttggggcctggcagtgagggaaaacatgtggttatgcaaggggtgcaaaccccctaccttcatctaagcgccatgcaggaaggggattacaccttccagcttaaagtgaccgattcttctagacagcagtctaccgctgttgttactgttattgtacagccagagaacaacaggccccccgtggcggtcgctgggccagataaggagttgattttcccagtcgaatccgctacactcgacggatcctcatcatccgacgaccacggaatcgtgttttatcattgggagcatgtgcgcggccccagcgccgtcgaaatggagaatatcgataaggcaattgctaccgtgacaggtctgcaggttggcacctaccactttcgattgacggtgaaggaccagcaggggctctcttccaccagcaccctgacagtcgccgtcaagaaggaaaacaatagtcctcctcgcgcacgtgccggaggcaggcacgtgcttgtactgccaaataacagcataacactggacggaagccgctcaacagacgatcagagaattgtcagctatctttggattcgagatggccagtctccagccgccggcgatgtcatcgatgggagcgatcatagtgtggccctccagctgaccaatctggtggagggggtttatacttttcacctgagagtcaccgactcgcagggggcttctgatacagataccgccacagtggaggtccagcccgatcctcgtaaaagcggtctggtcgaattgaccttgcaggtgggtgtcggccagctcacggagcagcgaaaggataccctggtgcgacagcttgccgtgttattaaacgtgcttgactccgacatcaaggtgcagaagattcgagctcatagcgatctcagcaccgtgattgttttttatgtgcagagtcgacctccattcaaggttctcaaggctgcggaggtggcccggaacttacacatgagattatctaaggagaaggcggacttcctattatttaaagtgctccgcgtggataccgccggatgtctgttgaaatgtagcgggcatgggcactgcgacccactaaccaaaaggtgcatatgcagccacctgtggatggaaaatctgatacagaggtatatttgggacggggagtcgaactgcgaatggagcattttctacgttacggtgcttgcatttaccctcatcgtgttgaccggcggatttacctggctgtgcatctgttgttgtaaacgccagaaacgcaccaaaatccggaaaaaaaccaaatacaccattcttgacaacatggacgagcaggagagaatggaacttcgccctaagtatgggatcaagcatcgatcaactgagcacaattccagcctgatggtgtcggagtcagagtttgactccgaccaggatactatcttcagtcgagaaaagatggagcgagggaaccccaaggtcagtatgaacggctccattagaaacggagccagcttttcatactgcagcaaggatcgctag

SEQ ID NO: 182339 - DNA, 3219 bp, Artificial Sequence
  derived and/or modified sequence
atggcccctcctactggcgtcttgtccagtttgctgttgctggtgactatcgcaggctgcgcacgcaagcagtgttccgagggtcgaacctactcgaacgccgtcatatcccccaacttggaaacaactcgaattatgcgggtatcacacacttttcctgtggtggattgcacagcagcctgttgtgacttgagcagctgcgatctagcctggtggttcgagggcagatgctatttggtctcctgcccccacaaggaaaattgcgagccaaagaagatgggcccaattaggagttatttgactttcgtcttgaggcccgttcaacgacctgcacagctccttgactatggagacatgatgctgaaccgtggaagcccgagtgggatttggggcgatagcccagaggatatccggaaggatctgactttcctgggcaaagactgggggctggaagagatgtcggaatattctgacgactaccgtgagctggagaaggatctgctacagccatcgggcaagcaggaaccgcgaggatctgctgagtacaccgattggggtcttttgcctggctcagaaggcgcatttaattcatccgtcggggatagtcctgccgtgcctgccgaaacgcagcaggatccagaattgcattaccttaacgaatccgcctcgactccagccccaaagttacccgagcggtccgtactgctgccattgccaacaacaccctcttcaggggaggtgttggagaaggaaaaggcaagccaactccaggaacaatccagtaactctagtggcaaggaggtcctaatgcccagtcattcactgccaccagctagcttggagctgagttccgtgaccgtggagaagtctccagtgctgacggttacccccggttccaccgagcacagcatccctactcctccgacatcagcagccccaagtgaaagcacccccagcgaactacccatctcccccacaactgccccaagaaccgtgaaggagctgacagtgtctgctggcgataacctgatcattacgcttcctgataatgaggtcgaattaaaagccttcgtggcacccgctcctccagtggaaactacatataactacgagtggaatcttattagccatcctacagattaccagggcgaaattaagcaaggacacaaacaaaccctgaatctgagccagctgagcgtcggactgtatgtattcaaggtgacggtgagctccgaaaacgcctttggggagggttttgtgaatgttactgttaagcccgcaaggagggtgaatctccctccagttgcggtcgtttccccacagcttcaggagctcactctgcccctgacttcagccctgatagacggctctcagtcaaccgatgacaccgagatcgtgagctaccactgggaggaaatcaatggaccatttattgaagagaagactagtgtggatagtccagtgctgaggctgtcaaatctggaccctggcaattactcgtttcgactgaccgtcaccgactccgacggcgctaccaatagcaccaccgccgctcttattgtgaacaacgctgtcgactatcccccagtcgctaatgccggacccaatcatactatcacgctgcctcagaactctattactctgaacgggaaccaaagcagcgatgaccatcagatcgtgctgtatgaatggtcgctggggcctggatctgaaggcaagcacgtggtaatgcagggagtgcagaccccatacctgcatctgtctgctatgcaggagggagattatacattccagttgaaggtgacggacagctccaggcagcagtcaacagccgtggtaacagttatagtgcagccagaaaataatagaccccctgttgccgttgctggcccagataaggagctgattttcccagtggagtctgccacgctggacggcagctctagctcggatgaccacggtattgtgttctaccactgggaacatgtgagaggcccttctgccgttgagatggagaatattgacaaggctatcgccaccgtcacgggcctgcaggtcggaacgtatcacttccgactgacagtgaaggatcaacagggcctgagctcaacctcaacactcaccgtcgcagtgaagaaggagaataatagtccacccagggctcgggctgggggtcggcacgtccttgtgctaccaaataactcaatcaccttggatggttctcggtcaacagacgatcagaggatcgtgtcttatctttggatccgagatgggcaatctccggctgccggtgatgttattgacggcagcgatcatagcgttgctttgcaattaacgaatctggtggagggtgtttacacattccatttgagggtaaccgacagtcagggggcatctgacacagacactgcaacagtcgaagtgcagcctgatcccaggaaatctggattggtcgagcttactttgcaggtaggcgtgggccagctcactgaacagaggaaagatacactcgtgcgccagctggctgtcctcttaaatgtgttagacagcgatatcaaggtgcagaagattcgggcacatagtgacctatctacggtaatcgtattttacgtccagtcccggccacccttcaaggtcctcaaagccgcagaggtggcacgaaacctgcacatgaggctgtctaaggagaaggcggatttcttactgtttaaggtgctcagggtagacaccgccggttgtctgctcaaatgcagcgggcacggccactgtgaccctttgacaaagcggtgcatctgcagccatctgtggatggagaacctgatacagcgctacatatgggatggagaaagcaactgtgagtggtctatcttctacgtgaccgttcttgcattcactttgatcgtgctcaccggcggttttacatggctgtgtatctgctgttgtaagagacagaagcgtacaaagatcagaaagaagacgaagtacaccattctagataacatggatgaacaggagcgcatggagcttcgcccaaaatatggcatcaaacatcgaagtactgagcacaattcctccctgatggtcagcgagtccgagttcgatagcgaccaggacactatcttctctagggagaagatggagcggggtaaccccaaggtgtcgatgaatggctctatccgcaatggcgctagcttttcatattgttctaaggatagatag

SEQ ID NO: 182340 - DNA, 3084 bp, Artificial Sequence
  derived and/or modified sequence
atgagagtatctcacacctttcccgtggtggattgcacagcggcatgttgcgacctgagctcctgcgatttagcctggtggttcgagggcaggtgctacttggtcagctgcccgcacaaggagaattgtgagcccaagaagatggggccaatccgctcctatctgacattcgtcctccggcctgtacagcggccagcccagcttctggattatggcgatatgatgctgaaccgtggatctccatctgggatttggggcgactcacctgaggacattcggaaggacttaacgttcttgggcaaagactggggcctggaggaaatgagtgaatattccgatgattaccgagaacttgagaaagatcttctccagccttccgggaaacaggaaccccgtggcagcgccgagtatactgattgggggcttctcccaggtagcgagggggcatttaatagctccgtcggagatagcccagctgtgccggcagagacccaacaagacccagaattgcactacttgaatgaatctgcatctacacccgcaccaaagctcccagaacggtctgttctactccccctccctacaacgccatcatccggcgaagttttggagaaggagaaggcctcccagctacaggagcagtccagcaattcctccgggaaggaagtgttgatgccgtcacatagtctccctcctgcaagtctggagctctcatcagtgaccgttgagaagtctcctgtgttgactgtgactcccggtagtaccgagcatagtatccccacccccccaacaagcgccgctcctagtgaaagcacaccctctgagttgcctatcagtccaacaacagcccctcgcactgtcaaagagctcacggtttccgctggagataatcttatcatcaccctgcccgacaatgaagtggagcttaaggcgtttgtggctcccgctcctccggttgaaacaacatataactatgaatggaatctgatatctcatcctaccgactatcagggcgagatcaagcaggggcataaacagactctgaatctaagccagctgtctgtcgggctatatgtgtttaaggtgactgtctccagtgaaaatgctttcggagaaggatttgttaacgtgaccgtgaagccagctcggagggttaacctgccccctgtggcagtggtaagcccccagctgcaggaactgacccttcccctgacgagcgcactgatcgacggatcacagtctacagacgacaccgagatagtgagttatcactgggaggagatcaacggaccattcattgaggaaaaaaccagtgttgacagtcccgtattgcgcctttccaacctggaccccggaaattacagttttaggctcactgtcactgactcagacggcgctactaacagtacaaccgcggcactgattgttaacaacgcagtcgattatccccctgttgcaaatgcgggaccaaaccatacaatcaccttgccccagaactccatcacattgaatggaaatcagagctctgacgaccaccaaatagttctttatgagtggtcacttgggccaggaagcgagggaaagcacgtcgtgatgcagggcgttcagactccttatcttcacttgtccgcaatgcaagaaggagactacactttccagctcaaggtaacagattcctcccgacagcagtcaaccgctgtcgttaccgtgatagtccagccagaaaacaaccgcccacccgttgcggttgctggccctgataaagagctgatcttcccagtggagtctgctaccctggatgggtcttcaagctccgacgaccacgggatcgtattctaccattgggagcacgtccggggtccttccgccgtcgagatggaaaacatcgacaaggcaattgcaaccgtgaccggtctccaggtgggaacataccatttcagactcaccgtcaaagaccaacagggtttgtcgtctacctctacactcaccgtggccgtgaaaaaggaaaataacagccctccaagggccagggcgggtgggagacacgtgctggttctgcccaacaattccatcactctggacggctctcggtcgaccgacgatcagcgaattgtgtcttatttgtggatccgcgacggccaaagtccagcagccggagatgtaatcgacggctccgatcattccgtcgccctgcagctgacaaatctggttgaaggagtatacacttttcatctgcgcgtgactgatagccagggcgcttcggatacagacacagctaccgtagaggtccagcccgacccgagaaaatctggcctcgtggaactaacactgcaggtgggcgtggggcagttaaccgaacagaggaaagacacgctcgtgcgccagctggccgtgcttcttaatgtactggacagcgacatcaaggtgcaaaagattcgtgcacacagtgatttgagtacggtgatcgtcttctatgtccagagtcgccctcccttcaaagtcctgaaggccgctgaagttgcgagaaacttacacatgagactgtccaaggagaaggctgatttcctgcttttcaaagttcttcgtgtcgacacagccggatgcctcttgaaatgctctggacatggccactgcgatccgctcaccaaaagatgcatctgcagccatttgtggatggagaatctgatccagcgttatatttgggacggggaatcaaactgcgaatggtcgatcttttacgtcacagtgttagcgttcacgctgatcgtcctgacaggcggattcacctggttatgtatctgctgctgcaaacgccagaaacggactaagattcggaaaaaaacgaaatacacaattctcgataatatggacgaacaggaacgcatggaattgcgaccaaagtacgggatcaagcacagaagcacagaacataattcgtctctcatggtttcggagtctgaatttgatagtgatcaggacactatcttcagtcgggaaaaaatggagaggggaaacccaaaagttagtatgaacgggtctatccgtaatggcgcttcattctcctactgtagtaaggaccgctag

SEQ ID NO: 182341 - DNA, 3219 bp, Artificial Sequence
  derived and/or modified sequence
atggcccctcctactggtgtgctctctagtctgctgttgctcgtaactatagccggttgcgctcggaaacagtgctcggaagggagaacctactctaatgccgtcatcagccccaacctggagacgacacggattatgagagtgagtcacactttcccggtcgtggattgtacagcagcatgttgcgacctgagctcatgcgatctcgcctggtggttcgaaggcagatgctatctagtcagctgtccacataaagaaaactgtgaaccaaagaaaatgggaccaattcgttcctacctcactttcgtcctaaggccagtgcaacgacctgcccagctgctagactatggagacatgatgctgaaccgaggctctcccagcggtatctggggggattccccagaggatatcagaaaggacctgacctttcttggcaaggactggggtctggaggagatgtctgaatacagcgacgattatcgagagctcgagaaagatctgctgcagccatctggcaaacaggagccccgaggttccgcggaatataccgattggggactactgcctggctctgaaggcgctttcaactcaagtgtgggcgacagcccagctgtccctgctgaaacgcaacaggaccccgagctgcattatctgaacgagagtgccagcaccccagctcccaaacttccagagcggtccgtcctgttgcccctcccaactacccctagtagtggggaggtacttgagaaggagaaggcaagtcaactgcaggaacagagctccaattcctctggaaaggaggtgctgatgccgagccatagcttgccacctgcctccctcgagttgtcatccgtcacagttgagaagtcccctgtgctgacagtgacgcctgggtcaaccgaacacagcatccccacaccgcctacgtccgcagctccctccgaatctaccccttctgagttaccaatttcaccgaccaccgctcctcgtaccgtaaaggaactgaccgtcagcgctggtgacaatctcattattacattgccggataacgaggtggagctaaaagcattcgtcgcccctgcgccaccagtggaaacaacgtacaactatgaatggaacttaataagccaccctacagattaccaaggcgagatcaagcaggggcataaacaaaccctcaatctgagtcagctgtcagttggtctctacgtgttcaaggtgactgtcagctccgagaacgctttcggggagggattcgtcaacgttaccgtgaaacccgcacgccgagtgaacttgcctccagttgccgttgtgagccctcagctgcaggaattaaccctgcccctgacgagtgcgctgatcgacggttcccaaagtacggacgatacggaaattgtgtcataccactgggaagagatcaacgggcctttcattgaggagaagacttctgttgatagccctgttcttcgcctgagtaatctagatccgggtaactacagcttccgactgactgtcaccgactcagacggggctaccaactccacaacagccgcactgatcgtgaacaatgccgtggactacccacccgttgccaacgccggacccaatcacactattactctccctcaaaactcaatcacccttaacggaaatcaatcctccgatgaccatcagatagtgctgtacgagtggtcattagggccaggatccgagggtaagcacgtggtcatgcagggcgtgcagactccgtatctacatctcagtgcgatgcaagagggcgattacacattccagctcaaagtgacagattctagcaggcaacagagcacggctgtcgtgacagtgattgtgcagcctgaaaacaatcggccaccagtcgcagtggccggaccagataaggaactgatttttcccgtggagtccgctacactggacggttctagctcctcagacgaccatgggatcgtcttttatcactgggagcacgtcaggggaccgagcgccgtagaaatggaaaatatagacaaggcaattgccactgtcacgggcttgcaagtcggtacctatcatttccgactaaccgtgaaggaccaacaaggattgtcttcgactagcaccttgacagtggccgtgaagaaggaaaacaatagtcccccacgcgctagggcagggggaaggcatgttctggttctgcctaacaacagcataacacttgatggatcacgttcgacggacgaccaacgaatcgtgagttacctttggatcagggacgggcagtctcctgctgcaggagatgtgatagacggatccgatcatagcgtggcattacagttaaccaacttggtggagggtgtgtatacattccatctgagggtgaccgattcccaaggcgcaagtgacactgatactgccaccgtggaggtgcagcctgatcctcgcaagtctggcctcgtggaactcaccctccaggtgggtgtgggccagttgacagagcaaagaaaagatacgcttgtgagacaactggcagtcctgctcaacgtgctggactccgatatcaaggttcagaagattagggctcactcagatctgagtaccgttatcgtgttttacgtgcagtcccgtccacctttcaaagtgctgaaggccgctgaggtggctcgcaatctccatatgcgcctctcgaaggagaaagctgattttctgctgttcaaagtcctgcgcgtggacaccgcgggatgcctgctaaaatgttccgggcatgggcactgcgatcctctaacaaagcgctgcatttgctctcatctatggatggaaaacctgatccaaagatacatctgggatggggaatctaactgtgagtggtcgatattttatgtgaccgtgttagcattcaccctcatcgtccttactgggggttttacctggctgtgtatctgctgttgtaagcgccagaaacgaaccaaaatacggaagaagaccaaatatacaattctcgataacatggacgagcaagaaagaatggaactgaggccaaagtacggaatcaaacacaggagtaccgagcataatagttcactgatggtgtcagaaagcgaattcgattccgaccaggatacaatcttctcacgggagaagatggagagagggaaccctaaagtttcaatgaatggatcaattcggaacggtgcgtccttttcctattgttctaaggatagatag

SEQ ID NO: 182342 - DNA, 6802 bp, Artificial Sequence
  derived and/or modified sequence
gctgccgcgggcggtgggcggggatcccccgggggtgcaaccttgctccacctgtgctgccctcggcgggcctggctggccccgcgcagagcggcggcggcgctcgctgtcactgccggaggtgagagcgcagcagtagcttcagcctgtcttgggcttggtccagattcgctcctctggggctacgtcccggggaagaggaagcgaggattttgctggggtggggctgtacctcttaacagcaggtgcgcgcgcgagggtgtgaacgtgtgtgtgtgtgtgtgtgtgtgtgtgtgtgtgtgtgtgtgtgtgtgtaagacctgcgatgacgacgaggaggaacaagtgggacggcgagtgatgctcagggccagcagcaacgcatggggcgagcttcagtgtcgccagcagtgaccacagttcttgaggccaaatctggctcctaaaaaacatcaaaggaagcttgcaccaaactctcttcagggccgcctcagaagcctgccatcacccactgtgtggtgcacaatggcgccccccacaggtgtgctctcttcattgctgctgctggtgacaattgcaggttgtgcccgtaagcagtgcagcgaggggaggacatattccaatgcagtcatttcacctaacttggaaaccaccagaatcatgcgggtgtctcacaccttccctgtcgtagactgcacggccgcttgctgtgacctgtccagctgtgacctggcctggtggttcgagggccgctgctacctggtgagctgcccccacaaagagaactgtgagcccaagaagatgggccccatcaggtcttatctcacttttgtgctccggcctgttcagaggcctgcacagctgctggactatggggacatgatgctgaacaggggctccccctcggggatctggggggactcacctgaggatatcagaaaggacttgacctttctaggcaaagattggggcctagaggagatgtctgagtactcagatgactaccgggagctggagaaggacctcttgcaacccagtggcaagcaggagcccagagggagtgccgagtacacggactggggcctactgccgggcagcgagggggccttcaactcctctgttggagacagtcctgcggtgccagcggagacgcagcaggaccctgagctccattacctgaatgagtcggcttcaacccctgccccaaaactccctgagagaagtgtgttgcttcccttgccgactactccatcttcaggagaggtgttggagaaagaaaaggcttctcagctccaggaacaatccagcaacagctctggaaaagaggttctaatgccttcccatagtcttcctccggcaagcctggagctcagctcagtcaccgtggagaaaagcccagtgctcacagtcaccccggggagtacagagcacagcatcccaacacctcccactagcgcagccccctctgagtccaccccatctgagctacccatatctcctaccactgctcccaggacagtgaaagaacttacggtatcggctggagataacctaattataactttacccgacaatgaagttgaactgaaggcctttgttgcgccagcgccacctgtagaaacaacctacaactatgaatggaatttaataagccaccccacagactaccaaggtgaaataaaacaaggacacaagcaaactcttaacctctctcaattgtccgtcggactttatgtcttcaaagtcactgtttctagtgaaaacgcctttggagaaggatttgtcaatgtcactgttaagcctgccagaagagtcaacctgccacctgtagcagttgtttctccccaactgcaagagctcactttgcctttgacgtcagccctcattgatggcagccaaagtacagatgatactgaaatagtgagttatcattgggaagaaataaacgggcccttcatagaagagaagacttcagttgactctcccgtcttacgcttgtctaaccttgatcctggtaactatagtttcaggttgactgttacagactcggacggagccactaactctacaactgcagccctaatagtgaacaatgctgtggactacccaccagttgctaatgcaggaccaaatcacaccataactttgccccaaaactccatcactttgaatggaaaccagagcagtgacgatcaccagattgtcctctatgagtggtccctgggtcctgggagtgagggcaaacatgtggtcatgcagggagtacagacgccataccttcatttatctgcaatgcaggaaggagattatacatttcagctgaaggtgacagattcttcaaggcaacagtctactgctgtggtgactgtgattgtccagcctgaaaacaatagacctccagtggctgtggccggccctgataaagagctgatcttcccagtggaaagtgctaccctggatgggagcagcagcagcgatgaccacggcattgtcttctaccactgggagcacgtcagaggccccagtgcagtggagatggaaaatattgacaaagcaatagccactgtgactggtctccaggtggggacctaccacttccgtttgacagtgaaagaccagcagggactgagcagcacgtccaccctcactgtggctgtgaagaaggaaaataatagtcctcccagagcccgggctggtggcagacatgttcttgtgcttcccaataattccattactttggatggttcaaggtctactgatgaccaaagaattgtgtcctatctgtggatccgggatggccagagtccagcagctggagatgtcatcgatggctctgaccacagtgtggctctgcagcttacgaatctggtggagggggtgtacactttccacttgcgagtcaccgacagtcagggggcctcggacacagacactgccactgtggaagtgcagccagaccctaggaagagtggcctggtggagctgaccctgcaggttggtgttgggcagctgacagagcagcggaaggacacccttgtgaggcagctggctgtgctgctgaacgtgctggactcggacattaaggtccagaagattcgggcccactcggatctcagcaccgtgattgtgttttatgtacagagcaggccgcctttcaaggttctcaaagctgctgaagtggcccgaaatctgcacatgcggctctcaaaggagaaggctgacttcttgcttttcaaggtcttgagggttgatacagcaggttgccttctgaagtgttctggccatggtcactgcgaccccctcacaaagcgctgcatttgctctcacttatggatggagaaccttatacagcgttatatctgggatggagagagcaactgtgagtggagtatattctatgtgacagtgttggcttttactcttattgtgctaacaggaggtttcacttggctttgcatctgctgctgcaaaagacaaaaaaggactaaaatcaggaaaaaaacaaagtacaccatcctggataacatggatgaacaggaaagaatggaactgaggcccaaatatggtatcaagcaccgaagcacagagcacaactccagcctgatggtatccgagtctgagtttgacagtgaccaggacacaatcttcagccgagaaaagatggagagagggaatccaaaggtttccatgaatggttccatcagaaatggagcttccttcagttattgctcaaaggacagataatggcgcagttcattgtaaagtggaaggaccccttgaatccaagaccagtcagtgggagttacagcacaaaacccactcttttagaatagttcattgaccttcttccccagtgggttagatgtgtatccccacgtactaaaagaccggtttttgaaggcacaaaacaaaaactttgctcttttaactgagatgcttgttaatagaaataaaggctgggtaaaactctaaggtatatacttaaaagagttttgagtttttgtagctggcacaatctcatattaaagatgaacaacgatttctatctgtagaaccttagagaaggtgaatgaaacaaggttttaaaaagggatgatttctgtcttagctgctgtgattgcctctaaggaacagcattctaaacacggtttctcttgtaggacctgcagtcagatggctgtgtatgttaaaatagcttgtctaagaggcacgggccatctgtggaggtacggagtcttgcatgtagcaagctttctgtgctgacggcaacactcgcacagtgccaagccctcctggtttttaattctgtgctatgtcaatggcagttttcatctctctcaagaaagcagctgttggccattcaagagctaaggaagaatcgtattctaaggactgaggcaatagaaaggggaggaggagcttaatgccgtgcaggttgaaggtagcattgtaacattatcttttctttctctaagaaaaactacactgactcctctcggtgttgtttagcagtatagttctctaatgtaaacggatccccagtttacattaaatgcaatagaagtgattaattcattaagcatttattatgttctgtaggctgtgcgtttggactgccatagatagggataacgactcagcaattgtgtatatattccaaaactctgaaatacagtcagtcttaacttggatggcgtggttatgatactctggtccccgacaggtactttccaaaataacttgacatagatgtattcacttcatatgtttaaaaatacatttaagtttttctaccgaataaatcttatttcaaacatgaaagacaattaaaacattcccacccacaaagcagtactcccgagcaattaactggagttaattgtagcctgctacgttgactggttcagggtagttccccatccacccttggtcctgaggctggtggccttggtggtgcccttggcattttttgtgggaagattagaatgagagatagaaccagtgttgtggtaccaagtgtgagcacacctaaacaatatcctgttgcacaatgcttttttaacacatgggaaaactaggaatgcattgctgatgaagaagcaaggtatttaaacaccagggcaggagtgccagagaaaatgtttccccatgggttcttaaaaaaaattcagcttttaggtgcttttgtcatctcccgcagtattcatcctcatgggaccatcttatttttacttattgtaatttactggggaaaggcagaactaaaaagtgtgtcattttatttttaaaataattgctttgcttatgcctacactttctgtataactagccaattcaatactgtctatagtgttagaaggaaaatgtgatttttttttttaaccagtattgagcttcataagcctagaatctgccttatcaggtgaccagggttatggttgtttgcatgcaaatgtgaatttctggcataggggacagcagcccaaatgtaaagtcatcgggcgtaatgaggaagaagggagtgaacatttaccgctttatgtacataacatatgcagtttacatactcatttgatccttataatcaaccttgaagaggagatactatcattcttatgttgcagatagccctctgaaggcccagagaggttaaataacttcccagaggtcatggccaagaagtagtggctccaagaactgaatgcaaattttttaaactgtagagttctgctttccactaaacaaagaactcctgccttgatggatggagggcaaattctggtggaacttttgggccacctgaaagttctattcccaggactaagaggaatttcttttaatggatccagagagccaaggtcagagggagagatggcctgcatagtctcctgtggatcacacccgggccacccctccctctaggtttacagtggacttcttctgcccctcctccttttctgtccttggccatctcagcctggcctctctgatccttccatcacagaaggatcttgaatctctgggaaatcaaacatcacagtagtgatcagaaagtgagtcctgtcttgtcaccccatttctcatcagaacaaagcacgagatggaatgaccaaccagcattcttcatggtggactgcttatcattgaggatctttgggagataaagcacgctaagagctctggacagagaaaaacaggccctagaatatgggagtgggtgtttgtagggctcacaggctaacaagcactttagttgctggtttacattcaatgaaggaggattcatacccatggcattacaaggctaagcatgtgtatgactaaggaactatctgaaaaacatgcagcaaggtaagaaaatgtaccactcaacaagccagtgatgccaccttttgtgcgcggggaggagagtgactaccattgttttttgtgtgacaaagctatcatggactattttaatcttggttttattgcttaaaatatattatttttccctatgtgttgacaaggtatttctaatatcacactattaaatatatgcactaatctaaataaaggtgtctgtattttctgtaatgcttatttttagggggaaatttgttttctttatgcttcagggtagagggatttcccttgagtataggtcagcaaactgtggcctacagcctgtgtgtgcacgccccatgagccgaaaagtgggtcttatgttttcaaatggttaaaaataaataaaaaaatttgaaacatgtgaactatatgacattcagatttgtgttcataaataaagttttattggaacata

SEQ ID NO: 182343 - DNA, 3563 bp, Artificial Sequence
  derived and/or modified sequence
atctacttcccagagcgcctggccgagaaataggaaagagggcagccagtaggcaggccaatacccaacaaaagtagaatcgagacgccctgagttcagaagttcttgaggccaaatctggctcctaaaaaacatcaaaggaagcttgcaccaaactctcttcagggccgcctcagaagcctgccatcacccactgtgtggtgcacaatggcgccccccacaggtgtgctctcttcattgctgctgctggtgacaattgcaggttgtgcccgtaagcagtgcagcgaggggaggacatattccaatgcagtcatttcacctaacttggaaaccaccagaatcatgcgggtgtctcacaccttccctgtcgtagactgcacggccgcttgctgtgacctgtccagctgtgacctggcctggtggttcgagggccgctgctacctggtgagctgcccccacaaagagaactgtgagcccaagaagatgggccccatcaggtcttatctcacttttgtgctccggcctgttcagaggcctgcacagctgctggactatggggacatgatgctgaacaggggctccccctcggggatctggggggactcacctgaggatatcagaaaggacttgacctttctaggcaaagattggggcctagaggagatgtctgagtactcagatgactaccgggagctggagaaggacctcttgcaacccagtggcaagcaggagcccagagggagtgccgagtacacggactggggcctactgccgggcagcgagggggccttcaactcctctgttggagacagtcctgcggtgccagcggagacgcagcaggaccctgagctccattacctgaatgagtcggcttcaacccctgccccaaaactccctgagagaagtgtgttgcttcccttgccgactactccatcttcaggagaggtgttggagaaagaaaaggcttctcagctccaggaacaatccagcaacagctctggaaaagaggttctaatgccttcccatagtcttcctccggcaagcctggagctcagctcagtcaccgtggagaaaagcccagtgctcacagtcaccccggggagtacagagcacagcatcccaacacctcccactagcgcagccccctctgagtccaccccatctgagctacccatatctcctaccactgctcccaggacagtgaaagaacttacggtatcggctggagataacctaattataactttacccgacaatgaagttgaactgaaggcctttgttgcgccagcgccacctgtagaaacaacctacaactatgaatggaatttaataagccaccccacagactaccaaggtgaaataaaacaaggacacaagcaaactcttaacctctctcaattgtccgtcggactttatgtcttcaaagtcactgtttctagtgaaaacgcctttggagaaggatttgtcaatgtcactgttaagcctgccagaagagtcaacctgccacctgtagcagttgtttctccccaactgcaagagctcactttgcctttgacgtcagccctcattgatggcagccaaagtacagatgatactgaaatagtgagttatcattgggaagaaataaacgggcccttcatagaagagaagacttcagttgactctcccgtcttacgcttgtctaaccttgatcctggtaactatagtttcaggttgactgttacagactcggacggagccactaactctacaactgcagccctaatagtgaacaatgctgtggactacccaccagttgctaatgcaggaccaaatcacaccataactttgccccaaaactccatcactttgaatggaaaccagagcagtgacgatcaccagattgtcctctatgagtggtccctgggtcctgggagtgagggcaaacatgtggtcatgcagggagtacagacgccataccttcatttatctgcaatgcaggaaggagattatacatttcagctgaaggtgacagattcttcaaggcaacagtctactgctgtggtgactgtgattgtccagcctgaaaacaatagacctccagtggctgtggccggccctgataaagagctgatcttcccagtggaaagtgctaccctggatgggagcagcagcagcgatgaccacggcattgtcttctaccactgggagcacgtcagaggccccagtgcagtggagatggaaaatattgacaaagcaatagccactgtgactggtctccaggtggggacctaccacttccgtttgacagtgaaagaccagcagggactgagcagcacgtccaccctcactgtggctgtgaagaaggaaaataatagtcctcccagagcccgggctggtggcagacatgttcttgtgcttcccaataattccattactttggatggttcaaggtctactgatgaccaaagaattgtgtcctatctgtggatccgggatggccagagtccagcagctggagatgtcatcgatggctctgaccacagtgtggctctgcagcttacgaatctggtggagggggtgtacactttccacttgcgagtcaccgacagtcagggggcctcggacacagacactgccactgtggaagtgcagccagaccctaggaagagtggcctggtggagctgaccctgcaggttggtgttgggcagctgacagagcagcggaaggacacccttgtgaggcagctggctgtgctgctgaacgtgctggactcggacattaaggtccagaagattcgggcccactcggatctcagcaccgtgattgtgttttatgtacagagcaggccgcctttcaaggttctcaaagctgctgaagtggcccgaaatctgcacatgcggctctcaaaggagaaggctgacttcttgcttttcaaggtcttgagggttgatacagcaggttgccttctgaagtgttctggccatggtcactgcgaccccctcacaaagcgctgcatttgctctcacttatggatggagaaccttatacagcgttatatctgggatggagagagcaactgtgagtggagtatattctatgtgacagtgttggcttttactcttattgtgctaacaggaggtttcacttggctttgcatctgctgctgcaaaagacaaaaaaggactaaaatcaggaaaaaaacaaagtacaccatcctggataacatggatgaacaggaaagaatggaactgaggcccaaatatggtatcaagcaccgaagcacagagcacaactccagcctgatggtatccgagtctgagtttgacagtgaccaggacacaatcttcagccgagaaaagatggagagagggaatccaaaggtttccatgaatggttccatcagaaatggagcttccttcagttattgctcaaaggacagataatggcgcagttcattgtaaagtggaaggaccccttgaatccaagaccagtcagtgggagttacagcacaaaacccactcttttagaatagttcattgaccttcttccccagtgggttagatgtgtatccccacgtact

SEQ ID NO: 182344 - DNA, 3219 bp, Artificial Sequence
  derived and/or modified sequence
atggccccccccaccggcgtgctgagcagcctgctgctgctggtgaccatcgccggctgcgccagaaagcagtgcagcgagggcagaacctacagcaacgccgtgatcagccccaacctggagaccaccagaatcatgagagtgagccacaccttccccgtggtggactgcaccgccgcctgctgcgacctgagcagctgcgacctggcctggtggttcgagggcagatgctacctggtgagctgcccccacaaggagaactgcgagcccaagaagatgggccccatcagaagctacctgaccttcgtgctgagacccgtgcagagacccgcccagctgctggactacggcgacatgatgctgaacagaggcagccccagcggcatctggggcgacagccccgaggacatcagaaaggacctgaccttcctgggcaaggactggggcctggaggagatgagcgagtacagcgacgactacagagagctggagaaggacctgctgcagcccagcggcaagcaggagcccagaggcagcgccgagtacaccgactggggcctgctgcccggcagcgagggcgccttcaacagcagcgtgggcgacagccccgccgtgcccgccgagacccagcaggaccccgagctgcactacctgaacgagagcgccagcacccccgcccccaagctgcccgagagaagcgtgctgctgcccctgcccaccacccccagcagcggcgaggtgctggagaaggagaaggccagccagctgcaggagcagagcagcaacagcagcggcaaggaggtgctgatgcccagccacagcctgccccccgccagcctggagctgagcagcgtgaccgtggagaagagccccgtgctgaccgtgacccccggcagcaccgagcacagcatccccaccccccccaccagcgccgcccccagcgagagcacccccagcgagctgcccatcagccccaccaccgcccccagaaccgtgaaggagctgaccgtgagcgccggcgacaacctgatcatcaccctgcccgacaacgaggtggagctgaaggccttcgtggcccccgccccccccgtggagaccacctacaactacgagtggaacctgatcagccaccccaccgactaccagggcgagatcaagcagggccacaagcagaccctgaacctgagccagctgagcgtgggcctgtacgtgttcaaggtgaccgtgagcagcgagaacgccttcggcgagggcttcgtgaacgtgaccgtgaagcccgccagaagagtgaacctgccccccgtggccgtggtgagcccccagctgcaggagctgaccctgcccctgaccagcgccctgatcgacggcagccagagcaccgacgacaccgagatcgtgagctaccactgggaggagatcaacggccccttcatcgaggagaagaccagcgtggacagccccgtgctgagactgagcaacctggaccccggcaactacagcttcagactgaccgtgaccgacagcgacggcgccaccaacagcaccaccgccgccctgatcgtgaacaacgccgtggactacccccccgtggccaacgccggccccaaccacaccatcaccctgccccagaacagcatcaccctgaacggcaaccagagcagcgacgaccaccagatcgtgctgtacgagtggagcctgggccccggcagcgagggcaagcacgtggtgatgcagggcgtgcagaccccctacctgcacctgagcgccatgcaggagggcgactacaccttccagctgaaggtgaccgacagcagcagacagcagagcaccgccgtggtgaccgtgatcgtgcagcccgagaacaacagaccccccgtggccgtggccggccccgacaaggagctgatcttccccgtggagagcgccaccctggacggcagcagcagcagcgacgaccacggcatcgtgttctaccactgggagcacgtgagaggccccagcgccgtggagatggagaacatcgacaaggccatcgccaccgtgaccggcctgcaggtgggcacctaccacttcagactgaccgtgaaggaccagcagggcctgagcagcaccagcaccctgaccgtggccgtgaagaaggagaacaacagcccccccagagccagagccggcggcagacacgtgctggtgctgcccaacaacagcatcaccctggacggcagcagaagcaccgacgaccagagaatcgtgagctacctgtggatcagagacggccagagccccgccgccggcgacgtgatcgacggcagcgaccacagcgtggccctgcagctgaccaacctggtggagggcgtgtacaccttccacctgagagtgaccgacagccagggcgccagcgacaccgacaccgccaccgtggaggtgcagcccgaccccagaaagagcggcctggtggagctgaccctgcaggtgggcgtgggccagctgaccgagcagagaaaggacaccctggtgagacagctggccgtgctgctgaacgtgctggacagcgacatcaaggtgcagaagatcagagcccacagcgacctgagcaccgtgatcgtgttctacgtgcagagcagaccccccttcaaggtgctgaaggccgccgaggtggccagaaacctgcacatgagactgagcaaggagaaggccgacttcctgctgttcaaggtgctgagagtggacaccgccggctgcctgctgaagtgcagcggccacggccactgcgaccccctgaccaagagatgcatctgcagccacctgtggatggagaacctgatccagagatacatctgggacggcgagagcaactgcgagtggagcatcttctacgtgaccgtgctggccttcaccctgatcgtgctgaccggcggcttcacctggctgtgcatctgctgctgcaagagacagaagagaaccaagatcagaaagaagaccaagtacaccatcctggacaacatggacgagcaggagagaatggagctgagacccaagtacggcatcaagcacagaagcaccgagcacaacagcagcctgatggtgagcgagagcgagttcgacagcgaccaggacaccatcttcagcagagagaagatggagagaggcaaccccaaggtgagcatgaacggcagcatcagaaacggcgccagcttcagctactgcagcaaggacagatag

SEQ ID NO: 182345 - DNA, 3084 bp, Artificial Sequence
  derived and/or modified sequence
atgagagtgagccacaccttccccgtggtggactgcaccgccgcctgctgcgacctgagcagctgcgacctggcctggtggttcgagggcagatgctacctggtgagctgcccccacaaggagaactgcgagcccaagaagatgggccccatcagaagctacctgaccttcgtgctgagacccgtgcagagacccgcccagctgctggactacggcgacatgatgctgaacagaggcagccccagcggcatctggggcgacagccccgaggacatcagaaaggacctgaccttcctgggcaaggactggggcctggaggagatgagcgagtacagcgacgactacagagagctggagaaggacctgctgcagcccagcggcaagcaggagcccagaggcagcgccgagtacaccgactggggcctgctgcccggcagcgagggcgccttcaacagcagcgtgggcgacagccccgccgtgcccgccgagacccagcaggaccccgagctgcactacctgaacgagagcgccagcacccccgcccccaagctgcccgagagaagcgtgctgctgcccctgcccaccacccccagcagcggcgaggtgctggagaaggagaaggccagccagctgcaggagcagagcagcaacagcagcggcaaggaggtgctgatgcccagccacagcctgccccccgccagcctggagctgagcagcgtgaccgtggagaagagccccgtgctgaccgtgacccccggcagcaccgagcacagcatccccaccccccccaccagcgccgcccccagcgagagcacccccagcgagctgcccatcagccccaccaccgcccccagaaccgtgaaggagctgaccgtgagcgccggcgacaacctgatcatcaccctgcccgacaacgaggtggagctgaaggccttcgtggcccccgccccccccgtggagaccacctacaactacgagtggaacctgatcagccaccccaccgactaccagggcgagatcaagcagggccacaagcagaccctgaacctgagccagctgagcgtgggcctgtacgtgttcaaggtgaccgtgagcagcgagaacgccttcggcgagggcttcgtgaacgtgaccgtgaagcccgccagaagagtgaacctgccccccgtggccgtggtgagcccccagctgcaggagctgaccctgcccctgaccagcgccctgatcgacggcagccagagcaccgacgacaccgagatcgtgagctaccactgggaggagatcaacggccccttcatcgaggagaagaccagcgtggacagccccgtgctgagactgagcaacctggaccccggcaactacagcttcagactgaccgtgaccgacagcgacggcgccaccaacagcaccaccgccgccctgatcgtgaacaacgccgtggactacccccccgtggccaacgccggccccaaccacaccatcaccctgccccagaacagcatcaccctgaacggcaaccagagcagcgacgaccaccagatcgtgctgtacgagtggagcctgggccccggcagcgagggcaagcacgtggtgatgcagggcgtgcagaccccctacctgcacctgagcgccatgcaggagggcgactacaccttccagctgaaggtgaccgacagcagcagacagcagagcaccgccgtggtgaccgtgatcgtgcagcccgagaacaacagaccccccgtggccgtggccggccccgacaaggagctgatcttccccgtggagagcgccaccctggacggcagcagcagcagcgacgaccacggcatcgtgttctaccactgggagcacgtgagaggccccagcgccgtggagatggagaacatcgacaaggccatcgccaccgtgaccggcctgcaggtgggcacctaccacttcagactgaccgtgaaggaccagcagggcctgagcagcaccagcaccctgaccgtggccgtgaagaaggagaacaacagcccccccagagccagagccggcggcagacacgtgctggtgctgcccaacaacagcatcaccctggacggcagcagaagcaccgacgaccagagaatcgtgagctacctgtggatcagagacggccagagccccgccgccggcgacgtgatcgacggcagcgaccacagcgtggccctgcagctgaccaacctggtggagggcgtgtacaccttccacctgagagtgaccgacagccagggcgccagcgacaccgacaccgccaccgtggaggtgcagcccgaccccagaaagagcggcctggtggagctgaccctgcaggtgggcgtgggccagctgaccgagcagagaaaggacaccctggtgagacagctggccgtgctgctgaacgtgctggacagcgacatcaaggtgcagaagatcagagcccacagcgacctgagcaccgtgatcgtgttctacgtgcagagcagaccccccttcaaggtgctgaaggccgccgaggtggccagaaacctgcacatgagactgagcaaggagaaggccgacttcctgctgttcaaggtgctgagagtggacaccgccggctgcctgctgaagtgcagcggccacggccactgcgaccccctgaccaagagatgcatctgcagccacctgtggatggagaacctgatccagagatacatctgggacggcgagagcaactgcgagtggagcatcttctacgtgaccgtgctggccttcaccctgatcgtgctgaccggcggcttcacctggctgtgcatctgctgctgcaagagacagaagagaaccaagatcagaaagaagaccaagtacaccatcctggacaacatggacgagcaggagagaatggagctgagacccaagtacggcatcaagcacagaagcaccgagcacaacagcagcctgatggtgagcgagagcgagttcgacagcgaccaggacaccatcttcagcagagagaagatggagagaggcaaccccaaggtgagcatgaacggcagcatcagaaacggcgccagcttcagctactgcagcaaggacagatag

SEQ ID NO: 182346 - protein, 1584 aa, Artificial Sequence
  derived and/or modified sequence
MSLTSWFLVSSGGTRHRLPREMIFVGRDDCELMLQSRSVDKQHAVINYDASTDEHLVKDLGSLNGTFVNDVRIPEQTYITLKLEDKLRFGYDTNLFTVVQGEMRVPEEALKHEKFTIQLQLSQKSSESELSKSASAKSIDSKVADAATEVQHKTTEALKSEEKAMDISAMPRGTPLYGQPSWWGDDEVDEKRAFKTNGKPEEKNHEAGTSGCGIDAKQVEEQSAAANEEVLFPFCREPSYFEIPTKEFQQPSQITESTIHEIPTKDTPSSHITGAGHASFTIEFDDSTPGKVTIRDHVTKFTSDQRHKSKKSSPGTQDLLGIQTGMMAPENKVADWLAQNNPPQMLWERTEEDSKSIKSDVPVYLKRLKGNKHDDGTQSDSENAGAHRRCSKRATLEEHLRRHHSEHKKLQKVQATEKHQDQAVTSSAHHRGGHGVPHGKLLKQKSEEPSVSIPFLQTALLRSSGSLGHRPSQEMDKMLKNQATSATSEKDNDDDQSDKGTYTIELENPNSEEVEARKMIDKVFGVDDNQDYNRPVINEKHKDLIKDWALSSAAAVMEERKPLTTSGFHHSEEGTSSSGSKRWVSQWASLAANHTRHDQEERIMEFSAPLPLENETEISESGMTVRSTGSATSLASQGERRRRTLPQLPNEEKSLESHRAKVVTQRSEIGEKQDTELQEKETPTQVYQKDKQDADRPLSKMNRAVNGETLKTGGDNKTLLHLGSSAPGKEKSETDKETSLVKQTLAKLQQQEQREEAQWTPTKLSSKNVSGQTDKCREETFKQESQPPEKNSGHSTSKGDRVAQSESKRRKAEEILKSQTPKGGDKKESSKSLVRQGSFTIEKPSPNIPIELIPHINKQTSSTPSSLALTSASRIRERSESLDPDSSMDTTLILKDTEAVMAFLEAKLREDNKTDEGPDTPSYNRDNSISPESDVDTASTISLVTGETERKSTQKRKSFTSLYKDRCSTGSPSKDVTKSSSSGAREKMEKKTKSRSTDVGSRADGRKFVQSSGRIRQPSVDLTDDDQTSSVPHSAISDIMSSDQETYSCKPHGRTPLTSADEHVHSKLEGSKVTKSKTSPVVSGSSSKSTTLPRPRPTRTSLLRRARLGEASDSELADADKASVASEVSTTSSTSKPPTGRRNISRIDLLAQPRRTRLGSLSARSDSEATISRSSASSRTAEAIIRSGARLVPSDKFSPRIRANSISRLSDSKVKSMTSAHGSASVNSRWRRFPTDYASTSEDEFGSNRNSPKHTRLRTSPALKTTRLQSAGSAMPTSSSFKHRIKEQEDYIRDWTAHREEIARISQDLALIAREINDVAGEIDSVTSSGTAPSTTVSTAATTPGSAIDTREELVDRVFDESLNFRKIPPLVHSKTPEGNNGRSGDPRPQAAEPPDHLTITRRRTWSRDEVMGDNLLLSSVFQFSKKIRQSIDKTAGKIRILFKDKDRNWDDIESKLRAESEVPIVKTSSMEISSILQELKRVEKQLQAINAMIDPDGTLEALNNMGFPSAMLPSPPKQKSSPVNNHHSPGQTPTLGQPEARALHPAAVSAAAEFENAESEADFSIHFNRFNPDGEEEDVTVQE

SEQ ID NO: 182347 - DNA, 4755 bp, Artificial Sequence
  derived and/or modified sequence
atgagcctgacatcctggtttcttgttagttccggcggaacacgtcacagacttccacgggaaatgatcttcgtcggtcgtgacgattgcgagctcatgctccagagcagaagcgtcgataaacaacatgccgtgataaattatgatgcaagcactgatgagcatctcgtgaaagatttaggaagtctgaacggtacctttgtaaatgatgtgcgtataccggagcagacatacataacgctcaagctcgaagataaactcagatttggctatgataccaatctgttcacagtggtccagggagagatgagggtgcctgaggaagctctgaagcatgagaaatttacaatccaattgcaactgtctcagaaaagttcagaaagcgagctgagtaaatccgccagcgctaaatcaattgactctaaagtggctgatgccgccacagaggtccagcataaaacgacagaggccctaaagagcgaggagaaagctatggatataagcgcaatgcctcggggtacaccgctgtatggacagccaagttggtggggcgacgacgaggtggatgaaaaacgcgctttcaagacaaatggcaagcccgaggagaagaaccacgaggcgggcacctctggctgcgggatcgacgccaagcaggtggaagaacaatctgccgccgcgaatgaggaagttctctttcctttctgccgcgagccttcttacttcgagatacctactaaggagtttcagcagcctagccagataaccgagtctaccattcatgagatacctactaaggatacaccatcatcacacattaccggagcgggccatgccagctttaccatagagtttgacgactctacgcctgggaaggttacgattcgcgatcacgtaactaaatttacctcagaccagcggcataagagtaaaaaatccagcccagggacccaggacttgttaggaattcagacgggcatgatggcaccagagaataaggtagcagattggcttgctcagaataacccgcctcaaatgctttgggagcgtacagaggaggactcaaaatcaatcaaatccgacgtccccgtatacctgaagcgtctgaaggggaataagcatgatgatggcacacaaagcgattctgagaatgctggtgcccatcgcaggtgctctaagcgggccacacttgaggagcatcttagacggcaccatagcgagcataagaagctgcagaaggtgcaggcgactgagaagcaccaggaccaggcagtgaccagttccgctcaccaccggggcggacacggcgttccccacggaaagctgcttaagcagaaatccgaggaaccgagcgtctccatcccctttctccagacggccctgctgcgctcaagcggcagtctcggccacagaccgtcccaggaaatggacaagatgctgaagaaccaggctacaagcgctacatctgagaaggataatgatgatgatcagagtgataaggggacatacacgattgagctggagaaccctaattccgaggaggtggaggccaggaagatgatagataaggtcttcggcgttgatgacaatcaggattataacaggcctgtcattaacgaaaaacataaggacctcatcaaggactgggccctgtcatctgcggccgcggttatggaagaaagaaagcctctgaccacctcaggcttccaccacagcgaggagggaacaagctcttctgggagtaaaagatgggtgtcccagtgggcttcactggccgccaaccatacaaggcatgatcaggaagagagaataatggaattcagtgctccgctgccccttgagaacgaaaccgagatctctgaaagcggtatgactgtacggtcgactgggtccgccacatcactcgcctcccagggagagaggcgacggcgcaccctgcctcagcttccaaacgaagagaagtccctggaaagccatcgtgcgaaagtcgtgacgcagcgcagtgaaatcggagaaaaacaggatactgaactgcaggagaaggaaacccctactcaggtctaccagaaggataagcaggatgctgacaggccgttatccaaaatgaaccgcgcagttaacggcgaaactctcaagacgggcggagataataaaactctcctgcatctggggtcctcagccccgggaaaggagaagtccgaaaccgataaggagacctctctcgtcaaacaaacccttgcgaaactccagcagcaggagcagcgggaggaggcccagtggacaccgaccaaactgtcttcaaaaaatgtgtctggtcagaccgacaaatgtagagaggagaccttcaagcaagagagccagcccccagaaaaaaatagtggacattctactagtaaaggagatagggtggcgcagagcgagtctaaaagacgaaaggctgaggaaatcctgaaatcccagacacccaagggcggtgataaaaaggagagttccaaatcacttgtgcggcagggatcttttactattgaaaaaccctcgccaaacatccctattgagcttattccgcatatcaacaaacaaaccagctctaccccatccagtcttgcgcttaccagcgcttccagaatccgcgaaagatcagaaagtctggaccctgacagctccatggacactaccctgatactgaaggatactgaagccgtaatggccttcctggaagccaagttacgcgaagataataaaactgatgagggcccagatacaccatcctacaatcgagataactctatctcccctgaatccgacgtagacaccgcgagtaccatatctttagtcaccggagagaccgaaagaaagtccacccagaagagaaaatcatttacctctctgtacaaggataggtgttccactggcagtccgtctaaggacgtcacaaagagcagctcatcgggcgcgagagagaaaatggagaagaagacaaagtctagatctaccgatgtggggtctcgcgcagacggccgcaagtttgtgcaatccagtggccgcatacggcagccttcagtcgacttgacagatgatgatcagacaagctcagtgccccacagtgcaataagtgatattatgtcttctgaccaggagacctattcatgtaagcctcatggacgcaccccattgacgtccgcagacgagcatgttcactcaaaattggagggcagtaaggtgaccaaaagtaaaacatcacctgtggtcagcgggtcctcttccaagtcaaccacactccctagaccccggcctacgcgcacatccctgcttaggagagccaggcttggcgaagcttctgactccgagctggccgacgccgacaaagcatccgtggcatccgaagtctcgacaaccagtagcacctcgaaaccaccaaccggtagacgaaacatttcccgcattgatctgctggcccagcctcggcgcactcgtctcggcagtttgtccgcaaggtccgacagtgaagcaacaatctccagaagtagcgccagttccagaacagcagaggcaattatcagaagcggcgctcgacttgtcccaagcgacaaattttccccccgcattcgtgctaattcgatctcccggctgtccgatagtaaagtgaaatccatgactagcgcacatggtagcgcctccgtgaattcgcggtggcgcagatttcccaccgattacgcctccacttcagaggacgaattcggctccaatagaaatagtccgaagcatactagactgcgaacatcccctgctctgaagacgacgcgcctgcagagtgccggctccgcaatgcctacatccagtagcttcaagcaccgaattaaggagcaggaggactacataagggactggacggcacatcgggaggagatcgcccggatctctcaggaccttgcactgatcgcccgagagataaacgatgttgcaggcgagatcgactccgtaacatcttctggcacagcgccatctacaactgtgtctaccgcagcaaccacgccaggctctgctatcgacactcgggaagagttagtggaccgggtcttcgacgaatctttaaattttagaaagatacctccattggtgcactccaaaacacccgaggggaataatgggcgctctggcgatccccgcccacaggcagccgagcctcctgaccacttgacgattacacgaaggcggacatggtctcgggacgaggtgatgggcgacaatttactgctgtcttccgtgttccagttctcaaaaaaaattaggcagtctattgacaaaacagctgggaaaatccggatcctgttcaaagacaaagacaggaactgggatgatattgaaagcaagctcagagctgagtccgaggtacccatagtgaagacctcatcgatggagatcagctcgattctgcaagaactcaagagggtggaaaagcagctgcaagcgatcaacgccatgatcgatccagacggcactctcgaagctttgaataatatgggtttcccctcagctatgctcccatctccaccaaagcagaagtcctctcccgtgaacaatcaccattcccccggacagacaccgactctcgggcagccggaggctagggccctgcatcccgccgccgtgtctgcagccgccgagtttgagaacgcggagagcgaggctgacttttccatccacttcaacagatttaaccccgacggtgaagaagaagatgttactgtccaggagtag

SEQ ID NO: 182348 - DNA, 1239 bp, Artificial Sequence
  derived and/or modified sequence
atgagagtcccggaggaggctcttaagcatgagaagttcactatccagttgcagctctcccagaagtccagcgagtcagagctgtccaagagcgcttccgcaaagtcaattgatagtaaggtcgcagacgcggcaaccgaagtgcaacataagaccaccgaggcgttgaagtcagaggagaaagccatggatatcagcgccatgcctcgcggtaccccactgtatggccagccttcctggtggggagatgacgaggtggacgagaagagagcgtttaaaactaatggcaaaccagaggaaaaaaatcatgaagccggtacaagcggctgtggtatcgatgccaaacaggtggaagaacagtctgccgctgctaacgaggaggtattgttccctttctgcagagagccctcttattttgaaattcccactaaggagtttcagcagcctagccaaatcaccgaatccaccattcatgagatcccaaccaaagatactccttccagccacatcactggggccggccacgccagtttcaccatcgagttcgacgactccactcctggcaaagttactatccgggatcacgtcaccaagttcacatctgatcaaagacataagtcaaaaaagtcatctccaggcacccaggacctgttgggtattcagaccggcatgatggctcctgagaataaagtcgctgattggctggcacagaacaatcctcctcagatgctatgggaaagaacagaggaagactctaaaagcattaaatcagatgtcccagtgtatcttaagcgtctcaagggcaacaagcatgatgacggtactcagagtgatagcgagaatgccggcgcccacagacggtgctccaaaagggccacactggaagagcatctcaggcgccaccacagcgaacataaaaagcttcagaaagttcaggctacagagaaacaccaggatcaagctgtgacctcctccgcccatcatcgcggcggccacggcgtccctcacgggaagttactcaagcagaaaagtgaagagccctccgtctccatccctttcttacagaccgccctcctccgctcatcaggctcgctgggacatcggccatcacaagagatggataaaatgttgaaaaaccaggcagactgtggatcagtggccttctgtggattcatgatattcaagctaaatctgatgattacaccattccctttcatcgatctgttctcctttttttag

SEQ ID NO: 182349 - DNA, 4755 bp, Artificial Sequence
  derived and/or modified sequence
atgagcctgacctcctggttcctggtgtcctctgggggcaccaggcaccggctgccccgggagatgatctttgtgggcagagatgactgtgagctgatgctgcagagccgctctgtggacaagcagcacgccgtcatcaactatgatgccagcacagatgagcacctggtgaaggacctgggcagcctgaatggcacctttgtgaatgatgtgcgcatccctgagcagacctacatcaccctgaagctggaggacaagctgcgcttcggctatgacaccaacctcttcaccgtggtgcagggcgagatgagggtgcctgaggaggccctgaagcatgagaagttcaccatccagctgcagctgagccagaagagcagcgagagcgagctgagcaagagcgccagcgccaagagcattgacagcaaggtggctgatgctgccacagaggtgcagcacaagaccacagaggccctgaagtctgaggagaaggccatggacatcagcgccatgccccggggcacccccctgtatggccagcccagctggtggggagatgatgaggtggatgagaagagggccttcaagaccaacgggaagccagaggagaagaaccatgaagctggcaccagcggctgcggcattgatgccaagcaggtggaggagcagagcgctgctgccaatgaggaggtgctcttccccttctgccgggagcccagctactttgagatccccaccaaggagttccagcagcccagccagatcacagagagcaccatccacgagatccccaccaaggacacccccagcagccacatcactggagctggccacgccagcttcaccatcgagtttgatgacagcaccccaggcaaggtgaccatccgggaccacgtgaccaagttcaccagtgaccagaggcacaagagcaagaagagcagccctggcacccaggacctgctgggcatccagacaggcatgatggcccctgagaacaaggtggccgactggctggcccagaacaaccccccccagatgctgtgggagaggacagaggaggacagcaagagcatcaagagtgatgtgcctgtgtacctgaagaggctgaagggcaacaagcatgatgatggcacccagagcgacagtgaaaatgctggggcccaccggcgctgcagcaagagggccaccctggaggagcacctgcggcggcaccacagcgagcacaagaagctgcagaaggtgcaggccacagagaagcaccaggaccaggccgtgaccagcagcgcccaccaccggggcggccacggcgtgccccacggcaagctgctgaagcagaagtctgaggagcccagcgtgtccatccccttcctgcagacagccctgctgcggagcagcggcagcctgggccaccggcccagccaggagatggacaagatgctgaagaaccaggccaccagcgccaccagcgagaaggacaatgatgatgaccagagcgacaagggcacctacaccatcgagctggagaaccccaacagcgaggaggtggaggccaggaagatgattgacaaggtgtttggagtggatgacaaccaggactacaacagacctgtgatcaatgagaagcacaaggacctgatcaaggactgggccctgagcagcgctgctgctgtgatggaggagaggaagcccctgaccaccagcggcttccaccacagcgaggagggcaccagcagcagcggcagcaagcgctgggtgtcccagtgggccagcctggccgccaaccacaccaggcatgaccaggaggagcgcatcatggagttcagcgcccccctgcccctggagaatgaaacagagatcagcgagagcggcatgacagtgcgcagcacaggcagcgccaccagcctggccagccagggcgagaggagaagaaggaccctgccccagctgcccaatgaggagaagagcctggagagccaccgggccaaggtggtgacccagaggagtgaaattggagagaagcaggacacagagctgcaggagaaggagacccccacccaggtgtaccagaaggacaagcaggatgctgaccggcccctgagcaagatgaacagagctgtgaatggagagaccctgaagacaggaggagacaacaagaccctgctgcacctgggcagcagcgcccctgggaaggagaagtcagaaacagacaaggagaccagcctggtgaagcagaccctggccaagctgcagcagcaggagcagcgggaggaggcccagtggacccccaccaagctgagcagcaagaatgtgtctggccagacagacaagtgccgggaggagaccttcaagcaggagagccagcccccagagaagaacagcggccacagcaccagcaagggggacagagtggcccagagcgagagcaagaggaggaaggccgaggagatcctgaagagccagacccccaagggcggggacaagaaggagagcagcaagagcctggtgcggcagggcagcttcaccatcgagaagcccagccccaacatccccatcgagctgatcccccacatcaacaagcagaccagcagcacccccagcagcctggccctgaccagcgccagccgcatccgggagaggtctgagagcctggaccctgacagctccatggacaccaccctcatcctgaaggacacagaagctgtgatggccttcctggaggccaagctgcgggaggacaacaagacagatgagggccctgacacccccagctacaacagagacaacagcatcagccctgagagtgatgtggacacagccagcaccatcagcctggtgactggagaaacagagaggaagagcacccagaagaggaagagcttcaccagcctgtacaaggaccgctgcagcacaggcagccccagcaaggatgtgaccaagagcagcagcagcggggcccgggagaagatggagaagaagaccaagagccgcagcacagatgtgggcagcagagcagatggcaggaagtttgtgcagagcagcggccgcatccggcagcccagcgtggacctgacagatgatgaccagaccagctctgtgccccacagcgccatcagtgacatcatgagcagtgaccaggagacctacagctgcaagccccacggccgcacccccctgaccagcgcagatgaacatgtgcacagcaagctggagggcagcaaggtgaccaagagcaagaccagccctgtggtgtctggcagcagcagcaagagcaccaccctgccccggccccggcccaccaggaccagcctgctgcggcgggcccggctgggggaggccagtgacagcgagctggctgatgctgacaaggcctctgtggccagcgaggtgtccaccaccagcagcaccagcaagcccccaactggaagaagaaacatcagcagaattgacctgctggcccagcccaggaggacccggctgggcagcctgagcgcccggagtgacagcgaggccaccatcagccgcagcagcgccagcagcaggacagctgaggccatcatccgcagcggggcccggctggtgcccagcgacaagttcagcccccgcatccgggccaacagcatcagccggctgagtgacagcaaggtgaagtccatgaccagcgcccacggcagcgcctctgtgaacagccgctggaggcgcttccccacagattatgccagcaccagtgaagatgaatttggcagcaacagaaacagccccaagcacacccggctgcggaccagccctgccctgaagaccacccggctgcagagcgctggcagcgccatgcccaccagcagcagcttcaagcaccgcatcaaggagcaggaggactacatccgggactggacagcccaccgggaggagatcgcccgcatcagccaggacctggccctgattgcccgggagatcaatgatgtggccggggagattgattctgtgaccagcagcggcacagcccccagcaccaccgtgtccacagctgccaccaccccaggcagcgccatcgacacccgggaggagctggtggacagagtgtttgatgagagcctgaacttcaggaagatcccccccctggtgcacagcaagaccccagagggcaacaacggccgcagcggggacccccggccccaggccgctgagcccccagaccacctgaccatcaccaggaggaggacctggagcagagatgaggtgatgggagacaacctgctgctgagcagcgtcttccagttcagcaagaagatccggcagagcattgacaagacagctgggaagatccgcatcctcttcaaggacaaggacaggaactgggatgacatcgagagcaagctgcgggcagagagcgaggtgcccatcgtgaagaccagctccatggagatcagcagcatcctgcaggagctgaagagggtggagaagcagctgcaggccatcaatgccatgattgatcctgatggcaccctggaggccctgaacaacatgggcttccccagcgccatgctgcccagcccccccaagcagaagagcagccctgtgaacaaccaccacagccctggccagacccccaccctgggccagcctgaggcccgggccctgcaccctgctgctgtgtctgctgctgctgagtttgaaaatgctgagagcgaggccgacttcagcatccacttcaaccgcttcaacccagatggagaggaggaggatgtgacagtgcaggagtag

SEQ ID NO: 182350 - DNA, 1239 bp, Artificial Sequence
  derived and/or modified sequence
atgagggtgcctgaggaggccctgaagcatgagaagttcaccatccagctgcagctgagccagaagagcagcgagagcgagctgagcaagagcgccagcgccaagagcattgacagcaaggtggctgatgctgccacagaggtgcagcacaagaccacagaggccctgaagtctgaggagaaggccatggacatcagcgccatgccccggggcacccccctgtatggccagcccagctggtggggagatgatgaggtggatgagaagagggccttcaagaccaacgggaagccagaggagaagaaccatgaagctggcaccagcggctgcggcattgatgccaagcaggtggaggagcagagcgctgctgccaatgaggaggtgctcttccccttctgccgggagcccagctactttgagatccccaccaaggagttccagcagcccagccagatcacagagagcaccatccacgagatccccaccaaggacacccccagcagccacatcactggagctggccacgccagcttcaccatcgagtttgatgacagcaccccaggcaaggtgaccatccgggaccacgtgaccaagttcaccagtgaccagaggcacaagagcaagaagagcagccctggcacccaggacctgctgggcatccagacaggcatgatggcccctgagaacaaggtggccgactggctggcccagaacaaccccccccagatgctgtgggagaggacagaggaggacagcaagagcatcaagagtgatgtgcctgtgtacctgaagaggctgaagggcaacaagcatgatgatggcacccagagcgacagtgaaaatgctggggcccaccggcgctgcagcaagagggccaccctggaggagcacctgcggcggcaccacagcgagcacaagaagctgcagaaggtgcaggccacagagaagcaccaggaccaggccgtgaccagcagcgcccaccaccggggcggccacggcgtgccccacggcaagctgctgaagcagaagtctgaggagcccagcgtgtccatccccttcctgcagacagccctgctgcggagcagcggcagcctgggccaccggcccagccaggagatggacaagatgctgaagaaccaggccgactgtggctctgtggccttctgtggcttcatgatcttcaagctgaacctgatgatcacccccttccccttcatcgacctcttctccttcttctag

SEQ ID NO: 182351 - DNA, 4755 bp, Artificial Sequence
  derived and/or modified sequence
atgagcctgaccagctggttcctggtgagcagcggcggcacccggcatcgccttccaagagagatgatcttcgtcggacgtgatgactgtgagcttatgttgcagtcgagaagtgttgacaagcagcatgccgtgataaattacgatgcaagtactgatgaacacctcgtgaaagatctgggatctctgaacggcacatttgtgaatgatgtgagaattccggagcagacctatataaccctgaagctcgaagacaaactgcgtttcggctacgatacaaatttattcactgtcgtgcagggcgagatgagagttccagaagaggcactcaagcatgaaaaatttacaatacagttgcagctcagtcagaaatccagcgagtccgagctgtcaaagtcagcgtccgccaagtccattgacagcaaagtggccgatgctgccaccgaggtgcagcataaaacaaccgaagcgctgaaatctgaggagaaggctatggacatctctgcaatgcctcgtgggaccccattatacgggcaacccagttggtggggcgatgatgaagtggatgaaaagagagctttcaaaactaatggcaaaccagaggagaaaaaccatgaagccgggactagcgggtgcggaatagacgccaaacaagttgaggagcagtccgccgccgcaaacgaagaagtgttgtttcccttttgtcgcgaaccctcatactttgagattcctactaaggaattccagcagccgtcacaaattactgaatcaactatccacgaaattcccaccaaggatactcccagctcccacataacgggagccggacacgcctcttttaccatcgagtttgacgatagtaccccggggaaagtgacaatccgcgaccatgttacaaagtttacctcggatcagcgccataaatccaagaaaagttcccccggaactcaggacctccttggcatccaaactgggatgatggctcccgaaaataaggtggctgattggctcgcccagaataaccctccccagatgctgtgggaacgaacggaggaagactctaaatcaattaaaagtgatgtgcccgtgtacctgaaaaggctgaaggggaacaaacatgacgacgggacccagagtgactctgagaacgccggggcacaccgcaggtgctctaagcgcgcgaccctcgaggagcatctgaggcggcatcattccgaacacaaaaagttacagaaggtccaagcaaccgagaaacaccaggatcaagctgtaacaagctctgcccaccacaggggggggcatggcgtgccccatggcaagttgctaaaacagaagtccgaagagcctagtgtgagtataccctttttacagacggccctgctgagatcaagcggaagcttaggacaccgaccatctcaagaaatggacaagatgctaaaaaatcaggctacttcagccacttccgagaaagacaacgatgacgatcagtctgataaggggacttacaccatagagttagagaaccccaactccgaggaggtcgaagctcgcaagatgatcgacaaggtgttcggcgtcgatgataaccaggactacaacagacctgtgatcaacgagaagcacaaggacctgataaaggattgggccctgtcctcagctgctgccgtgatggaagaacggaagcccttaacaacatctgggtttcatcactctgaggaagggacttcttcttccgggagtaagagatgggtgtcccagtgggccagtttggccgctaatcacactcggcatgatcaggaggaaagaataatggagttcagcgccccgctccccctggagaatgagaccgagattagcgagagcggaatgaccgtacgtagtaccggatccgccacatcgcttgcctcccaaggggagagaaggaggagaaccttgcctcagctcccaaacgaggaaaaaagcctggaatctcatcgagcaaaggtcgtgacacaacgatctgaaataggcgagaagcaggacaccgaactgcaggaaaaggagacaccaacccaggtgtatcagaaagacaaacaggatgcagatcgtcccctcagtaagatgaatagggcggtgaatggtgaaactctgaaaacggggggcgataataaaacattgctccatctgggttcatcggctcccggaaaagaaaagtctgagactgataaagagacctctctagtgaaacaaactctggcaaagctacagcagcaggaacagcgagaagaggctcagtggacaccaactaagctatcttcaaaaaacgtgtctggccaaaccgacaagtgccgtgaggaaaccttcaagcaggaatcacaaccacctgaaaagaattccggccactctacttctaagggcgacagggttgcccagagcgagtccaaacgtcgcaaggccgaggaaatcctgaagtcccagacccccaagggcggagataagaaggagtcttcaaagtctctcgtgcgacaggggagttttaccatagaaaagcccagccctaacatcccaatagagttgattccccacatcaacaaacagacatctagcactccgagttcactggctctgaccagcgcaagtaggattcgggagcgctctgagtccttggaccctgattcatccatggatacaactctcatcctgaaggacacggaagctgtgatggcttttctcgaggcaaagctgagggaagataataaaaccgatgagggtccagacacacctagctacaatcgcgacaactcaattagtcccgagtcagacgtcgatactgcaagcacgatctcacttgtgacgggcgagactgagaggaaatccacgcagaaacgcaagtcctttacgtctctctataaagatcgctgcagcaccggatctccttccaaggacgtcactaaatcatcttcgagcggcgctcgagagaaaatggaaaaaaaaaccaagagtaggtctaccgacgtgggcagcagggcggacgggcgaaaatttgtgcagagttcggggcgtatccgccagccgtctgtcgatctcactgacgatgatcagacgtcgtccgtgccacattcagctatctccgatataatgtccagcgaccaggagacgtatagctgtaagccgcacggaagaaccccgctcaccagtgccgacgagcacgtgcactctaagctggagggttccaaggtgacaaagtcgaagacatctcctgtggtctctggcagctcctccaagagcacaacattgccaagacccaggcctacgcgaactagtctgttacgtcgggcccggctgggggaagcgagcgatagcgaactggcagatgcggacaaggccagtgtggctagtgaggtgtctaccacgagctctacttccaaacctcctaccgggcgtagaaacatctctcgaatcgatttgctcgcccagcctaggagaactagactgggatctttatctgcaagatcagactctgaggctacaattagtagaagctctgcctctagccgcacagccgaagctattattaggagcggtgcccggcttgtaccaagcgacaagttttccccacgcatccgagctaattccatttcccgcctcagtgatagcaaagtcaaatctatgacgtctgctcatggttctgcatccgtcaatagcagatggagacgatttccgacagactacgcctccacttccgaggacgagtttggcagtaaccgaaattcccccaagcacacacggcttcgcactagtccagcactgaaaacaacccgcctccagtcagctggatctgctatgccaacatcttccagcttcaaacatcggatcaaagagcaggaagattatattcgagactggactgcccatagggaggaaatcgccagaatctcccaggacctggcactcattgctagagagataaatgatgttgcaggagaaatcgacagcgtcacaagctcaggcaccgccccgagcaccacagtctctacagctgccactacccctggcagcgccattgatactcgggaggagctagtggacagagtgttcgacgaaagtttgaattttcgcaagatccctcctctggttcatagcaagacaccagagggcaacaatggcaggagtggagaccccagaccacaggctgctgagcccccagaccacttaaccatcacacgaaggcgcacctggagccgcgacgaagtgatgggggataacctgttgctgtcgagcgttttccaattctcaaaaaaaattaggcagtcaatagataagacagcgggtaagatacgcatcctattcaaagataaggatcggaactgggacgacattgaatcaaagctccgcgcagaaagcgaggtgcctattgtaaagacttcaagcatggagatctcatccatcctgcaggagctcaaacgcgtagagaaacagctgcaggccattaatgctatgattgaccccgatgggacattggaagcccttaataatatggggtttccctcggctatgctcccctctcctcccaaacagaagtcgtcgcccgtgaacaatcaccacagccctggccagacgccaaccctgggtcagccggaagctcgggccctacaccccgccgctgtcagcgctgccgccgaattcgaaaatgcggaatccgaggcggacttctctatccatttcaataggttcaatcccgacggtgaggaagaagacgttacagtccaggagtag

SEQ ID NO: 182352 - DNA, 1239 bp, Artificial Sequence
  derived and/or modified sequence
atgcgggtgcccgaggaggccctgaagcacgagaagttcaccatccagctgcagcttagccagaaaagttcagaaagtgaattgtccaaaagtgcatccgcaaaatcgatcgactcaaaagtggcagacgctgctaccgaggtgcaacataaaacaacagaggccctcaaatctgaggagaaggccatggacatctccgccatgccccgagggactcctctctacggtcagccgagctggtggggagatgacgaagtcgacgaaaaaagagcattcaaaactaatggaaagcccgaagaaaaaaaccatgaggccggaactagcggctgcggcatcgatgctaaacaggttgaagagcagtccgccgcagctaacgaggaagtcttattccccttctgcagagaacccagctactttgagatcccaactaaagagtttcaacaaccgtctcagatcaccgagagtaccattcatgagatcccaaccaaagataccccctcatcccacataactggggctgggcacgcctcattcaccatcgaatttgacgattccactcccggcaaggtgactattagggatcacgtaaccaagtttacatcagaccagcgacacaagtctaagaaaagcagcccaggaacccaagacttactcggaatccagaccggcatgatggccccagagaataaggtggccgactggctggcccagaataatccaccccaaatgctgtgggaacgcactgaggaggactcaaagagtataaaaagcgacgtcccagtctacctcaaacgccttaagggtaataagcatgatgacgggacacagtctgactcggaaaatgctggtgctcatcgcaggtgcagtaaaagggctacactcgaggagcacctcagaagacatcacagtgaacataagaagctacagaaggtgcaggccaccgaaaagcaccaagaccaggcagtcacaagcagtgcccaccatcggggcggccatggggtcccccacgggaagctgcttaagcagaaaagcgaggaaccgagcgtgtcaataccattcctgcagacagctctcctccgctcatccggttctctgggacatcgaccctctcaagaaatggacaaaatgctgaaaaaccaagctgactgcgggagcgtggccttttgcggtttcatgatcttcaagcttaatctgatgatcacaccattcccattcatagacctgttcagcttcttttag

SEQ ID NO: 182353 - DNA, 4755 bp, Artificial Sequence
  derived and/or modified sequence
atgagtcttacctcgtggttcctcgtgtccagtggcggtacgcgtcacagactccccagggagatgatttttgttggacgcgacgattgcgagctgatgctccagtctcgttccgtggacaagcagcacgctgtcattaactacgacgcatcaaccgatgaacatctggtaaaggatctggggtcactgaacggcaccttcgtgaacgatgtaaggattcctgaacagacttacatcacactgaaattagaagataagctgagatttggatatgatacaaacttgttcacagttgtccagggagaaatgcgagtcccagaagaggccctcaaacatgagaagttcacaatccaactgcaactcagccagaagagctcggaaagcgaattatctaaaagtgccagcgcaaagagtatagactcgaaggttgcagatgctgccacggaggtgcagcacaaaaccactgaggcgttgaagtccgaggagaaggccatggacataagcgccatgccaaggggcactccgctctacgggcagccaagctggtggggcgacgatgaggtggatgagaaaagagccttcaaaactaatggaaaacccgaagaaaagaaccatgaagccggtacaagcggttgcggtatcgacgccaagcaggttgaggagcagagtgctgccgctaacgaggaggtactgtttccattctgccgggagccgtcctactttgagatccctaccaaagaattccagcaacctagtcagatcaccgaaagcactatccacgagatcccaacaaaagacactccaagcagccacatcactggggcagggcatgcctcctttaccatcgaattcgatgatagcactcccggaaaggtgacaataagagaccatgtaaccaaatttactagcgatcagcgccataaatccaagaaaagcagcccaggcacgcaggacctgctggggattcagacaggaatgatggctccagagaacaaggtcgcggattggctggcccaaaacaatcccccacagatgctgtgggagcgcacagaggaggatagcaaaagtatcaagtctgatgtgccagtgtacctgaagagactcaaagggaacaagcatgatgacggtacccagagcgattctgaaaacgcaggagcccatcggcgttgcagcaagcgcgctacgctggaggaacacctgagacgtcaccatagtgagcacaaaaaacttcagaaggttcaggctaccgagaaacaccaagatcaggcagtaacctccagcgcgcatcaccgcggaggacatggagtaccccatggcaaactacttaagcaaaagtctgaagaaccctcagtttcaatccctttcctccaaacggccctgctccgctccagcgggtccctcgggcatagaccatcacaggaaatggataagatgttgaaaaatcaggccacctctgccacgtctgagaaggataacgatgacgaccagtcggacaagggaacatatactattgagctcgaaaatcctaactccgaagaggtagaagccaggaagatgatagataaggtgtttggggtggacgataaccaagattataatcggcctgtaattaacgagaagcacaaagatctgatcaaagactgggcgctctcatccgctgccgcagtcatggaggagcgtaaaccattaacaacatcaggctttcaccactccgaagaaggtacgtcctcttccggctctaaaagatgggtcagccaatgggcctctctggccgcaaatcacacccggcacgaccaggaagaacgcatcatggagttttcagcacccctgcctctggaaaatgaaaccgagatcagtgaaagtggcatgaccgtgaggtccacaggaagcgcgacttctttagcttcgcagggcgagcgtcgcagaaggacgctgccccaactgcctaatgaagaaaaatcgctggagtcacatcgggctaaggtagttacccaacgctctgagatcggcgagaaacaagatacagagctccaggagaaagaaacccctacccaggtatatcaaaaagacaagcaagacgccgataggccgctctctaaaatgaaccgtgcagtgaatggggagacactaaaaactgggggagacaacaaaaccctcctgcacctcggaagtagcgctcctgggaaagagaaatctgaaacggacaaggaaactagtctggtgaaacagactctggccaagctgcagcagcaggagcagagagaagaagcacagtggaccccaacaaaactttcctccaagaacgttagtgggcagaccgacaagtgccgggaagagacctttaagcaggaaagccaacctcctgaaaaaaactcaggccatagcacttcaaagggtgacagggtcgctcaaagcgagtccaagagacgcaaagccgaggagatcctgaagtcacagacccccaagggcggtgacaagaaggaatcctctaaatcgctggtccggcagggcagctttaccatagaaaagccatcccctaacattcctattgaattgatcccccacataaataagcagaccagcagtactcccagctccctggcattaacgagcgcctctcggatcagggagcgcagcgaatcactggatcccgattcttccatggataccactctgatcctcaaggatacagaggccgtcatggcattcttggaggccaagctccgtgaagataacaaaactgacgaaggacctgatacgcccagctataatcgagacaattctataagtccggagtcagatgttgacaccgcctccaccatctcccttgtgactggcgaaaccgagcgcaaaagtactcagaagcgtaaaagcttcaccagtctgtacaaggaccgatgttctactggcagcccttctaaggacgtgaccaagtcatcatcatcgggggcacgagagaaaatggagaaaaaaactaagagccgctcaaccgacgtggggtcacgggctgacggcagaaaatttgtacagtcttccgggagaatcaggcaaccatcggttgacctgacagatgatgaccaaacaagtagtgtaccccactccgctataagcgatatcatgtcctcagatcaggaaacatactcatgcaagcctcacgggaggactccgcttacttctgccgacgaacatgtacattctaagctggagggtagtaaggtcacaaaaagtaagacttcccctgtagttagtgggtcaagcagcaagagtaccacgttgcctcggcctcggccaaccaggaccagcttactgagacgggcacgcctgggtgaagcctcagattcagagctggcagatgctgataaggctagcgtggcgagtgaggtgagcactacatcctctacctccaagcccccaactggcaggcgtaatatctcaaggatcgacttactcgcccaaccgagacgtaccaggcttggctccctgagtgccagatccgacagcgaggcaacgatttcacgctcaagtgcctcaagtcggacagctgaggccatcatacggagcggagcacggctggttccaagcgacaaattctccccacgaattcgcgctaacagtattagtagactgtctgacagcaaggttaagtccatgacctctgcacacggttctgcatcggtgaattcaagatggaggcggttccccactgactacgcctctacctctgaggacgaatttggctcgaataggaactccccgaagcatacgaggctaaggactagccccgcactgaagactactagactgcagtccgccggatcagcaatgcccaccagtagcagctttaagcaccggattaaagaacaagaggactacattcgcgactggactgctcaccgagaggaaattgccagaatcagccaggacttagccctgattgcgcgtgagataaacgacgtggcaggagagatcgactctgtgaccagctctggcaccgcgccatcaactacagttagtaccgctgctaccactccgggatctgccattgatactagagaggaacttgttgacagggtttttgatgaatctctgaattttcgtaagataccccctctggtccactccaaaacgccagagggaaacaatggccgaagcggtgatccacgaccccaggccgctgaacctcctgaccacctgactatcacacgtagaagaacatggtccagggacgaggttatgggcgataacctactcttaagtagcgttttccagttctcaaagaaaatccggcagtccatcgataaaacagctggcaaaatccggatccttttcaaggataaggatcgtaattgggacgacatcgaaagcaaactgcgcgctgagtccgaggtgccaatcgtaaaaactagcagcatggagatcagcagcattttgcaagaactgaagagagtagagaaacagctccaggcaatcaacgccatgatagatcctgacggaacgttggaggctctgaacaacatgggctttcccagcgcaatgttaccgagtccaccgaagcagaaatcatcgcccgtgaacaaccaccactctccagggcagactccaactcttggtcagccagaggctagggccctccaccctgctgctgtcagtgcagcagccgaattcgagaacgcagagtctgaagctgatttttctattcacttcaaccgctttaatcccgatggcgaagaagaggatgtcaccgtacaggaatag

SEQ ID NO: 182354 - DNA, 1239 bp, Artificial Sequence
  derived and/or modified sequence
atgcgagtgcccgaggaggccctgaaacatgagaaatttacgatccaactgcaactgtcgcagaaatccagcgagtccgaactctctaagagtgcttctgcgaaaagcatcgactccaaggtcgcagatgctgccaccgaagttcagcataagacaaccgaggccttgaaatccgaagaaaaagccatggatatcagtgcgatgccaaggggcactcccctctatggacaaccttcctggtggggtgatgatgaggtggacgaaaaaagggccttcaaaactaacggtaagccagaagaaaagaaccacgaggcaggtacaagtgggtgtggtatcgacgccaagcaagttgaggaacagtcggccgctgctaacgaggaagtactgtttcccttctgccgcgagccttcctactttgaaatcccaactaaggagtttcagcaacctagccagataactgagtcaacaattcatgagattcctaccaaagacactccctcttctcatatcacgggagctggccatgccagtttcacaattgagtttgacgactctacccccggaaaggtgactatacgagaccatgtcacgaaattcacctccgaccagcgacacaagagcaaaaaatcatcacctggaacccaggacttactcgggatacagacaggcatgatggctcctgagaataaagttgctgattggctagctcagaacaatccaccccaaatgctgtgggagcggactgaggaagattccaagagcatcaagtcagacgtgccagtttacttgaagcgcctgaaagggaacaaacatgatgatggcacccagtccgactcagagaatgccggagctcacaggaggtgcagtaagcgggcaactctggaggagcatctcagacggcatcacagtgagcataagaaacttcaaaaagtccaggccacggaaaaacaccaagaccaggccgtgacttccagtgcacaccacaggggaggacacggggttccccacgggaaactgcttaaacaaaagtcagaagagccctctgtgtccatcccttttctgcagactgcccttctccggtcaagtggctctctcggccacagaccttcacaggagatggataagatgttgaaaaatcaggcagactgtggatctgtcgccttttgcgggtttatgatctttaagctgaatctcatgattactccctttccctttatcgatctgttctcattcttctag

SEQ ID NO: 182355 - DNA, 6828 bp, Artificial Sequence
  derived and/or modified sequence
cacggtaaggggatgacgtagctttgccaaagacttagaagctaagcagaaaatgagcttaacatcctggtttttggtgagcagtggaggcactcgccacaggctgccacgagaaatgatttttgttggaagagatgactgtgagctcatgttgcagtctcgtagtgtggataagcaacacgctgtcatcaactatgatgcgtctacggatgagcatttagtgaaggatttgggcagcctcaatgggacttttgtgaatgatgtaaggattccggaacagacttatatcaccttgaaacttgaagataagctgagatttggatatgatacaaatcttttcactgtagtacaaggagaaatgagggtccctgaagaagctcttaagcatgagaagtttaccattcagcttcagttgtcccaaaaatcttcagaatcagaattatccaaatctgcaagtgccaaaagcatagattcaaaggtagcagacgctgctactgaagtgcagcacaaaactactgaagcactgaaatccgaggaaaaagccatggatatttctgctatgccccgtggtactccattatatgggcagccgtcatggtggggggatgatgaggtggatgaaaaaagagctttcaagacaaatggcaaacctgaagaaaaaaaccatgaagctggaacatcagggtgcggcatagatgccaagcaagttgaggaacaatctgcagctgcaaatgaagaagtactttttcctttctgtagggaaccaagttattttgaaatccctacaaaagaattccagcaaccatcacaaataacagaaagcactattcatgaaatcccaacaaaagacacgccaagttcccatataacaggtgcagggcatgcttcatttaccattgaatttgatgacagtaccccagggaaggtaactattagagaccatgtgacaaagtttacttctgatcagcgccacaagtccaagaagtcttctcctggaactcaagacttgctggggattcaaacaggaatgatggcacccgaaaacaaagttgctgactggctagcacaaaacaaccctcctcaaatgctatgggaaagaacagaagaggattctaaaagcattaaaagtgatgttccagtgtacttgaaaaggttgaaaggaaataaacatgatgatggtacgcaaagtgattcagagaacgctggggctcacaggcgctgtagcaaacgtgcaactcttgaggaacacttaagacgccaccattcagaacacaaaaagctacagaaggtccaggctactgaaaagcatcaagaccaagctgttactagctctgcgcatcacagaggggggcatggtgttccacatgggaaattgttaaaacagaaatcagaggagccatcggtgtcaatacccttcctacaaactgcattattaagaagttcagggagtcttgggcacagaccaagccaggagatggataaaatgttaaaaaatcaagcaacttctgctacttctgaaaaggataatgatgatgaccaaagtgacaagggtacttataccattgagttagagaatcccaacagtgaggaagtggaagcaagaaaaatgattgacaaggtgtttggagtagatgacaatcaggattataataggcctgttatcaacgaaaaacataaagatctaataaaagattgggctctcagttctgctgcagcagtaatggaagaaagaaaaccactgactacatctggatttcaccactcagaggaaggcacatcttcatctggaagcaaacgttgggtttcacagtgggctagtttggctgccaatcatacaaggcatgatcaagaagaaaggataatggaattttctgcacctcttcctttagagaatgagacagagatcagtgagtctggcatgacagtgagaagtactggctctgcaacttccttggctagccagggagagagaaggagacgaactcttccccagcttccaaatgaagaaaagtctcttgagagccacagagcaaaggttgtaacacagaggtcagagataggagaaaaacaagacacagaacttcaggagaaagaaacacctacacaggtataccagaaagataaacaagatgctgacagacccttgagtaaaatgaacagggcagtaaatggagagactctcaaaactggtggagataataaaaccctacttcacttaggcagctctgctcctggaaaagagaaaagtgaaactgataaggaaacttctttggtaaagcaaacattagcaaaacttcaacaacaagaacaaagggaggaggctcagtggacacctactaaattgtcttccaaaaatgtttcaggtcagacagataaatgtagggaggaaacttttaaacaagaatcacaacctccagaaaaaaattcaggacattctacaagcaaaggagacagagtggcacaaagtgagagcaagagaagaaaagctgaggaaattctgaaaagtcagactccaaagggaggagacaagaaggaatcctccaagtcattagtgcgacaagggagcttcactatagaaaaacccagcccaaacatacccatagaacttattccccatataaataaacagacttcctctactccttcttctttagcattaacatctgcaagtagaatacgagaaagaagtgagtctttggatcctgattctagtatggacacaacccttattctaaaagacacagaagcagtaatggcttttctagaagctaaactacgtgaagataataaaactgatgaaggaccagatactcccagttataatagagacaattctatttcaccagaatctgatgtagatacagctagtacaatcagtctggttactggagaaactgaaagaaagtcaacccaaaagcgaaagagtttcactagcctctataaagataggtgttccacaggttctccttccaaagatgttacaaaatcatcatcttcaggtgctagggaaaaaatggaaaagaaaacaaaaagtcgttccacagatgtgggttcaagagcagatggtcgtaaatttgttcagtccagtgggagaataagacagccctcagtagacttaacagatgatgaccaaacctctagtgtacctcattctgccatctctgatattatgtcatctgatcaagaaacttactcttgtaaacctcatggacggactccacttacctcagctgatgagcatgtacattccaaactggaaggaagtaaagtaacgaaatctaagacttctccggtggtatctggttcatctagtaaatcaaccacccttccaaggccacgacctaccaggacttccctcttgcgcagagcacgacttggtgaagcttcagacagtgaacttgctgatgctgacaaagcatctgttgcttctgaagtatccacaacaagttctacatcaaaacctcccacaggaaggcgtaacatctctcggattgatttattggctcagcctcgtagaacacgacttggctcactgtcagctcgtagtgactctgaagcaacaatttctagaagtagtgcctcttcgaggaccgcagaagccatcattagaagtggagccagactagtaccatcagataaattttctcctagaattagagctaacagtatctctcgactctcagactccaaggtcaaaagtatgacctcagctcatggctctgcttcagtaaattcaagatggaggcgctttcctactgattatgcttccacctcagaagatgaatttggatcaaaccgtaattcccctaaacatacccgtctacgtacttctccagccctgaaaaccactcgcttgcagagcgctggatcagcaatgcctactagttcttcattcaaacaccggattaaagagcaggaagactacatccgagattggactgctcatcgagaagagatagccaggatcagccaagatcttgctctcattgctcgggagatcaacgatgtagcaggagagatagattcagtgacttcatcaggcactgcccctagtaccacagtaagcactgctgccaccacccctggctctgccatagacactagagaagagttggttgatcgtgtttttgatgaaagcctcaacttccgaaagattcctccattagttcattccaaaacaccagaaggaaacaacggtcgatctggtgatccaagacctcaagcagcagagcctcccgatcacttaacaattacaaggcggagaacctggagcagggatgaagtcatgggagataatctgctgctgtcatccgtctttcagttctctaagaagataagacaatctatagataagacagctggaaagatcagaatattatttaaagacaaagatcggaattgggatgacatagaaagcaaattaagagccgaaagtgaagtccctattgtgaaaacctcaagcatggagatttcttctatcttacaggaactgaaaagagtagaaaagcagctgcaagcaatcaatgctatgattgatcctgatggaactttggaggctctgaacaacatgggatttcccagtgctatgttgccatctccaccgaaacagaagtccagccctgtgaataaccaccacagcccgggtcagacaccaacacttggccaaccagaagctagggctcttcatcctgctgctgtttcagccgcagctgaatttgagaatgctgaatctgaggctgatttcagtatacatttcaatagattcaaccccgatggggaagaggaagatgttacagtacaagaatgactttctcttgattgttgaaaaatcattacctgtggaatggctaggaatattggaagcagcatagtgttgatgtacgcaaaacaagacagcttggtcagctacaatcttggaatccctgtcttcttaattttatttatttatttttgacgtataatgtagtatatcaatcctttcaaactatttagataaccacttgatgcacaaataggaaaaagcagattgtggcagtgtcgccttttgtggttttatgattttcaaattgaatttaatgattacaccctttcccttcatagatcttttttcttttttttaagccatgctgtgacctacaagcaaactaaatagccaacatttctgaacccctaagtctcctgtgccaagctgctccctgaaatggacttcttcatctgtacagatttgttaaaccattctatttgcttcttaataataggatttatattagtactcattaccattggacacaatgacataagtactctccacagtaaagcagacctttcacaacagtcactctgtgtcctaaaattttccaacatagatgtgatttatataactttgttgatacgtaaattgtcttggggtttacggaaattaactattatgtttgcactaagatttgctgggagtggtaggtggacatatctatatatcaataaggactaaccgtcttttttgtacataggagattgataatactgtatttgttttaagcccacagtgttttactccactttcaaaaagatcaatttggcactttttttcattttttttaatggaaataagatttggtctctcattttaggttaaatgataactagaaagattaaactagacagatagtttaggtggagtatatttttaaaactcagaacatgtatattggtcctgtgttaccaagtttatatgtgacagttgaaaaagaaattcccttgaaatgatcatgaggttaaaattttcttcattaggggacttggagaaccagtagtcgtaagattagttgatagtttcactcccaagcaatgaattgcttctgtgtgtttccctgtaggactcaatagtaaatgctgtctgtcttacacatttataaggaccctgcaagacgacgacaaaggcctttggcctgtgctactaaacaagaagcctatgaaaaatttcttctttaaacttgttttttctctttccagtaagttcacatttggataattttaaaaagaaaagtaattacctttgtgtttccagaacactataattggggtgtatcttaattcagttaaatattattagtagacctggattttcccccttgaccccatcagtctataaaggttaaactgcaacttttatgaaatggtctttaatatttccacaataatcctgtgctatatttgttttaagaaacaaagtaactctatacacttcaagactttacaggattttttaaatcctgtattgttggatcaattaataaagatgcaaaaaaactttatagagatgtaaaaacaaaactataatggatctcctatttttctttaaatacaaaaaaaaaaaggtaaatgaactattctccttgtaaagctaaattccccattctgtctaataaaggaagactgaaaaaaggttttaaagaacataaatggaaagatacaaatgctttgaaggaataaacgaaatgttaaaacagggtcaatccatttgaagaaaaagttggacaaaataatcagcattgctccctcttttatttaatatttgggtactgattatatccacatggaagtagaaggtaaggagtttaggaaaatactagaatctactctgcttacattcttgtttaagtgtttacacagtttggttcaattataaacatttggccttttactatgttatttttattttgtatgaatacattatcctccttatttatttttgttacatttattacttatgttattttgttatgcatttacaactccatttttaaataaagtgtttctggaacttta

SEQ ID NO: 182356 - DNA, 1953 bp, Artificial Sequence
  derived and/or modified sequence
gggcaagctggaaaagcgtgtgggtgagaccctcgcacaaccccttttcattgtctgtgtgtggcgcctgcgcagtaagggatcgttggaactgggcaggaggggatagggtccggctcctcgccctttcccgaggcgcctgcgcactaggcagtcggtctttgccgttaccgctatgtgtggggcgtgtgtggaataacgttattgcccagcggagctgagggccccggagctcgaccgcagcggcagcgacgacaacagcggcgacgacgacgacgacgaggtggggggaggacggcgtgcgagagactcacgggacgcgacgcgccccgcctcccccgtccggtccctctctccacggtaaggggatgacgtagctttgccaaagacttagaagctaagcagaaaatgagcttaacatcctggtttttggtgagcagtggaggcactcgccacaggctgccacgagaaatgatttttgttggaagagatgactgtgagctcatgttgcagtctcgtagtgtggataagcaacacgctgtcatcaactatgatgcgtctacggatgagcatttagtgaaggatttgggcagcctcaatgggacttttgtgaatgatgtaaggattccggaacagacttatatcaccttgaaacttgaagataagctgagatttggatatgatacaaatcttttcactgtagtacaaggagaaatgagggtccctgaagaagctcttaagcatgagaagtttaccattcagcttcagttgtcccaaaaatcttcagaatcagaattatccaaatctgcaagtgccaaaagcatagattcaaaggtagcagacgctgctactgaagtgcagcacaaaactactgaagcactgaaatccgaggaaaaagccatggatatttctgctatgccccgtggtactccattatatgggcagccgtcatggtggggggatgatgaggtggatgaaaaaagagctttcaagacaaatggcaaacctgaagaaaaaaaccatgaagctggaacatcagggtgcggcatagatgccaagcaagttgaggaacaatctgcagctgcaaatgaagaagtactttttcctttctgtagggaaccaagttattttgaaatccctacaaaagaattccagcaaccatcacaaataacagaaagcactattcatgaaatcccaacaaaagacacgccaagttcccatataacaggtgcagggcatgcttcatttaccattgaatttgatgacagtaccccagggaaggtaactattagagaccatgtgacaaagtttacttctgatcagcgccacaagtccaagaagtcttctcctggaactcaagacttgctggggattcaaacaggaatgatggcacccgaaaacaaagttgctgactggctagcacaaaacaaccctcctcaaatgctatgggaaagaacagaagaggattctaaaagcattaaaagtgatgttccagtgtacttgaaaaggttgaaaggaaataaacatgatgatggtacgcaaagtgattcagagaacgctggggctcacaggcgctgtagcaaacgtgcaactcttgaggaacacttaagacgccaccattcagaacacaaaaagctacagaaggtccaggctactgaaaagcatcaagaccaagctgttactagctctgcgcatcacagaggggggcatggtgttccacatgggaaattgttaaaacagaaatcagaggagccatcggtgtcaatacccttcctacaaactgcattattaagaagttcagggagtcttgggcacagaccaagccaggagatggataaaatgttaaaaaatcaagcagattgtggcagtgtcgccttttgtggttttatgattttcaaattgaatttaatgattacaccctttcccttcatagatcttttttcttttttttaa

SEQ ID NO: 182357 - DNA, 4755 bp, Artificial Sequence
  derived and/or modified sequence
atgagcctgaccagctggttcctggtgagcagcggcggcaccagacacagactgcccagagagatgatcttcgtgggcagagacgactgcgagctgatgctgcagagcagaagcgtggacaagcagcacgccgtgatcaactacgacgccagcaccgacgagcacctggtgaaggacctgggcagcctgaacggcaccttcgtgaacgacgtgagaatccccgagcagacctacatcaccctgaagctggaggacaagctgagattcggctacgacaccaacctgttcaccgtggtgcagggcgagatgagagtgcccgaggaggccctgaagcacgagaagttcaccatccagctgcagctgagccagaagagcagcgagagcgagctgagcaagagcgccagcgccaagagcatcgacagcaaggtggccgacgccgccaccgaggtgcagcacaagaccaccgaggccctgaagagcgaggagaaggccatggacatcagcgccatgcccagaggcacccccctgtacggccagcccagctggtggggcgacgacgaggtggacgagaagagagccttcaagaccaacggcaagcccgaggagaagaaccacgaggccggcaccagcggctgcggcatcgacgccaagcaggtggaggagcagagcgccgccgccaacgaggaggtgctgttccccttctgcagagagcccagctacttcgagatccccaccaaggagttccagcagcccagccagatcaccgagagcaccatccacgagatccccaccaaggacacccccagcagccacatcaccggcgccggccacgccagcttcaccatcgagttcgacgacagcacccccggcaaggtgaccatcagagaccacgtgaccaagttcaccagcgaccagagacacaagagcaagaagagcagccccggcacccaggacctgctgggcatccagaccggcatgatggcccccgagaacaaggtggccgactggctggcccagaacaaccccccccagatgctgtgggagagaaccgaggaggacagcaagagcatcaagagcgacgtgcccgtgtacctgaagagactgaagggcaacaagcacgacgacggcacccagagcgacagcgagaacgccggcgcccacagaagatgcagcaagagagccaccctggaggagcacctgagaagacaccacagcgagcacaagaagctgcagaaggtgcaggccaccgagaagcaccaggaccaggccgtgaccagcagcgcccaccacagaggcggccacggcgtgccccacggcaagctgctgaagcagaagagcgaggagcccagcgtgagcatccccttcctgcagaccgccctgctgagaagcagcggcagcctgggccacagacccagccaggagatggacaagatgctgaagaaccaggccaccagcgccaccagcgagaaggacaacgacgacgaccagagcgacaagggcacctacaccatcgagctggagaaccccaacagcgaggaggtggaggccagaaagatgatcgacaaggtgttcggcgtggacgacaaccaggactacaacagacccgtgatcaacgagaagcacaaggacctgatcaaggactgggccctgagcagcgccgccgccgtgatggaggagagaaagcccctgaccaccagcggcttccaccacagcgaggagggcaccagcagcagcggcagcaagagatgggtgagccagtgggccagcctggccgccaaccacaccagacacgaccaggaggagagaatcatggagttcagcgcccccctgcccctggagaacgagaccgagatcagcgagagcggcatgaccgtgagaagcaccggcagcgccaccagcctggccagccagggcgagagaagaagaagaaccctgccccagctgcccaacgaggagaagagcctggagagccacagagccaaggtggtgacccagagaagcgagatcggcgagaagcaggacaccgagctgcaggagaaggagacccccacccaggtgtaccagaaggacaagcaggacgccgacagacccctgagcaagatgaacagagccgtgaacggcgagaccctgaagaccggcggcgacaacaagaccctgctgcacctgggcagcagcgcccccggcaaggagaagagcgagaccgacaaggagaccagcctggtgaagcagaccctggccaagctgcagcagcaggagcagagagaggaggcccagtggacccccaccaagctgagcagcaagaacgtgagcggccagaccgacaagtgcagagaggagaccttcaagcaggagagccagccccccgagaagaacagcggccacagcaccagcaagggcgacagagtggcccagagcgagagcaagagaagaaaggccgaggagatcctgaagagccagacccccaagggcggcgacaagaaggagagcagcaagagcctggtgagacagggcagcttcaccatcgagaagcccagccccaacatccccatcgagctgatcccccacatcaacaagcagaccagcagcacccccagcagcctggccctgaccagcgccagcagaatcagagagagaagcgagagcctggaccccgacagcagcatggacaccaccctgatcctgaaggacaccgaggccgtgatggccttcctggaggccaagctgagagaggacaacaagaccgacgagggccccgacacccccagctacaacagagacaacagcatcagccccgagagcgacgtggacaccgccagcaccatcagcctggtgaccggcgagaccgagagaaagagcacccagaagagaaagagcttcaccagcctgtacaaggacagatgcagcaccggcagccccagcaaggacgtgaccaagagcagcagcagcggcgccagagagaagatggagaagaagaccaagagcagaagcaccgacgtgggcagcagagccgacggcagaaagttcgtgcagagcagcggcagaatcagacagcccagcgtggacctgaccgacgacgaccagaccagcagcgtgccccacagcgccatcagcgacatcatgagcagcgaccaggagacctacagctgcaagccccacggcagaacccccctgaccagcgccgacgagcacgtgcacagcaagctggagggcagcaaggtgaccaagagcaagaccagccccgtggtgagcggcagcagcagcaagagcaccaccctgcccagacccagacccaccagaaccagcctgctgagaagagccagactgggcgaggccagcgacagcgagctggccgacgccgacaaggccagcgtggccagcgaggtgagcaccaccagcagcaccagcaagccccccaccggcagaagaaacatcagcagaatcgacctgctggcccagcccagaagaaccagactgggcagcctgagcgccagaagcgacagcgaggccaccatcagcagaagcagcgccagcagcagaaccgccgaggccatcatcagaagcggcgccagactggtgcccagcgacaagttcagccccagaatcagagccaacagcatcagcagactgagcgacagcaaggtgaagagcatgaccagcgcccacggcagcgccagcgtgaacagcagatggagaagattccccaccgactacgccagcaccagcgaggacgagttcggcagcaacagaaacagccccaagcacaccagactgagaaccagccccgccctgaagaccaccagactgcagagcgccggcagcgccatgcccaccagcagcagcttcaagcacagaatcaaggagcaggaggactacatcagagactggaccgcccacagagaggagatcgccagaatcagccaggacctggccctgatcgccagagagatcaacgacgtggccggcgagatcgacagcgtgaccagcagcggcaccgcccccagcaccaccgtgagcaccgccgccaccacccccggcagcgccatcgacaccagagaggagctggtggacagagtgttcgacgagagcctgaacttcagaaagatcccccccctggtgcacagcaagacccccgagggcaacaacggcagaagcggcgaccccagaccccaggccgccgagccccccgaccacctgaccatcaccagaagaagaacctggagcagagacgaggtgatgggcgacaacctgctgctgagcagcgtgttccagttcagcaagaagatcagacagagcatcgacaagaccgccggcaagatcagaatcctgttcaaggacaaggacagaaactgggacgacatcgagagcaagctgagagccgagagcgaggtgcccatcgtgaagaccagcagcatggagatcagcagcatcctgcaggagctgaagagagtggagaagcagctgcaggccatcaacgccatgatcgaccccgacggcaccctggaggccctgaacaacatgggcttccccagcgccatgctgcccagcccccccaagcagaagagcagccccgtgaacaaccaccacagccccggccagacccccaccctgggccagcccgaggccagagccctgcaccccgccgccgtgagcgccgccgccgagttcgagaacgccgagagcgaggccgacttcagcatccacttcaacagattcaaccccgacggcgaggaggaggacgtgaccgtgcaggagtag

SEQ ID NO: 182358 - DNA, 1239 bp, Artificial Sequence
  derived and/or modified sequence
atgagagtgcccgaggaggccctgaagcacgagaagttcaccatccagctgcagctgagccagaagagcagcgagagcgagctgagcaagagcgccagcgccaagagcatcgacagcaaggtggccgacgccgccaccgaggtgcagcacaagaccaccgaggccctgaagagcgaggagaaggccatggacatcagcgccatgcccagaggcacccccctgtacggccagcccagctggtggggcgacgacgaggtggacgagaagagagccttcaagaccaacggcaagcccgaggagaagaaccacgaggccggcaccagcggctgcggcatcgacgccaagcaggtggaggagcagagcgccgccgccaacgaggaggtgctgttccccttctgcagagagcccagctacttcgagatccccaccaaggagttccagcagcccagccagatcaccgagagcaccatccacgagatccccaccaaggacacccccagcagccacatcaccggcgccggccacgccagcttcaccatcgagttcgacgacagcacccccggcaaggtgaccatcagagaccacgtgaccaagttcaccagcgaccagagacacaagagcaagaagagcagccccggcacccaggacctgctgggcatccagaccggcatgatggcccccgagaacaaggtggccgactggctggcccagaacaaccccccccagatgctgtgggagagaaccgaggaggacagcaagagcatcaagagcgacgtgcccgtgtacctgaagagactgaagggcaacaagcacgacgacggcacccagagcgacagcgagaacgccggcgcccacagaagatgcagcaagagagccaccctggaggagcacctgagaagacaccacagcgagcacaagaagctgcagaaggtgcaggccaccgagaagcaccaggaccaggccgtgaccagcagcgcccaccacagaggcggccacggcgtgccccacggcaagctgctgaagcagaagagcgaggagcccagcgtgagcatccccttcctgcagaccgccctgctgagaagcagcggcagcctgggccacagacccagccaggagatggacaagatgctgaagaaccaggccgactgcggcagcgtggccttctgcggcttcatgatcttcaagctgaacctgatgatcacccccttccccttcatcgacctgttcagcttcttctag

SEQ ID NO: 182359 - protein, 389 aa, Artificial Sequence
  derived and/or modified sequence
MPLENLEEEGLPKNPDLRIAQLRFLLSLPEHRGDAAVRDELMAAVRDNNMAPYYEALCKSLDWQIDVDLLNKMKKANEDELKRLDEELEDAEKNLGESEIRDAMMAKAEYLCRIGDKEGALTAFRKTYDKTVALGHRLDIVFYLLRIGLFYMDNDLITRNTEKAKSLIEEGGDWDRRNRLKVYQGLYCVAIRDFKQAAELFLDTVSTFTSYELMDYKTFVTYTVYVSMIALERPDLREKVIKGAEILEVLHSLPAVRQYLFSLYECRYSVFFQSLAVVEQEMKKDWLFAPHYRYYVREMRIHAYSQLLESYRSLTLGYMAEAFGVGVEFIDQELSRFIAAGRLHCKIDKVNEIVETNRPDSKNWQYQETIKKGDLLLNRVQKLSRVINM

SEQ ID NO: 182360 - DNA, 1170 bp, Artificial Sequence
  derived and/or modified sequence
atgcccctggaaaatctcgaggaggaggggctgccaaagaacccagatctccgcatcgcccaactgagatttctgctctcattaccagagcataggggagacgcagcagttcgagatgagctaatggccgctgtgcgcgataataacatggcgccatattacgaggccctttgcaaaagtctcgattggcagattgatgttgacctgctcaataaaatgaagaaagcgaacgaagacgaacttaaacggctggacgaggagctggaggacgccgagaaaaatctgggtgaatcggaaattcgggacgccatgatggccaaggccgaatatttgtgccgaattggagataaagagggcgccctcacagccttcagaaaaacttacgacaaaaccgttgcccttggacatcgactcgatatcgtgttctatctgctgaggatcggactgttctacatggataacgatctaattactcgtaataccgagaaagccaagtccctgatcgaagaggggggggattgggaccggcgcaaccggctgaaggtttaccagggcttatattgcgtggccatccgggactttaaacaggccgcggaactgtttctcgataccgtttcaacttttaccagttacgagcttatggattacaaaaccttcgttacctacactgtgtatgtgtctatgatagctctggaacggcccgacctccgggaaaaggtgataaagggtgccgagatactggaagtgctgcattcgctcccggcagtccggcagtatcttttttctttatacgaatgccggtacagcgtttttttccaatctctggctgtagtcgagcaggagatgaagaaagactggttgtttgccccacactataggtactacgtgcgagaaatgaggatacatgcttattcccaactgctagaatcataccggtcactgacactcggctatatggctgaggctttcggcgtaggcgttgaatttattgaccaggaactaagtcggttcatcgctgccggaaggcttcattgcaagattgataaggttaatgagattgtggagacaaaccgccccgattctaagaactggcagtaccaggagaccatcaagaagggtgatctcctgttgaaccgcgtacagaaactgtcccgcgtcatcaatatgtag

SEQ ID NO: 182361 - DNA, 1170 bp, Artificial Sequence
  derived and/or modified sequence
atgcccctggagaacctggaggaggagggcctgcccaagaacccagacctgagaattgcccagctgcgcttcctgctgagcctgcctgagcacagaggagatgctgctgtgagagatgagctgatggctgctgtgcgggacaacaacatggccccctactatgaggccctgtgcaagagcctggactggcagattgatgtggacctgctgaacaagatgaagaaggccaatgaagatgagctgaagaggctggatgaggagctggaggatgctgagaagaacctgggggagagcgagatcagagatgccatgatggccaaggccgagtacctgtgccgcatcggggacaaggagggcgccctgacagccttcaggaagacctatgacaagacagtggccctgggccaccggctggacatcgtgttctacctgctgagaattggcctcttctacatggacaatgacctgatcaccaggaacacagagaaggccaagagcctcatcgaggagggcggggactgggacagaagaaaccggctgaaggtgtaccagggcctgtactgtgtggccatccgggacttcaagcaggccgctgagctgttcctggacacagtgtccaccttcaccagctatgagctgatggactacaagacctttgtgacctacacagtgtatgtgtccatgattgccctggagaggccagacctgcgggagaaggtgatcaagggagctgagatcctggaggtgctgcacagcctgcctgctgtgcggcagtacctgttcagcctgtatgaatgtcgctacagcgtcttcttccagagcctggccgtggtggagcaggagatgaagaaggactggctgtttgccccccactaccgctactacgtgcgggagatgaggatccacgcctacagccagctgctggagagctaccgcagcctgaccctgggctacatggccgaggcctttggagtgggcgtggagttcatcgaccaggagctgagccgcttcatcgccgccggccgcctgcactgcaagattgacaaggtgaatgaaattgtggagaccaacagaccagacagcaagaactggcagtaccaggagaccatcaagaagggggacctgctgctgaacagagtgcagaagctgagcagggtcatcaacatgtag

SEQ ID NO: 182362 - DNA, 1170 bp, Artificial Sequence
  derived and/or modified sequence
atgcccctggagaacctggaggaggagggcctgcccaagaaccccgatttgcgtatcgctcagcttcgctttctcttatctttgcctgagcatcgtggggatgctgcagtgagagatgagcttatggccgcagtacgcgataacaacatggccccatactatgaggcattatgtaagtctctggattggcagatcgacgtcgatctgcttaataagatgaagaaagctaatgaggatgaattgaagcgcctagatgaggaactggaagacgccgaaaagaatcttggtgagtcagaaattagggatgccatgatggcaaaggccgagtacctctgtcgcatcggagacaaagagggggcccttaccgcctttagaaagacgtatgataaaacggtcgccttaggccaccggttggatattgtgttctacctgcttcggattggtttattttatatggacaacgatctaataacacgcaatactgagaaggcaaagtccttgattgaggaaggtggggactgggatcgcagaaacagacttaaagtctatcagggactctactgcgtggccattagggacttcaagcaggccgctgagctgtttctggataccgtaagtacctttacgtcctatgagctgatggactacaagacgttcgtgacatacactgtgtacgtgtcaatgatcgctttggagcgccccgatctccgcgagaaggtgattaagggggctgaaatcttagaagtgcttcactcgctgcccgccgtaagacagtacctgttttcactgtatgagtgcagatacagcgtcttcttccaatccctcgccgtcgttgagcaggaaatgaagaaggattggctctttgcgccacactatagatactacgtaagggaaatgcgcattcatgcttatagtcagttgctcgagtcttaccggagcttgaccctggggtacatggcagaagcgttcggggtgggggtagagttcattgaccaggaactgagtcgcttcatcgctgctggtcggctccattgcaaaatcgacaaagttaatgaaatcgttgaaactaaccgtcctgactctaagaattggcagtatcaggagacaatcaaaaaaggggatctgttgctgaaccgagtccaaaaactgtcccgggtcatcaatatgtag

SEQ ID NO: 182363 - DNA, 1170 bp, Artificial Sequence
  derived and/or modified sequence
atgcccctagagaacctcgaagaggaaggcttacctaagaatcctgacttacgcatcgctcagctgcggttcctgttgtccctgcccgaacatcgtggagacgctgcagtacgtgacgaactgatggccgcagtgagggataacaacatggcaccctactatgaggccctgtgtaagagtctcgactggcagatcgacgtggatcttcttaacaaaatgaagaaggcgaacgaggatgagctcaagcgcctggatgaggaactcgaggatgccgagaagaacctgggggagagcgagattcgggatgcaatgatggccaaggccgagtacctctgccgcattggggacaaggagggagcattaacagcctttcgcaagacctatgacaaaactgtagcgctggggcaccgcctggacatagttttttacttgttgcgcatcggtttgttttacatggacaacgacttgataacgcgtaatacggaaaaagccaagagtcttatcgaggaggggggagactgggaccgtcgaaacagactaaaagtgtatcaagggctttattgtgtggccatccgtgatttcaagcaggctgccgagctctttttagacacagtttccaccttcacttcttacgagctgatggattataagacttttgtgacctacactgtgtacgtttccatgatcgcgttagagagacccgacctgagggaaaaggtcatcaagggtgctgaaatcctcgaagtgctccacagcctgcctgctgtccggcagtatctgtttagcctctatgagtgtcgttatagtgtgttttttcaatccttagccgtggttgagcaagaaatgaagaaggattggttgttcgccccacattacagatactacgtacgagaaatgcgcattcatgcctactctcaactgttagagtcatatcgttctctcactttagggtatatggccgaggcattcggtgtaggggttgaattcatagaccaggaattgtcccgctttattgccgctgggagactgcactgcaaaattgataaggtcaacgagattgtggagacgaatcggcctgattctaagaattggcagtaccaagagacaattaagaaaggggatttgcttctaaaccgcgtccagaaactctcccgggtgattaatatgtag

SEQ ID NO: 182364 - DNA, 1430 bp, Artificial Sequence
  derived and/or modified sequence
agcagaggacgctgccggcggagacgggaccggaagccgggccgcaggcggccgggcgtattcgccgactcctcccgcttccgctgccgcagccggtcgtaaccaagttgtgtcctgtcagccgctgtccccttcgccgcgatgccgctggagaacctggaggaggagggtctgcccaagaaccccgacttgcgtatcgcgcagctgcgcttcctgctcagcctgcccgagcaccgcggagacgctgccgtgcgcgacgagctgatggcggccgtccgcgataacaacatggctccttactatgaagccttgtgcaaatccctcgactggcagatagacgtggacctactcaataaaatgaagaaggcaaatgaagatgagttgaagcgtttggatgaggagctggaagatgcagagaagaatctaggagagagcgaaattcgcgatgcaatgatggcaaaggccgagtacctctgccggataggtgacaaagagggagctctgacagcctttcgcaagacatatgacaaaactgtggccctgggtcaccgattggatattgtattctatctccttaggattggcttattttatatggataatgatctcatcacacgaaacacagaaaaggccaaaagcttaatagaagaaggaggagactgggacaggagaaaccgcctaaaagtgtatcagggtctttattgtgtggctattcgtgatttcaaacaggcagctgaactcttccttgacactgtttcaacatttacatcctatgaactcatggattataaaacatttgtgacttatactgtctatgtcagtatgattgccttagaaagaccagatctcagggaaaaggtcattaaaggagcagagattcttgaagtgttgcacagtcttccagcagttcggcagtatctgttttcactctatgaatgccgttactctgttttcttccaatcattagcggttgtggaacaggaaatgaaaaaggactggctttttgcccctcattatcgatactatgtaagagaaatgagaattcatgcatacagtcagctgctggaatcatataggtcattaacccttggctatatggcagaagcgtttggtgttggtgtggaattcattgatcaggaactgtccaggtttattgctgccgggagactacactgcaaaatagataaagtgaatgaaatagtagaaaccaacagacctgatagcaagaactggcagtaccaagaaactatcaagaaaggagatctgctactaaacagagttcaaaaactttccagagtaattaatatgtaaagccatgtaactaacaaaggatttgctttagagataattatttggaatttttatagcttacttcacaatgtgcccaggtcagctgtataaaataaatactgcattgttgtttctttcca

SEQ ID NO: 182365 - DNA, 1170 bp, Artificial Sequence
  derived and/or modified sequence
atgcccctggagaacctggaggaggagggcctgcccaagaaccccgacctgagaatcgcccagctgagattcctgctgagcctgcccgagcacagaggcgacgccgccgtgagagacgagctgatggccgccgtgagagacaacaacatggccccctactacgaggccctgtgcaagagcctggactggcagatcgacgtggacctgctgaacaagatgaagaaggccaacgaggacgagctgaagagactggacgaggagctggaggacgccgagaagaacctgggcgagagcgagatcagagacgccatgatggccaaggccgagtacctgtgcagaatcggcgacaaggagggcgccctgaccgccttcagaaagacctacgacaagaccgtggccctgggccacagactggacatcgtgttctacctgctgagaatcggcctgttctacatggacaacgacctgatcaccagaaacaccgagaaggccaagagcctgatcgaggagggcggcgactgggacagaagaaacagactgaaggtgtaccagggcctgtactgcgtggccatcagagacttcaagcaggccgccgagctgttcctggacaccgtgagcaccttcaccagctacgagctgatggactacaagaccttcgtgacctacaccgtgtacgtgagcatgatcgccctggagagacccgacctgagagagaaggtgatcaagggcgccgagatcctggaggtgctgcacagcctgcccgccgtgagacagtacctgttcagcctgtacgagtgcagatacagcgtgttcttccagagcctggccgtggtggagcaggagatgaagaaggactggctgttcgccccccactacagatactacgtgagagagatgagaatccacgcctacagccagctgctggagagctacagaagcctgaccctgggctacatggccgaggccttcggcgtgggcgtggagttcatcgaccaggagctgagcagattcatcgccgccggcagactgcactgcaagatcgacaaggtgaacgagatcgtggagaccaacagacccgacagcaagaactggcagtaccaggagaccatcaagaagggcgacctgctgctgaacagagtgcagaagctgagcagagtgatcaacatgtag

SEQ ID NO: 182366 - protein, 989 aa, Artificial Sequence
  derived and/or modified sequence
MKVVNLKQAILQAWKERWSDYQWAINMKKFFPKGATWDILNLADALLEQAMIGPSPNPLILSYLKYAISSQMVSYSSVLTAISKFDDFSRDLCVQALLDIMDMFCDRLSCHGKAEECIGLCRALLSALHWLLRCTAASAERLREGLEAGTPAAGEKQLAMCLQRLEKTLSSTKNRALLHIAKLEEASSWTAIEHSLLKLGEILANLSNPQLRSQAEQCGTLIRSIPTMLSVHAEQMHKTGFPTVHAVILLEGTMNLTGETQSLVEQLTMVKRMQHIPTPLFVLEIWKACFVGLIESPEGTEELKWTAFTFLKIPQVLVKLKKYSHGDKDFTEDVNCAFEFLLKLTPLLDKADQRCNCDCTNFLLQECGKQGLLSEASVNNLMAKRKADREHAPQQKSGENANIQPNIQLILRAEPTVTNILKTMDADHSKSPEGLLGVLGHMLSGKSLDLLLAAAAATGKLKSFARKFINLNEFTTYGSEESTKPASVRALLFDISFLMLCHVAQTYGSEVILSESRTGAEVPFFETWMQTCMPEEGKILNPDHPCFRPDSTKVESLVALLNNSSEMKLVQMKWHEACLSISAAILEILNAWENGVLAFESIQKITDNIKGKVCSLAVCAVAWLVAHVRMLGLDEREKSLQMIRQLAGPLFSENTLQFYNERVVIMNSILERMCADVLQQTATQIKFPSTGVDTMPYWNLLPPKRPIKEVLTDIFAKVLEKGWVDSRSIHIFDTLLHMGGVYWFCNNLIKELLKETRKEHTLRAVELLYSIFCLDMQQVTLVLLGHILPGLLTDSSKWHSLMDPPGTALAKLAVWCALSSYSSHKGQASTRQKKRHREDIEDYISLFPLDDVQPSKLMRLLSSNEDDANILSSPTDRSMSSSLSASQLHTVNMRDPLNRVLANLFLLISSILGSRTAGPHTQFVQWFMEECVDCLEQGGRGSVLQFMPFTTVSELVKVSAMSSPKVVLAITDLSLPLGRQVAAKAIAAL

SEQ ID NO: 182367 - protein, 899 aa, Artificial Sequence
  derived and/or modified sequence
MPLVPRWCPTLLSSQPSVSCHGKAEECIGLCRALLSALHWLLRCTAASAERLREGLEAGTPAAGEKQLAMCLQRLEKTLSSTKNRALLHIAKLEEASSWTAIEHSLLKLGEILANLSNPQLRSQAEQCGTLIRSIPTMLSVHAEQMHKTGFPTVHAVILLEGTMNLTGETQSLVEQLTMVKRMQHIPTPLFVLEIWKACFVGLIESPEGTEELKWTAFTFLKIPQVLVKLKKYSHGDKDFTEDVNCAFEFLLKLTPLLDKADQRCNCDCTNFLLQECGKQGLLSEASVNNLMAKRKADREHAPQQKSGENANIQPNIQLILRAEPTVTNILKTMDADHSKSPEGLLGVLGHMLSGKSLDLLLAAAAATGKLKSFARKFINLNEFTTYGSEESTKPASVRALLFDISFLMLCHVAQTYGSEVILSESRTGAEVPFFETWMQTCMPEEGKILNPDHPCFRPDSTKVESLVALLNNSSEMKLVQMKWHEACLSISAAILEILNAWENGVLAFESIQKITDNIKGKVCSLAVCAVAWLVAHVRMLGLDEREKSLQMIRQLAGPLFSENTLQFYNERVVIMNSILERMCADVLQQTATQIKFPSTGVDTMPYWNLLPPKRPIKEVLTDIFAKVLEKGWVDSRSIHIFDTLLHMGGVYWFCNNLIKELLKETRKEHTLRAVELLYSIFCLDMQQVTLVLLGHILPGLLTDSSKWHSLMDPPGTALAKLAVWCALSSYSSHKGQASTRQKKRHREDIEDYISLFPLDDVQPSKLMRLLSSNEDDANILSSPTDRSMSSSLSASQLHTVNMRDPLNRVLANLFLLISSILGSRTAGPHTQFVQWFMEECVDCLEQGGRGSVLQFMPFTTVSELVKVSAMSSPKVVLAITDLSLPLGRQVAAKAIAAL

SEQ ID NO: 182368 - protein, 306 aa, Artificial Sequence
  derived and/or modified sequence
MKKFFPKGATWDILNLADALLEQAMIGPSPNPLILSYLKYAISSQMVSYSSVLTAISKFDDFSRDLCVQALLDIMDMFCDRLSCHGKAEECIGLCRALLSALHWLLRCTAASAERLREGLEAGTPAAGEKQLAMCLQRLEKTLSSTKNRALLHIAKLEEASSWTAIEHSLLKLGEILANLSNPQLRSQAEQCGTLIRSIPTMLSVHAEQMHKTGFPTVHAVILLEGTMNLTGETQSLVEQLTMVKRMQHIPTPLFGRGSVLQFMPFTTVSELVKVSAMSSPKVVLAITDLSLPLGRQVAAKAIAAL

SEQ ID NO: 182369 - DNA, 2970 bp, Artificial Sequence
  derived and/or modified sequence
atgaaagtggtgaatctgaagcaagctatcctccaggcgtggaaggagaggtggtctgattatcagtgggctatcaacatgaagaaattctttcctaagggcgccacatgggacatccttaatctcgccgacgccctactagaacaggcaatgattgggcctagccccaatcccctcatccttagttacctcaaatacgctatttcaagtcagatggtgtcctactcctccgttcttacagccatttccaagttcgacgatttttctagagacctgtgcgttcaagctcttctggacattatggacatgttttgtgatagactgtcctgtcacggaaaggccgaagagtgtattgggctgtgcagggccctgttgtcagcattgcactggcttctgcgctgtactgccgcgagcgccgagagactcagggagggcttggaggctgggacaccagccgctggagaaaagcagctcgcgatgtgtttgcaaaggctcgagaagaccctgagctcaacaaaaaatagagccttactgcacatcgctaaattggaggaagctagcagctggacagcaatagagcacagcttactcaagctcggtgagatactggccaatctgtccaatccgcaattacgaagccaggccgagcagtgcggcacgctgatacgtagcatccccaccatgctatcagtgcacgctgaacagatgcataagacaggatttccaaccgttcacgctgtgattctgttggaaggcaccatgaatctcaccggagagacccaaagtctggtggagcaactgacgatggtaaagaggatgcagcatatccccacaccgctcttcgtgctggaaatttggaaggcatgcttcgttggacttattgaaagcccagaaggcacagaggagcttaagtggacagccttcacatttcttaaaattccgcaggtgttggtgaagctcaaaaaatattctcatggggacaaggactttacagaggacgttaactgtgcattcgaattcctactcaagctgaccccattactggacaaggccgaccagcgttgcaactgtgactgcactaatttcttgctccaggagtgcggaaagcagggacttttgagtgaggccagcgtcaacaatctgatggccaaacgcaaggccgatcgcgagcacgcccctcagcagaaatctggagaaaacgcaaacatacagcccaatatccagctgattctgagagcggagcctaccgttaccaatatcctcaaaactatggacgccgaccatagcaaatctccagaaggactcctcggggtcttagggcacatgcttagcggaaagagtttggatctactgcttgccgcagccgcagctaccggaaaactgaagagttttgctcggaaattcattaacctgaatgaatttactacctatggcagcgaggagtccaccaagccagcttccgtgagggcactgctgttcgacatcagtttcctgatgctgtgtcatgtggctcagacctatggttcagaagtaatcctctccgaaagccggacaggagccgaagtgccattcttcgagacatggatgcaaacatgcatgccggaagaaggcaaaatcctgaatcctgatcacccatgctttaggccggactctacaaaggtggaatccctggtcgccctcctgaacaatagctctgagatgaaattagtccagatgaagtggcacgaggcatgccttagcatttccgccgccattctggagatcctgaacgcttgggagaacggagtgcttgcattcgaatctatccagaagatcaccgacaacattaaggggaaagtgtgctcactcgccgtttgtgccgtggcctggctggtagctcacgtgagaatgctggggcttgatgagagggagaaaagcctccagatgatacgacagctcgcaggtccactgtttagtgagaatacgctccaattttacaatgagcgcgtagtgattatgaattcaattttagaaaggatgtgcgctgacgttcttcagcagacggctactcagatcaagttcccgtctacaggcgtcgacactatgccatactggaatcttctcccacctaagagacccatcaaagaagtcctgacggatatctttgctaaggtgcttgaaaagggttgggtcgatagccgctccatacacatcttcgacaccttgctgcacatgggaggggtgtattggttttgcaataaccttatcaaggagttactgaaggaaactcgcaaggaacatacattacgcgcggtggaacttctctacagcatattttgcctggacatgcagcaggtaacactggtgctcctaggacatatcctgcccggactgctgacggattcttcgaagtggcacagtctgatggacccccccggtacggctctggccaaactcgccgtttggtgcgctcttagctcgtattcctctcacaagggccaggcaagcactagacagaaaaaacgacaccgcgaggatattgaggattacatcagtctctttccgctcgacgacgtgcaacccagtaaactaatgcggctgctgtccagcaatgaggacgatgcgaacatactgagctcaccgactgatcggtcgatgtcttcctctttgtccgcttcccagctccacaccgttaatatgcgggatcccctgaaccgtgtgttggctaatctcttcctcctcatctcatctattctggggtcacggaccgctgggcctcatacccagttcgtacagtggtttatggaggaatgcgtggactgtctcgaacaaggcgggcgagggtccgttctgcagtttatgcccttcaccaccgtgtcagagttggtcaaggtcagtgctatgtcatctccaaaggtagtcctggcaattacagatctgagtctcccccttgggcgccaagttgcagccaaagcgatagctgccctctag

SEQ ID NO: 182370 - DNA, 2970 bp, Artificial Sequence
  derived and/or modified sequence
atgaaggtggttaacctgaagcaagccattttgcaggcctggaaggagcgctggagcgactatcagtgggccatcaatatgaagaagttcttcccaaagggcgctacatgggacatcctcaatctggccgacgcacttctggagcaggcaatgatcggcccttctccaaaccctctgatcctctcctatcttaaatatgctatctctagccagatggtctcctattcatctgtcttgaccgccatttctaagttcgatgacttcagtagagacctctgcgtgcaggcgctcctagatattatggacatgttttgtgatcgtctatcctgtcacggcaaggctgaggagtgtattgggctgtgccgcgctttgctgagtgctctccattggcttcttcgctgcaccgctgcctcagcagagcggttgagagagggcctggaggcaggaacacctgccgcaggagaaaaacagctcgccatgtgtttgcagaggctggagaaaacccttagcagtacaaaaaatagggcacttctccatatcgcaaaactcgaggaagcttcctcttggaccgccatcgagcacagcttacttaagctcggtgagattctcgccaatctctccaacccacagctccggtctcaggctgaacagtgtgggactctcataaggtctattcccaccatgctgagcgtccatgctgagcagatgcataagacgggttttcccaccgttcacgcggttattcttctcgaagggactatgaacctcacaggagagacccagtctcttgtggagcaattgacaatggttaaaaggatgcaacacatcccaacccccctctttgttctagaaatttggaaggcttgcttcgtcggacttattgagagcccagaaggaactgaagaactgaaatggacagcctttactttcttgaagattccccaggtgttagtcaagctaaagaaatattcacatggcgacaaggacttcacagaagacgtcaactgtgcattcgaatttctcctcaaattgacccccctcctcgataaggccgatcaacgctgcaactgtgactgtactaactttctcctccaggagtgcggcaaacaaggactcctcagcgaggctagcgttaacaatctcatggccaagagaaaagcagacagggaacatgccccacagcaaaagtccggcgagaacgctaacatccagccgaacatccagctgatcctgagagctgaaccaaccgtgaccaacattttgaagactatggatgccgaccatagcaaaagtcccgaggggctgctgggagtattgggtcacatgctgtctggcaaatcactggatctgctactggcagcggctgctgcgacagggaaactgaagtcatttgcgaggaagttcatcaatctgaatgagtttacgacttatggttccgaggaaagcactaaacccgcatccgtgcgcgccctcctctttgatatctccttcctcatgctgtgccacgtcgctcagacgtatggatccgaagtcattctcagcgaatctcgcactggcgctgaagtgccttttttcgagacctggatgcagacttgtatgccagaggagggcaaaatactcaaccctgatcacccatgtttcagacctgactctaccaaagtcgagtctctagtggctctgctcaataactcaagtgagatgaagctggtgcagatgaagtggcacgaagcttgcttgagcatcagcgcagcaatcttggaaatcctgaatgcctgggaaaatggtgtgcttgctttcgaaagcattcagaagatcaccgacaatatcaagggaaaggtctgttcgctggccgtctgcgctgtggcatggctggtcgcacatgtgaggatgctcggcctggacgagcgggaaaagtcactacaaatgatcaggcaactggctgggccactcttttctgaaaacacccttcagttttacaacgagcgcgtggtgattatgaacagcatcctcgagcggatgtgcgccgacgttctccagcagacggctacccaaattaagttcccaagcacaggggtcgacactatgccctactggaacttgctacctcccaaacggcccatcaaagaggtgctcaccgacatttttgctaaagtactcgaaaaggggtgggtcgattcgcgctctattcacattttcgacaccttgctccacatgggtggagtttattggttctgcaacaacctgatcaaggagctgcttaaggagacacggaaagagcacaccctccgcgccgtggaactgctctatagcatcttttgcttggatatgcagcaggtgacgctggtgttgctcggccatatcctaccggggctcctcactgatagcagcaaatggcactctttaatggatcccccagggacagcattggcaaagcttgccgtatggtgcgctcttagtagctactcttcacacaagggacaggcctcaactagacaaaaaaagcggcaccgggaggatatcgaagactacattagcctctttccccttgatgacgtccaaccaagcaaactgatgcgcctcctaagttctaacgaagatgacgccaatatcctgtcctcccccactgatcggtctatgagcagctctttaagtgctagtcagctgcatactgtgaacatgcgggaccctttaaatagggtgttggcaaacttgttcttactgattagcagcatactgggctcccgaacagccggaccacacacccagttcgtgcagtggtttatggaggaatgcgttgactgtctagagcaaggaggtaggggctcggtgcttcagtttatgccctttaccacggtgtcggagctggttaaggtcagcgccatgtccagcccaaaggtggtgcttgccattaccgacttgtctctgccgctggggcggcaggttgctgctaaggccatcgccgccctctag

SEQ ID NO: 182371 - DNA, 2970 bp, Artificial Sequence
  derived and/or modified sequence
atgaaggtcgtgaacctcaaacaggctatcctgcaggcttggaaagaacgttggagtgattatcaatgggccattaatatgaagaaattctttccaaagggggccacttgggatatcctgaacctggccgatgctcttctggagcaggctatgatcggaccgtcaccaaaccctctcatcctctcttacctgaagtacgcaatcagcagccagatggtgtcatattcttcagtcctgaccgccatcagcaagttcgatgatttttccagggatctttgtgtccaggctttgctagatatcatggacatgttctgtgatcgactcagctgccacggcaaagccgaagagtgcatagggctctgtagggctctgctctctgccttgcattggctacttagatgtaccgctgcaagcgcggaacggcttcgggagggcctggaagccggcacccccgctgctggggagaaacagctcgcgatgtgtttgcaaaggttggaaaagacattgagtagcaccaaaaatcgagcgctacttcatatcgctaaactggaagaggcctctagctggacagccatcgaacatagcctgctcaagctgggcgagattcttgcaaatctgtcaaacccccagctccgtagccaggccgaacagtgcggaacactgataagatccattcctactatgcttagcgtgcatgcggagcagatgcataaaactggctttcccacagtacatgccgtgatcctgctggaagggacgatgaaccttacaggggagacgcaatcccttgtggaacagctgaccatggtcaagcgaatgcagcatatacctactccactgtttgtccttgagatatggaaagcgtgctttgtaggtctgattgagtcccctgagggcactgaggagctgaagtggaccgcattcactttcctgaaaataccacaagtattggttaagctgaagaagtacagccatggcgataaggactttacagaggacgtgaattgtgcgttcgagtttcttctgaaactgaccccactcctggacaaagcggaccaacgatgcaattgcgattgtactaatttcctcctgcaggaatgcggcaagcaaggcctactgagtgaagcttccgtcaataacctgatggccaagcggaaagcggacagagagcatgctccccagcagaagagcggggaaaacgcgaacatccagcccaatatccaactcatcctgagagctgagccaacggttactaacattctgaaaaccatggacgccgatcattcaaaatcgcccgaaggcttgctgggagtgttaggacacatgctgagcggtaagagcttggatttgctgctcgctgcagcagccgctaccggaaaactgaagtcatttgcgcgcaagtttatcaacctcaacgaatttacaacctacggctctgaggagtctactaagccagcaagcgtccgagcgttgttattcgatatctcttttctgatgctgtgccacgttgcgcagacctatggtagcgaggtaattctgagcgaaagcagaaccggggccgaggttccatttttcgaaacttggatgcagacatgtatgcctgaggaaggaaagattctgaatccggatcacccctgctttagacctgacagcacaaaagtggagagcctggtcgccttactgaataattcaagtgagatgaagttggtgcaaatgaaatggcatgaagcttgccttagcatcagtgccgctatactggaaattctgaacgcttgggagaatggagtcctggcctttgaatcaatccagaagatcacggataacatcaaagggaaagtctgtagccttgctgtgtgcgccgttgcttggctcgtggctcatgtcagaatgttgggcttagatgagcgggaaaagtccctacaaatgatacggcagctagccggaccactgttctccgagaatacactgcagttctacaatgagagggtcgtgatcatgaacagtatactcgagcgtatgtgcgcggatgtcctgcaacagaccgcaacgcaaatcaaattccccagcactggggtggatacaatgccatactggaacttactgccccccaagcgccctattaaagaggttctgacagacatcttcgcaaaggtcctcgagaaaggctgggtcgacagtcgatcaatccatatctttgacactttacttcacatgggaggagtgtattggttctgtaacaatctcataaaagagctgctgaaggagacgcgcaaagagcacacacttcgcgcggttgagctcctttactcaatattctgcctggacatgcaacaggtaacacttgtcctgctcgggcatatactgccaggactgcttacagactccagcaaatggcacagcctcatggatcccccgggcaccgcactagccaagttagctgtctggtgcgctctgagctcatattcgtcacataagggccaggcgtcaaccagacagaagaagaggcacagggaagatattgaggactatataagtctgtttcctctggacgatgttcaaccctctaagctgatgagactgctgtcctctaatgaagatgatgcaaacatcctgtcctccccaaccgaccgctcaatgtcctctagtctgtcagcttcccagctacatactgtaaatatgcgtgatcctctcaatagggtgttggccaacctctttttgctcatcagtagcatcctgggtagtcgcacagccggaccacatacacagtttgtgcaatggtttatggaggagtgcgttgactgcctcgaacagggcggccgcggttccgttttgcagttcatgccctttactaccgtgtccgaactggttaaggtgagtgccatgtctagccctaaagtcgtcctagccatcactgacctctctctacccctgggacgacaggtggctgctaaagccattgctgctctgtag

SEQ ID NO: 182372 - DNA, 2466 bp, Artificial Sequence
  derived and/or modified sequence
atgatcggaccctcacccaaccctttgattttgagctatttgaagtatgctatctcatctcagatggtgtcatactcttctgtgctcacggctatcagcaaatttgatgatttctcacgcgacttatgcgtgcaggcattgttggacataatggatatgttctgcgatcgactttcgtgccatggaaaggcggaagagtgcatcggactctgtcgagccctgcttagcgctttgcactggcttctgagatgcactgccgcctcggcagaaaggcttcgagagggactggaggcaggaacccctgcagccggtgaaaagcagctggcgatgtgcctccagcgcttggagaaaaccctgagcagtacaaaaaatcgtgctctgttacacatcgctaaattggaagaggcaagcagctggaccgctatcgaacacagccttcttaagctcggagagatcctcgctaatctgtcaaacccccaacttcgctcccaggctgagcagtgtggaaccctcatccgttcaatcccaacaatgttatccgtgcatgcagagcagatgcataagactggattccctactgttcacgcagtcatacttctggagggaactatgaatcttaccggagagacccaatccctggtcgagcagttgactatggtgaagcgcatgcagcatatccctacgccactctttgtgctggaaatatggaaagcctgttttgtggggctgatcgaatcccccgaaggaactgaagagctcaagtggacagcctttacattcctcaagatccctcaagtgctggttaaactcaagaaatattcgcatggcgacaaagatttcacggaagacgtaaactgtgcctttgaatttttactgaagttgactccactactggataaggctgatcagcggtgcaattgcgactgtactaactttttgctacaggaatgtggaaagcaaggccttttaagcgaggcctcagtaaacaacctgatggctaagaggaaggcagatcgggagcatgcaccccagcagaagagcggtgaaaacgcgaacatccagccaaacattcaactcatcctgcgcgctgagcccactgttaccaacattcttaagactatggacgctgaccattcaaagagccccgaaggccttctcggggtgctggggcacatgctcagtggcaaatccctggacctgctacttgccgctgccgccgctaccgggaaactgaagtcgttcgctcgcaagtttataaacctaaacgaatttactacctatggcagcgaggagtcaacaaaacccgccagcgtgcgcgccctactatttgatatttcgtttctgatgctgtgccacgtcgctcagacgtatggctctgaagtaatactttctgagtcacgcaccggcgcggaggtcccctttttcgagacctggatgcagacgtgcatgcctgaggagggcaagattttaaaccccgaccacccttgttttcgacctgattccactaaggttgaatcactcgtcgccttattaaataacagttcagaaatgaagctggtgcagatgaaatggcatgaggcttgtctttccatctctgctgccattctcgaaattctcaacgcttgggagaacggcgtgctagcctttgaaagcattcagaaaatcacggataacataaaaggtaaagtgtgttctctcgcagtctgcgcagtggcctggttggtggcgcatgtcagaatgcttggtctggacgagagagaaaaaagtctacaaatgatccgacagcttgcagggccactcttcagcgaaaatactctgcagttctataacgaacgcgtcgtcataatgaactccatcctagaaaggatgtgtgccgacgtgctgcagcaaactgcaacacagatcaaatttccctccactggagtggatacaatgccgtattggaaccttctccctccaaagcgccctatcaaagaggttttgaccgacatctttgcaaaagttttagaaaaaggctgggttgattctcggagtatccacatctttgatactttactgcacatggggggcgtgtactggttctgtaacaaccttattaaggaactgttaaaggagacacgcaaggaacatactctcagagcggttgaactcctctactccatcttttgccttgatatgcaacaggttacactggtcttgctggggcacattctgccagggctgcttacggattcgtcaaaatggcatagtctcatggaccccccagggaccgccctggctaaattggccgtttggtgcgctctgagctcctacagtagtcacaagggacaggcctcgactagacaaaagaagcgccaccgcgaggatattgaagactacatctcccctaaagtcgtcctggccataacagacctaagcctccctcttgggcgtcaggtcgccgccaaggcgatcgctgctctgtag

SEQ ID NO: 182373 - DNA, 1026 bp, Artificial Sequence
  derived and/or modified sequence
atgaagaagttctttccaaagggggccacctgggatatcctgaacctggccgatgctcttctcgaacaggccatgatcggcccgtcgcccaatcccctgatactatcttaccttaagtacgccatctctagtcaaatggtgagttattccagcgtcttaaccgctatttctaaatttgacgactttagccgagacttatgcgtgcaggcacttctggacataatggatatgttctgtgacagactgagttgtcacgggaaagctgaagaatgtattggactgtgcagagcgctcctgtctgctttgcattggctcttgcggtgtaccgcagccagtgcggagcgcttgagggaagggctggaagccggaacgccggctgccggggaaaagcaattagccatgtgcctgcagcgcttggaaaagacactctccagcacgaagaatagagctctgctccacattgccaagctggaagaagcaagtagttggaccgcgatagaacactcactgctgaagttaggggagattcttgccaacctgtccaatccccaactccggtcccaggccgagcaatgcgggactttaatcagaagtattccaaccatgctgtcggtgcacgcagaacagatgcataagaccggcttcccaacagtgcatgccgtgattctcctggaaggaactatgaatctcaccggagaaacccagtcgttggtcgaacagcagacggcaacccaaattaagtttccctcaaccggtgtcgacactatgccttactggaacctgcttcctcccaaaaggcctattaaagaagtcctgacagacatttttgccaaggtgctggaaaagggatgggtcgactccaggtcaatacatatattcgataccttattacacatgggcggcgtctattggttctgtaataacctcatcaaagaactcctcaaagagactagaaaagagcataccctcagggccgttgagctgctctactccatattctgtctggatatgcagcaggttacctag

SEQ ID NO: 182374 - DNA, 2796 bp, Artificial Sequence
  derived and/or modified sequence
atgaaagtggtaaatctgaagcaggcgattctccaggcttggaaagagagatggagtgattatcagtgggcaatcaatatgaaaaaattctttcccaagggtgccacctgggatattcttaatctcgcagatgccttgctggagcaggccatgattgggccgagccctaaccccttgatcctgagctatctgaaatatgccatctcgtcccagatggtatcctattcctctgtgctgacagcaattatgtgtctacaaaggttagaaaagaccctttcctcaaccaaaaatcgggccctgttgcacattgcaaaacttgaagaagcatcattgcataccagtcagggattaggacagggggggacgcgcgcgaaccagcctactgcatcgtggaccgcgatcgaacattcactcctcaagctaggagagatcctcgcaaacttgagtaacccccaactccgctcacaggcagagcaatgcggaaccctaattcgctcaatcccaacaatgctgtccgtccacgccgaacagatgcacaaaacaggatttcctactgtacacgcggtcattctgctcgagggtactatgaacctgaccggagagacccagtctctcgtcgagcagctaaccatggtaaagagaatgcagcacatccccaccccgcttttcgtcctcgaaatttggaaggcatgctttgtcggcctgatagagagtcccgagggcacggaggagcttaagtggaccgccttcacatttctgaagattcctcaggttctcgtcaagctcaagaagtattcccatggcgataaggacttcactgaagatgtcaattgtgcattcgaattcctgctgaaactgacgcctctgctggacaaggctgatcagcgctgtaactgcgactgtacgaattttttactgcaagaatgtgggaagcaggggctcttatccgaagcgagtgtgaataacctgatggctaagaggaaggcagaccgggaacacgccccacagcagaagtcaggcgagaatgcaaacatccagcctaatatccagctgattctgcgagcggagccaaccgttaccaatatactaaaaacgatggatgccgatcacagtaagtcacccgaaggtctcctcggcgtcctgggccacatgctgagcgggaaaagcttggacctgctactagcggccgccgcggcaaccgggaaattgaaatccttcgctaggaagtttataaacctcaatgagttcactacatatggctctgaggaaagtacgaagccggcttctgtgcgagccctgctctttgatatcagcttcctgatgctgtgtcacgtggctcagacttacggctcggaagtgatcttaagcgaatcacgaaccggagcagaggtgcctttcttcgaaacatggatgcaaacttgtatgcctgaagagggcaaaatactcaaccctgaccacccttgttttcggccggatagcacgaaagtggaaagccttgtggccctactgaacaactcttctgagatgaagttagtacagatgaagtggcatgaggcctgtttatctattagcgccgctatactggagatacttaacgcctgggagaatggggtactggccttcgagtccattcaaaagattaccgataacattaaaggaaaggtctgctcactggccgtatgcgcagtggcgtggttagtcgcacatgttaggatgctgggcctcgatgagagagagaaaagtctacaaatgattaggcagttggccgggcctctctttagcgaaaacactctgcagttttacaacgagagggtcgtgatcatgaactccatactcgagagaatgtgtgccgacgtgctgcaacagacggccactcaaatcaaatttccttccacgggggtggatactatgccttattggaatctcttacccccgaaacggcctattaaggaggtgctgactgatattttcgcaaaagtactagaaaagggatgggtggatagccgatccattcatatattcgacacgttacttcacatgggaggcgtgtattggttctgtaacaacctaatcaaggaattactgaaggagacaagaaaagagcacactctgcgcgctgttgagctgctttattctattttctgtctggacatgcagcaagtcacgcttgtactgttgggacacatattgcccggattgcttactgactcgtccaaatggcatagcctaatggaccctcctgggacagctctcgcaaaactggctgtatggtgtgccttgagcagttactcttctcacaagggacaagcaagcacacgccaaaaaaagcgtcaccgggaggacatcgaggactacatttctttgtttccgttagacgacgtccagcccagtaagcttatgcgtctgctcagtagcaatgaggacgatgccaacatcctgagcagcccaacagatcggtccatgtcctcttccctctccgcctcacaactccacaccgtgaacatgcgagacccgttgaacagggtgttggccaatctcttcttactaatatccagtattctaggctctagaaccgccgggccccatacgcaatttgtacagtggtttatggaagaatgtgtggattgtctcgaacagggggggagagggtctgtgctccagtttatgccattcactactgttagcgaattggttaaagttagcgctatgagttcccccaaagtcgtccttgccatcactgacctgtccctgcctctgggaaggcaagtggctgccaaggccatcgcggccctctag

SEQ ID NO: 182375 - DNA, 921 bp, Artificial Sequence
  derived and/or modified sequence
atgaagaagttctttccgaagggtgctacatgggatatactaaacttggcagacgctctgcttgagcaggcgatgataggaccctcccccaacccgctgatcctgtcctacttaaaatatgctataagtagccagatggttagttattcgagtgtgctgactgcaatctctaaattcgacgatttctccagggatttgtgcgtgcaggccttgcttgatatcatggatatgttctgcgatcgcctttcttgccacgggaaggctgaagaatgcatcggactgtgccgtgccctgctgtcagccctgcactggctccttagatgtactgccgccagtgccgagcgcctgcgcgaaggccttgaagccggaacacctgcggccggagagaagcagctggccatgtgtctgcagaggctggagaagacacttagtagcaccaagaaccgagcattactgcacattgctaagctcgaagaagcttcttcttggactgcgatcgagcactcgcttttgaagctgggcgagatcctggctaacctgtccaacccgcagctgcgctctcaggctgagcagtgcgggacgctgatacgctcaattcccaccatgctgtctgtgcacgcggagcagatgcataagacaggctttccgactgtccacgccgtgatattgctcgagggaacgatgaatctgactggagaaacacagtctctggtcgagcagctgactatggtgaagcgaatgcagcatatccccactcctcttttcggccgtggctctgtgctgcagtttatgccctttacgacagtcagtgaacttgtaaaggtctcagccatgagctctccaaaagtagtactcgccattactgacctgtccctgccactcggcagacaggtagccgcaaaggccattgccgccctgtag

SEQ ID NO: 182376 - DNA, 2970 bp, Artificial Sequence
  derived and/or modified sequence
atgaaggtggtgaacctgaagcaggccatcctgcaggcctggaaggagcgctggagcgactaccagtgggccatcaacatgaagaagttcttccccaagggggccacctgggacatcctgaacctggctgatgccctgctggagcaggccatgattggccccagccccaaccccctcatcctgagctacctgaagtatgccatcagcagccagatggtgtcctacagctctgtgctgacagccatcagcaagtttgatgacttcagccgggacctgtgtgtgcaggccctgctggacatcatggacatgttctgtgaccggctgagctgccacggcaaggccgaggagtgcatcggcctgtgccgggccctgctgagcgccctgcactggctgctgcgctgcacagctgccagcgctgagcggctgcgggagggcctggaggccggcaccccagctgctggggagaagcagctggccatgtgcctgcagaggctggagaagaccctgagcagcaccaagaacagagccctgctgcacatcgccaagctggaggaggccagctcctggacagccatcgagcacagcctgctgaagctgggggagatcctggccaacctgagcaacccccagctgcggagccaggccgagcagtgtggcaccctcatccgcagcatccccaccatgctgtctgtgcatgctgagcagatgcacaagacaggcttccccaccgtgcacgccgtcatcctgctggagggcaccatgaacctgactggagagacccagagcctggtggagcagctgaccatggtgaagaggatgcagcacatccccacccccctgtttgtgctggagatctggaaggcctgctttgtgggcctcatcgagagccctgagggcacagaggagctgaagtggacagccttcaccttcctgaagatcccccaggtgctggtgaagctgaagaagtacagccatggagacaaggacttcacagaagatgtgaactgtgcctttgagttcctgctgaagctgacccccctgctggacaaggctgaccagcgctgcaactgtgactgcaccaacttcctgctgcaggagtgtgggaagcagggcctgctgtctgaggcctctgtgaacaacctgatggccaagaggaaggctgaccgggagcacgccccccagcagaagtctggagaaaatgccaacatccagcccaacatccagctgatcctgcgggcagagcccaccgtgaccaacatcctgaagaccatggatgctgaccacagcaagagccctgagggcctgctgggcgtgctgggccacatgctgagcggcaagagcctggacctgctgctggccgctgctgctgccaccgggaagctgaagagctttgccaggaagttcatcaacctgaatgagttcaccacctacggcagcgaggagagcaccaagccagcctctgtgcgggccctgctgtttgacatctccttcctgatgctgtgccacgtggcccagacctacggcagcgaggtgatcctgtctgagagcaggactggagctgaggtgcccttctttgagacctggatgcagacctgcatgcctgaggagggcaagatcctgaacccagaccacccctgcttccggccagacagcaccaaggtggagagcctggtggccctgctgaacaacagcagcgagatgaagctggtgcagatgaagtggcatgaggcctgcctgagcatctctgctgccatcctggagatcctgaatgcctgggagaatggagtgctggcctttgagagcatccagaagatcacagacaacatcaagggcaaggtgtgcagcctggccgtgtgtgctgtggcctggctggtggcccacgtgaggatgctgggcctggatgagcgggagaagagcctgcagatgatccggcagctggccggccccctcttcagcgagaacaccctgcagttctacaatgaaagagtggtgatcatgaacagcatcctggagaggatgtgtgctgatgtgctgcagcagacagccacccagatcaagttccccagcactggagtggacaccatgccctactggaacctgctgccccccaagaggcccatcaaggaggtgctgacagacatctttgccaaggtgctggagaagggctgggtggacagccgcagcatccacatctttgacaccctgctgcacatgggcggcgtgtactggttctgcaacaacctgatcaaggagctgctgaaggagaccaggaaggagcacaccctgcgggctgtggagctgctgtacagcatcttctgcctggacatgcagcaggtgaccctggtgctgctgggccacatcctgcccggcctgctgacagacagcagcaagtggcacagcctgatggaccccccaggcacagccctggccaagctggccgtgtggtgtgccctgagcagctacagcagccacaagggccaggccagcacccggcagaagaagaggcaccgggaggacatcgaggactacatcagcctcttccccctggatgatgtgcagcccagcaagctgatgaggctgctgagcagcaatgaagatgatgccaacatcctgagcagccccacagaccgctccatgagcagcagcctgagcgccagccagctgcacacagtgaacatgagggaccccctgaacagagtgctggccaacctcttcctgctgatcagcagcatcctgggcagcaggacagctggcccccacacccagtttgtgcagtggttcatggaggagtgtgtggactgcctggagcagggcggccggggctctgtgctgcagttcatgcccttcaccaccgtgtctgagctggtgaaggtgtctgccatgagcagccccaaggtggtgctggccatcacagacctgagcctgcccctgggccggcaggtggccgccaaggccatcgccgccctgtag

SEQ ID NO: 182377 - DNA, 2466 bp, Artificial Sequence
  derived and/or modified sequence
atgattggccccagccccaaccccctcatcctgagctacctgaagtatgccatcagcagccagatggtgtcctacagctctgtgctgacagccatcagcaagtttgatgacttcagccgggacctgtgtgtgcaggccctgctggacatcatggacatgttctgtgaccggctgagctgccacggcaaggccgaggagtgcatcggcctgtgccgggccctgctgagcgccctgcactggctgctgcgctgcacagctgccagcgctgagcggctgcgggagggcctggaggccggcaccccagctgctggggagaagcagctggccatgtgcctgcagaggctggagaagaccctgagcagcaccaagaacagagccctgctgcacatcgccaagctggaggaggccagctcctggacagccatcgagcacagcctgctgaagctgggggagatcctggccaacctgagcaacccccagctgcggagccaggccgagcagtgtggcaccctcatccgcagcatccccaccatgctgtctgtgcatgctgagcagatgcacaagacaggcttccccaccgtgcacgccgtcatcctgctggagggcaccatgaacctgactggagagacccagagcctggtggagcagctgaccatggtgaagaggatgcagcacatccccacccccctgtttgtgctggagatctggaaggcctgctttgtgggcctcatcgagagccctgagggcacagaggagctgaagtggacagccttcaccttcctgaagatcccccaggtgctggtgaagctgaagaagtacagccatggagacaaggacttcacagaagatgtgaactgtgcctttgagttcctgctgaagctgacccccctgctggacaaggctgaccagcgctgcaactgtgactgcaccaacttcctgctgcaggagtgtgggaagcagggcctgctgtctgaggcctctgtgaacaacctgatggccaagaggaaggctgaccgggagcacgccccccagcagaagtctggagaaaatgccaacatccagcccaacatccagctgatcctgcgggcagagcccaccgtgaccaacatcctgaagaccatggatgctgaccacagcaagagccctgagggcctgctgggcgtgctgggccacatgctgagcggcaagagcctggacctgctgctggccgctgctgctgccaccgggaagctgaagagctttgccaggaagttcatcaacctgaatgagttcaccacctacggcagcgaggagagcaccaagccagcctctgtgcgggccctgctgtttgacatctccttcctgatgctgtgccacgtggcccagacctacggcagcgaggtgatcctgtctgagagcaggactggagctgaggtgcccttctttgagacctggatgcagacctgcatgcctgaggagggcaagatcctgaacccagaccacccctgcttccggccagacagcaccaaggtggagagcctggtggccctgctgaacaacagcagcgagatgaagctggtgcagatgaagtggcatgaggcctgcctgagcatctctgctgccatcctggagatcctgaatgcctgggagaatggagtgctggcctttgagagcatccagaagatcacagacaacatcaagggcaaggtgtgcagcctggccgtgtgtgctgtggcctggctggtggcccacgtgaggatgctgggcctggatgagcgggagaagagcctgcagatgatccggcagctggccggccccctcttcagcgagaacaccctgcagttctacaatgaaagagtggtgatcatgaacagcatcctggagaggatgtgtgctgatgtgctgcagcagacagccacccagatcaagttccccagcactggagtggacaccatgccctactggaacctgctgccccccaagaggcccatcaaggaggtgctgacagacatctttgccaaggtgctggagaagggctgggtggacagccgcagcatccacatctttgacaccctgctgcacatgggcggcgtgtactggttctgcaacaacctgatcaaggagctgctgaaggagaccaggaaggagcacaccctgcgggctgtggagctgctgtacagcatcttctgcctggacatgcagcaggtgaccctggtgctgctgggccacatcctgcccggcctgctgacagacagcagcaagtggcacagcctgatggaccccccaggcacagccctggccaagctggccgtgtggtgtgccctgagcagctacagcagccacaagggccaggccagcacccggcagaagaagaggcaccgggaggacatcgaggactacatcagccccaaggtggtgctggccatcacagacctgagcctgcccctgggccggcaggtggccgccaaggccatcgccgccctgtag

SEQ ID NO: 182378 - DNA, 1026 bp, Artificial Sequence
  derived and/or modified sequence
atgaagaagttcttccccaagggggccacctgggacatcctgaacctggctgatgccctgctggagcaggccatgattggccccagccccaaccccctcatcctgagctacctgaagtatgccatcagcagccagatggtgtcctacagctctgtgctgacagccatcagcaagtttgatgacttcagccgggacctgtgtgtgcaggccctgctggacatcatggacatgttctgtgaccggctgagctgccacggcaaggccgaggagtgcatcggcctgtgccgggccctgctgagcgccctgcactggctgctgcgctgcacagctgccagcgctgagcggctgcgggagggcctggaggccggcaccccagctgctggggagaagcagctggccatgtgcctgcagaggctggagaagaccctgagcagcaccaagaacagagccctgctgcacatcgccaagctggaggaggccagctcctggacagccatcgagcacagcctgctgaagctgggggagatcctggccaacctgagcaacccccagctgcggagccaggccgagcagtgtggcaccctcatccgcagcatccccaccatgctgtctgtgcatgctgagcagatgcacaagacaggcttccccaccgtgcacgccgtcatcctgctggagggcaccatgaacctgactggagagacccagagcctggtggagcagcagacagccacccagatcaagttccccagcactggagtggacaccatgccctactggaacctgctgccccccaagaggcccatcaaggaggtgctgacagacatctttgccaaggtgctggagaagggctgggtggacagccgcagcatccacatctttgacaccctgctgcacatgggcggcgtgtactggttctgcaacaacctgatcaaggagctgctgaaggagaccaggaaggagcacaccctgcgggctgtggagctgctgtacagcatcttctgcctggacatgcagcaggtgacctag

SEQ ID NO: 182379 - DNA, 2796 bp, Artificial Sequence
  derived and/or modified sequence
atgaaggtggtgaacctgaagcaggccatcctgcaggcctggaaggagcgctggagcgactaccagtgggccatcaacatgaagaagttcttccccaagggggccacctgggacatcctgaacctggctgatgccctgctggagcaggccatgattggccccagccccaaccccctcatcctgagctacctgaagtatgccatcagcagccagatggtgtcctacagctctgtgctgacagccatcatgtgcctgcagaggctggagaagaccctgagcagcaccaagaacagagccctgctgcacatcgccaagctggaggaggccagcctgcacaccagccagggcctgggccagggcggcacccgggccaaccagcccacagcctcctggacagccatcgagcacagcctgctgaagctgggggagatcctggccaacctgagcaacccccagctgcggagccaggccgagcagtgtggcaccctcatccgcagcatccccaccatgctgtctgtgcatgctgagcagatgcacaagacaggcttccccaccgtgcacgccgtcatcctgctggagggcaccatgaacctgactggagagacccagagcctggtggagcagctgaccatggtgaagaggatgcagcacatccccacccccctgtttgtgctggagatctggaaggcctgctttgtgggcctcatcgagagccctgagggcacagaggagctgaagtggacagccttcaccttcctgaagatcccccaggtgctggtgaagctgaagaagtacagccatggagacaaggacttcacagaagatgtgaactgtgcctttgagttcctgctgaagctgacccccctgctggacaaggctgaccagcgctgcaactgtgactgcaccaacttcctgctgcaggagtgtgggaagcagggcctgctgtctgaggcctctgtgaacaacctgatggccaagaggaaggctgaccgggagcacgccccccagcagaagtctggagaaaatgccaacatccagcccaacatccagctgatcctgcgggcagagcccaccgtgaccaacatcctgaagaccatggatgctgaccacagcaagagccctgagggcctgctgggcgtgctgggccacatgctgagcggcaagagcctggacctgctgctggccgctgctgctgccaccgggaagctgaagagctttgccaggaagttcatcaacctgaatgagttcaccacctacggcagcgaggagagcaccaagccagcctctgtgcgggccctgctgtttgacatctccttcctgatgctgtgccacgtggcccagacctacggcagcgaggtgatcctgtctgagagcaggactggagctgaggtgcccttctttgagacctggatgcagacctgcatgcctgaggagggcaagatcctgaacccagaccacccctgcttccggccagacagcaccaaggtggagagcctggtggccctgctgaacaacagcagcgagatgaagctggtgcagatgaagtggcatgaggcctgcctgagcatctctgctgccatcctggagatcctgaatgcctgggagaatggagtgctggcctttgagagcatccagaagatcacagacaacatcaagggcaaggtgtgcagcctggccgtgtgtgctgtggcctggctggtggcccacgtgaggatgctgggcctggatgagcgggagaagagcctgcagatgatccggcagctggccggccccctcttcagcgagaacaccctgcagttctacaatgaaagagtggtgatcatgaacagcatcctggagaggatgtgtgctgatgtgctgcagcagacagccacccagatcaagttccccagcactggagtggacaccatgccctactggaacctgctgccccccaagaggcccatcaaggaggtgctgacagacatctttgccaaggtgctggagaagggctgggtggacagccgcagcatccacatctttgacaccctgctgcacatgggcggcgtgtactggttctgcaacaacctgatcaaggagctgctgaaggagaccaggaaggagcacaccctgcgggctgtggagctgctgtacagcatcttctgcctggacatgcagcaggtgaccctggtgctgctgggccacatcctgcccggcctgctgacagacagcagcaagtggcacagcctgatggaccccccaggcacagccctggccaagctggccgtgtggtgtgccctgagcagctacagcagccacaagggccaggccagcacccggcagaagaagaggcaccgggaggacatcgaggactacatcagcctcttccccctggatgatgtgcagcccagcaagctgatgaggctgctgagcagcaatgaagatgatgccaacatcctgagcagccccacagaccgctccatgagcagcagcctgagcgccagccagctgcacacagtgaacatgagggaccccctgaacagagtgctggccaacctcttcctgctgatcagcagcatcctgggcagcaggacagctggcccccacacccagtttgtgcagtggttcatggaggagtgtgtggactgcctggagcagggcggccggggctctgtgctgcagttcatgcccttcaccaccgtgtctgagctggtgaaggtgtctgccatgagcagccccaaggtggtgctggccatcacagacctgagcctgcccctgggccggcaggtggccgccaaggccatcgccgccctgtag

SEQ ID NO: 182380 - DNA, 921 bp, Artificial Sequence
  derived and/or modified sequence
atgaagaagttcttccccaagggggccacctgggacatcctgaacctggctgatgccctgctggagcaggccatgattggccccagccccaaccccctcatcctgagctacctgaagtatgccatcagcagccagatggtgtcctacagctctgtgctgacagccatcagcaagtttgatgacttcagccgggacctgtgtgtgcaggccctgctggacatcatggacatgttctgtgaccggctgagctgccacggcaaggccgaggagtgcatcggcctgtgccgggccctgctgagcgccctgcactggctgctgcgctgcacagctgccagcgctgagcggctgcgggagggcctggaggccggcaccccagctgctggggagaagcagctggccatgtgcctgcagaggctggagaagaccctgagcagcaccaagaacagagccctgctgcacatcgccaagctggaggaggccagctcctggacagccatcgagcacagcctgctgaagctgggggagatcctggccaacctgagcaacccccagctgcggagccaggccgagcagtgtggcaccctcatccgcagcatccccaccatgctgtctgtgcatgctgagcagatgcacaagacaggcttccccaccgtgcacgccgtcatcctgctggagggcaccatgaacctgactggagagacccagagcctggtggagcagctgaccatggtgaagaggatgcagcacatccccacccccctgtttggccggggctctgtgctgcagttcatgcccttcaccaccgtgtctgagctggtgaaggtgtctgccatgagcagccccaaggtggtgctggccatcacagacctgagcctgcccctgggccggcaggtggccgccaaggccatcgccgccctgtag

SEQ ID NO: 182381 - DNA, 2961 bp, Artificial Sequence
  derived and/or modified sequence
gacaagtgccaaaatggcgatgcctaccacctagaactggattgtgcgatgcgttactagagcaggccatgattggaccatcccccaatcctctcatcttgtcctacctgaagtatgccattagttcccagatggtgtcctactcttctgtcctcacagccatcagtaagtttgatgacttttctcgggacctgtgtgtccaggcattgctggacatcatggacatgttttgtgaccgtctgagctgtcacggcaaagcagaggaatgcatcggactgtgccgagcccttcttagcgccctccactggctgctgcgctgcacggcagcctctgcagagcggctgcgggaggggctggaggccggcactccagccgctggggagaagcagcttgccatgtgccttcagcgcctggagaaaaccctcagcagcaccaagaaccgggccctgctgcacatcgccaaactagaggaggcctcttcttggactgccatcgagcattctctcttgaaacttggagagatcctggccaatctcagcaacccgcagctccggagtcaggccgagcagtgtggcaccctcattaggagcatccccacgatgctgtctgtgcatgcggagcagatgcacaagaccggcttccccactgtccacgccgtgatcctgctcgagggcaccatgaacctgacaggcgagacgcagtccctggtggagcagctgacgatggtgaagcgcatgcagcatatccccaccccactttttgtcctggagatctggaaagcttgcttcgtggggctcattgagtctcccgagggtacggaggagctcaagtggacagctttcactttcctcaagattccacaggttttggtgaagttgaagaagtactctcatggagacaaggacttcactgaggatgtcaactgtgcttttgagttcctgctgaagctcacccccttgttggacaaagctgaccagcgctgcaactgtgactgtacaaacttcctgctccaagaatgtggcaagcaggggcttctgtctgaggccagcgtcaacaaccttatggctaagcgcaaagcggaccgagagcacgcaccccagcagaaatcgggagagaatgccaacatccagcccaacatccagctgatcctccgggcggagcccactgtcacaaacatcctcaagacgatggatgcagaccactctaagtcaccggagggactgctgggagtcctgggccacatgctgtccgggaagagtctggacttgctgctggctgccgccgccgccactggaaagctgaaatccttcgcccggaaattcatcaatttgaatgaattcacaacctatggcagcgaagaaagcaccaaaccggcctccgtccgggccctgctgtttgacatctccttcctcatgctgtgccatgtggcccagacctatggttcagaggtgattctgtccgagtcgcgcacaggagctgaggtgcccttcttcgagacctggatgcagacctgcatgcctgaggagggcaagatcctgaaccctgaccacccctgcttccgccccgactccaccaaagtggagtccctggtggccctgctcaacaactcctcggagatgaagctagtgcagatgaagtggcatgaggcctgtctcagcatctcagccgccatcttggaaatcctcaatgcctgggagaatggggtcctggccttcgagtccatccagaaaatcactgataacatcaaagggaaggtatgcagtctggcggtgtgtgctgtggcttggcttgtggcccacgtccggatgctggggctggatgagcgtgagaagtcgctgcagatgatccgccagctggcagggccactgtttagtgagaacaccctgcagttctacaatgagagggtggtgatcatgaactcgatcctggagcgcatgtgtgccgacgtgctgcagcagacagccacgcagatcaagtttccctccaccggggtggacacaatgccctactggaacctgctgccccccaagcggcccatcaaagaggtgctgacggacatttttgccaaggtgctggagaagggctgggtggacagccgctccatccacatctttgacaccctgctgcacatgggcggcgtctactggttctgcaacaacctgattaaggagctgctgaaggagacgcggaaggagcacacgctgcgggcagtggagctgctctactccatcttctgcctggacatgcagcaagtgaccctggtcctgctgggccacatcctacctggcctgctcactgactcctccaagtggcacagcctcatggaccccccgggcactgctcttgccaagctggccgtgtggtgtgccctcagttcctactcctcccacaagggacaggcgtccacccgccagaagaagagacaccgcgaagacattgaggattatatcagccccaaggtggttctggccatcacggacctcagcctgcccctgggccgccaggtggctgctaaagccattgctgcactctgaggggcttggcatggccgcagtgggggctggggactggcgcagccccaggcgcctccaagggaagcagtgaggaaagatgaggcatcgtgcctcacatccgctccacatggtgcaagagcctctagcggcttccagttccccgctcctgactcctgacctccaggatgtctcccggtttcttctttcaaaatttcctctccatctgctggcacctgaggagagtgagcagcctggaccacaagcccagtggtcacccctgtgtgcgcccgccccagcccaggagtagtcttacctctgaggaactttctagatgcaaagtgtgtatgtgtgtgtgtgtgtgtgtgtgtgtgtgtttgtgtgtattttgtaatatgtgagggaaatctaccttcgttcatgtataaataaagctcctcgtggctccctt

SEQ ID NO: 182382 - DNA, 2970 bp, Artificial Sequence
  derived and/or modified sequence
atgaaggtggtgaacctgaagcaggccatcctgcaggcctggaaggagcgctggagcgactatcagtgggcgatcaacatgaagaagttttttcctaagggcgcgacgtgggacattctcaacctggctgatgctcttttggaacaggcaatgattggcccttccccaaaccccctgatcctgagttatctcaaatatgcaatttccagtcagatggtctcttattcttctgtacttacagctatcagcaaatttgacgacttttcacgagatctgtgtgtccaggcgttactagacattatggatatgttctgtgacaggttgtcatgtcacggaaaagctgaggagtgtatcggtttatgccgcgccctgttatccgcactgcactggctcttacggtgcaccgcggcctcggctgagcgccttagagaaggtctagaagccggtacaccggctgccggcgagaaacaacttgcaatgtgcctccagagactggagaagacactatcaagtacaaaaaatagagcgctgttgcatatcgcaaaactggaagaggccagtagctggacagccattgagcacagcctgttgaagctcggggagatcctggcaaacttatctaatcctcagctgaggtctcaggctgaacagtgcggtactttaatacggtccatccctacaatgctatccgttcatgcggaacaaatgcacaagaccggttttcctaccgttcacgctgtgatccttcttgagggcacaatgaaccttaccggggagactcaatccctggttgaacagctgacaatggtgaagcggatgcagcacatccccactccactgtttgtgctggagatctggaaggcctgcttcgtggggcttatcgagtcccccgaaggcactgaagagcttaaatggaccgcatttacattccttaaaatcccccaagtgctggttaaactgaagaaatacagccacggagacaaagacttcacagaagacgtaaattgcgcctttgaattcctgttaaagctgacgcctctgctggataaagcagaccaacgttgcaattgcgactgcacaaatttcctcctgcaggagtgcgggaagcagggactactcagtgaagcttctgttaataatctcatggccaagcgaaaggccgatcgtgagcatgccccccagcagaagtccggcgaaaacgccaacatccaaccaaatatccagcttattttgagagcagagcctacagtgaccaacatcctcaagactatggatgctgatcattcaaaatctcctgagggcctactcggcgtgctgggtcatatgctgtcagggaagtctctggatttactgctggccgcagccgccgctacaggcaaacttaaatcttttgctcgcaaattcataaacctcaatgaattcaccacttacggctctgaagaatcaaccaagcccgcctcggtcagggcgctcctgtttgacatcagcttcctgatgctatgccacgttgcacaaacttatgggtccgaggtcatcttgtcagaatccagaacgggggctgaggttccctttttcgagacttggatgcaaacttgtatgcccgaagaagggaagatcctcaatcctgatcatccttgttttagaccagacagtacgaaagttgagagtctcgtggctctgctgaacaactcgagcgaaatgaaacttgtgcagatgaaatggcacgaagcttgcctgtctatctccgccgcgattcttgagattcttaacgcatgggagaacggcgtcttggcctttgagagtatccagaaaataactgacaacataaagggaaaagtgtgctccctggcagtatgcgctgtcgcttggcttgttgctcacgtgaggatgctcgggctggacgagagagaaaaatccctgcagatgatccgccagctcgctggcccgctgttcagtgaaaacaccctccagttctacaacgaacgtgtcgtgataatgaactcaatccttgagcgtatgtgtgctgacgtgcttcaacaaactgctacacaaattaagttcccctcaaccggggttgataccatgccatactggaatttgctacctccaaaacgacccataaaagaggttctgaccgacatctttgctaaggttttggaaaagggctgggtcgattcaaggtctatccacatcttcgacacccttcttcatatggggggcgtctattggttctgcaacaacctgattaaggaattattaaaggaaactcgcaaggaacacacgctaagggctgtcgagctcttgtacagcatcttctgtctggatatgcagcaggtgaccctcgtgctcctggggcatattcttcccggacttttgacggatagctccaagtggcattcattgatggatcctcccggaactgccttggcgaagttagctgtgtggtgcgccctgagctcatactcttcacataaaggccaggctagtacccgacaaaaaaagcgtcaccgcgaagacatcgaagattatatctctctttttcctctggacgacgtgcaacccagcaagctcatgcgcctccttagtagcaacgaggatgacgctaacatcctttcgtcccctacagatcgttctatgtcttctagtctgagcgctagtcaactgcacaccgtgaatatgcgcgatccattaaatcgcgtcctcgccaatctctttcttctgattagtagcattctcgggtcaaggacagctggccctcatacacagtttgtgcagtggttcatggaagaatgtgtcgactgtctggaacagggaggaaggggctctgtgttgcagttcatgcctttcaccactgtgtctgagctcgtgaaggtatcagcaatgagctccccgaaggtggttcttgcaattaccgacttatcactgccactcggaaggcaggtcgctgcgaaggcaatcgcagcgctatag

SEQ ID NO: 182383 - DNA, 2970 bp, Artificial Sequence
  derived and/or modified sequence
atgaaggtggtgaacctgaagcaggccatcctgcaggcctggaaggaacgctggtcggactaccagtgggccatcaatatgaaaaagttttttccgaagggtgcaacttgggatatcctaaacctcgcagacgcgctcttggagcaggctatgatcggcccatcccccaaccctttaattctctcctatttgaaatacgccatctcaagtcaaatggtctcatattcatccgttctcaccgcaatctcaaaatttgacgacttctctcgtgacttgtgtgttcaagccctcctggacattatggacatgttctgcgatcgactttcctgtcacgggaaagccgaagaatgtatcggactgtgcagggccctgctctcggcactgcattggctgttaagatgtacggccgcatccgcagagcgcctgagggaaggattggaggcagggacccccgcggcgggagaaaaacagcttgcgatgtgtttacagcgcctagagaagaccctgtcaagcactaagaacagagcactgctgcacattgccaagctcgaagaagcttctagctggacagctatcgagcactccttgctcaaattgggcgagatactcgccaatctctccaacccccagttacggtcccaagcagagcagtgtggaaccctgatacggagtattccaacaatgctgagtgtccatgccgagcaaatgcacaaaacagggttcccgaccgtgcacgctgtgatcctgcttgagggtactatgaacttaacaggagagactcagagcttggtggagcaactcacgatggtgaagaggatgcaacacatccctacacctcttttcgtgctggaaatatggaaggcctgcttcgtaggcctgatagagtcacccgaggggactgaggaactcaagtggaccgcattcaccttcttgaaaatcccacaagtactagtgaagttaaaaaaatattcacacggggataaagactttacagaggatgtgaactgcgcttttgagtttttgctgaaattgacacctctgctcgacaaagccgaccagcgttgcaattgcgattgcaccaatttccttctgcaggaatgtgggaagcagggactcctatcagaagccagtgttaataacttgatggccaaacgcaaagccgatcgtgagcacgcaccccagcagaaatctggagagaacgccaatatacagccgaacatccagctcattctaagggcagaaccaacagtgactaacatcctgaaaaccatggacgcggaccactccaagagtcccgagggcctattgggcgttctgggtcacatgttgtctggcaagtccttggacctcctgctggctgccgctgcggctactggtaaacttaaatcattcgccagaaaatttattaacctgaatgagttcacaacctacggtagcgaggagtcaactaaacctgcaagcgttcgagctctgctttttgatatttcatttctgatgctgtgccacgtggcccagacctatggatcggaggtgattctgagcgaaagccggacaggcgccgaggtgccgttctttgaaacctggatgcagacatgtatgcccgaggagggaaagattctgaaccccgaccatccatgctttaggccagactcaaccaaggtggagagtctggttgccctgcttaataattccagcgaaatgaagttggtccagatgaagtggcacgaagcctgtctgagcatcagcgccgctatactagaaattctcaatgcttgggagaacggcgtactggcatttgagtctatccaaaaaattacagacaatatcaagggcaaggtgtgttcactggcagtctgcgccgtggcctggctagtcgctcatgtcagaatgctgggattagatgaacgagaaaagagtttgcagatgatccgccagttggcgggaccacttttcagcgagaacaccctgcagttttacaatgagcgcgtagtgatcatgaacagtattctcgaacggatgtgcgccgacgtgctgcagcaaacagccacacagatcaagttcccctcaaccggcgtcgacaccatgccatattggaacctacttccacccaaacggcccataaaagaggttttgactgatatcttcgccaaagtgctggagaaagggtgggtggactcccggagcattcacatcttcgacactctgctgcacatgggcggggtctattggttctgcaacaatctgatcaaagagctgctcaaggaaactagaaaagagcatacactcagagccgtggaactactgtatagcatcttctgcctggacatgcagcaagtcacactggtgctgcttggacatatcctgcccggactccttacggactcctccaagtggcattccctcatggaccctccaggaactgctctggcaaagctggcagtgtggtgtgctttgtcatcatattcgtcgcataaggggcaagcctctacccggcagaaaaagaggcatagggaggatatcgaggactacatttctctgtttccactggatgatgtccagccatcaaagttaatgcgcttgctatcgagcaatgaggatgacgccaatatactttcttcccccacggacagaagcatgagttcaagcctatccgctagccaattgcatacagtgaacatgcgagacccactcaacagagtgctggctaacctgtttctgctaatttcctcaattctggggtcgaggacagccgggcctcacacccagtttgttcagtggtttatggaggagtgtgtggactgtctcgagcagggcggcagagggtcagtgctgcagtttatgcccttcacgacggtgtctgagcttgtcaaggtgagcgccatgagttcacctaaagtggtgctggccattactgacctttctctgccacttggacgacaagtcgccgccaaagcaatcgctgccctgtag

SEQ ID NO: 182384 - DNA, 2970 bp, Artificial Sequence
  derived and/or modified sequence
atgaaggtggtgaacctgaagcaggccatcctgcaggcctggaaggaacgatggagtgactaccaatgggctattaacatgaagaaattctttcccaagggcgcgacctgggacattttgaatctggccgatgcccttctcgaacaggccatgataggaccttcgcctaacccgttgatactttcctacttgaagtacgctatctcatcacagatggtaagttattcttcggtgctgacagccatctctaagtttgatgatttctctcgagacctctgcgtgcaggctctgctcgacattatggatatgttttgcgatcgtctgagttgccatggtaaggccgaagagtgcattggtctttgccgcgccctcttgtctgccttgcactggttgcttagatgtacggcagcttccgctgagcggcttagagagggccttgaggctggaacgccagccgccggcgagaagcagctggctatgtgtctgcagcggctggaaaagaccttgagttccacgaagaatagagcccttctccacattgcaaaactggaggaagcgagtagctggactgcaatcgagcattccctgttaaagctcggcgaaattctcgcgaatctgtccaaccctcagcttagatcccaggccgagcaatgcggcaccttaatccgcagcatccccacgatgctgagcgtacatgccgaacaaatgcacaagacaggctttccaaccgtccatgctgttatcttgcttgagggcacaatgaacctgacaggcgagacccaaagcttggtggagcagctgactatggtgaaaaggatgcaacacattcctacccctctcttcgtgcttgagatctggaaagcatgcttcgtgggtcttattgagtcaccggaaggtacggaagaacttaagtggacagccttcacttttcttaagatcccacaggtgctggtgaagctgaaaaagtacagtcatggggataaagattttaccgaggacgtgaattgcgctttcgaattcttactaaagcttacgcctctcctggacaaggcggatcagaggtgcaattgtgattgtactaatttcctgctgcaggagtgcggaaagcaagggctccttagtgaggcgtccgtgaacaatttaatggcaaaaagaaaggcagatcgggagcatgctcctcagcaaaaatcaggagagaatgcaaatattcaacctaacatccagctgattcttcgcgccgagccaacagtgacaaatattctgaaaacgatggatgcagatcactcaaaaagcccggagggtcttctgggagtcttgggccacatgctgagcggaaagagtttggacctcctgttagccgctgccgctgccactggcaagctgaaaagcttcgcccggaaatttatcaacctaaacgaattcaccacatacggtagtgaggaaagtacaaaacccgcgagtgtacgcgccctgctgtttgacatctcttttttgatgctttgccacgtagctcagacatatggatcagaggtgatcctttccgagtcccggacgggcgccgaggtgccatttttcgagacttggatgcagacctgtatgccagaggaaggtaaaatattgaatcccgaccacccctgcttccggcctgattcgaccaaggtggagtcactggtggccctgcttaacaactcatctgaaatgaaactggtgcagatgaagtggcacgaggcttgtctctccataagtgcagctatcctggaaatcctcaatgcatgggagaacggcgttctggcatttgaaagcatacagaaaataaccgataatatcaagggcaaggtgtgtagtctggccgtttgcgcggtagcatggcttgtggctcacgtacgtatgctgggactggacgaaagggagaaaagtttacagatgattaggcagctggctggcccactttttagtgaaaacacactccagttttacaatgagcgtgtcgtcatcatgaactctattcttgaacggatgtgcgctgatgtgttgcaacagacggcaactcagataaagttcccgtccacaggcgtggacacgatgccgtactggaacctgcttcccccgaaacggcctattaaagaggtgttaaccgacatctttgccaaagtgctggagaaggggtgggttgactcccggagcatccacatctttgacacacttcttcatatggggggcgtgtattggttttgtaataacttgatcaaggaactactgaaggaaacgaggaaggagcatactctgagagccgttgagctgctgtatagcatcttttgtctggatatgcagcaagtaacgctggtactcctgggacacatactgcctggattattgactgatagctctaaatggcattctcttatggacccaccggggacagcactagcgaaactagccgtatggtgtgccctctcaagttactcttctcacaagggacaagcctctactagacagaagaaacgccacagggaggatattgaagactacatttcgctgtttcccttggacgatgtgcagcctagcaagcttatgaggctcctgtccagtaacgaggacgacgcgaatattctgagttcgcctacggatagaagtatgtcttcttcactcagcgcatcacagctccacaccgtaaatatgagagaccctctgaatcgcgtactcgccaacctgttcctgctcatttcatctatcctgggttccagaactgcagggccccatactcaatttgtgcaatggtttatggaggagtgcgtggattgcttggaacaaggcggacgcggctccgttctccagtttatgccttttactacggtgtcggagctcgtcaaggtctcggctatgtcttcacccaaggttgtgctagccataaccgacctgtcgctgccccttggcagacaggtagccgcaaaggcaattgccgccctatag

SEQ ID NO: 182385 - DNA, 2466 bp, Artificial Sequence
  derived and/or modified sequence
atgatcggccccagccccaaccccctgatcctgagctacctgaagtacgcaatctcctcccagatggtctcttatagttcagttcttacagcaatcagtaaatttgatgacttttccagagatctgtgcgtgcaggccctactggatatcatggatatgttctgcgatcgtctctcgtgccatggcaaagcggaggaatgtattgggctatgccgcgcattgctcagtgcccttcactggctgctgaggtgcactgccgcgagcgcagaaaggctgagggaggggctggaggcaggaacccctgctgcaggggagaagcagctggctatgtgcttgcaaagactggagaagacactttctagtacaaaaaaccgggcacttcttcatattgccaaactagaggaggcttccagctggactgccatcgagcactcactgcttaaactcggggaaatactggctaacctctctaacccccaactgcgctcccaagctgagcagtgtggaacattaatccggagtatccccaccatgctatctgttcacgcagaacagatgcataaaactggttttccgactgtccacgctgtcattctgttggaagggaccatgaatctgaccggagagacccaaagcttagtggaacagctgaccatggttaagcgaatgcagcatatcccaactcccctgttcgttttggagatctggaaagcttgcttcgtgggtcttatcgagtcacctgaggggaccgaagaattaaagtggactgcatttactttcctgaagatacctcaggtcctcgtcaaactgaaaaaatattcacacggtgataaggactttacagaggacgtgaattgcgcctttgagtttctgctgaagcttacacctctgctggataaagcagatcagaggtgtaactgtgattgtactaacttccttcttcaggagtgtggtaagcaaggtcttctctccgaggcttccgttaacaacctcatggccaagcgtaaggccgaccgagagcatgccccacaacaaaagtccggcgaaaatgctaacatccagcccaacattcagttaatcttgcgcgccgagcctaccgtgacaaacatcctcaagacgatggacgcagatcactctaaaagtcccgagggactgttgggagtgttagggcacatgctgagtggcaaatctctcgacctcctcctggcagccgctgccgcgacaggtaagcttaagagtttcgccaggaagttcatcaacttaaatgaatttactacctacggctccgaagagtcgactaagccagcctcagtccgagccctactgttcgacatcagtttcctgatgctgtgccatgtggcgcagacatatggaagcgaagtgattctcagcgagagcaggacgggggccgaggtacccttctttgagacctggatgcagacttgtatgcctgaagaggggaagatactaaatcccgaccatccctgtttccgtcccgactcaactaaggtagagtcattggtcgccctgttgaataattcttctgagatgaagctggtgcagatgaagtggcacgaggcctgcttatcaatctctgctgccatccttgaaattctgaatgcctgggaaaacggggtgctggccttcgagtctatccaaaaaattacagacaacatcaagggcaaggtgtgtagcctggccgtatgtgcggttgcgtggcttgtggcccacgtcaggatgctcggccttgacgagcgagagaagagcctgcagatgatcagacagctcgcaggacccttgttttccgaaaatacccttcaattctacaacgagagagtggtaattatgaatagtattctggaaagaatgtgtgccgatgtgctgcagcagactgcgactcaaatcaaattccccagcacgggagtcgatacgatgccctattggaatcttctgccacctaagaggccaatcaaggaagtgctcactgatattttcgcaaaggtgctggagaaaggatgggtggatagtcggtcgatccatatttttgacaccctccttcacatggggggcgtatactggttttgtaacaacctcatcaaggagttgctgaaggagacccggaaggaacatacccttcgggctgtagaactgctttacagcattttctgcctggacatgcaacaggtgactctggttttgctgggccatatactgccgggtctgctgacagattctagcaaatggcactcgctgatggacccccctggtacggctctggccaaactagccgtgtggtgcgccctttcatcttacagctcacataaggggcaggcttctacaagacagaaaaaaaggcacagagaggacatcgaggactatattagtccaaaagtcgtgctcgctataactgacctatccctgcctctgggaaggcaggtggccgccaaagctatcgctgctttgtag

SEQ ID NO: 182386 - DNA, 1026 bp, Artificial Sequence
  derived and/or modified sequence
atgaagaagttcttccccaagggcgccacctgggacatcctgaacctggccgatgctctgctggagcaggccatgatcggccctagtcccaaccccctgatccttagttacttgaagtacgcaatcagttcgcagatggtgagctactcatctgtgttgacagccatcagcaagttcgacgacttttctagagacttatgtgtccaggccctcttagatatcatggatatgttttgcgatcgactgagctgccacggtaaggctgaggagtgtataggattgtgccgagctcttctaagtgcactgcactggcttctacggtgtacggcggcctctgcagagaggctgcgggagggactagaagccggtacccctgccgcaggagagaagcaacttgcaatgtgcctacagagactcgaaaagactctcagctccaccaaaaatagggccctgttacacatcgctaaactcgaggaggcttcttcttggacagctattgagcattccctgctgaaattgggggaaatcctagctaatctcagcaatccacagctgaggagccaggccgagcaatgcgggacacttatccgatctatccctacgatgttaagcgtccatgccgagcagatgcacaagactggcttcccgacagtccatgcagtcatccttctcgagggtacaatgaacctcactggtgaaacccaatccctggttgagcaacagactgcgacacagatcaagttccctagcaccggcgtcgatacaatgccttattggaaccttctgccacccaaacggcccattaaagaggttctgaccgacattttcgcgaaagtcttagaaaaaggctgggtcgattctcggagtattcatattttcgacaccctgctgcatatgggcggtgtttattggttttgcaacaatctgatcaaagagctgctcaaagagacccggaaggaacacaccctgagggctgtcgaactcctttattccattttctgtttagacatgcaacaggttacatag

SEQ ID NO: 182387 - DNA, 2796 bp, Artificial Sequence
  derived and/or modified sequence
atgaaggtggtgaacctgaagcaggccatcctgcaggcctggaaggagcgctggtcagattatcagtgggcaataaacatgaagaagttcttccctaaaggcgctacatgggatatcctcaacctagctgacgccttgctagagcaggcaatgataggtccctcacccaacccactgatcctatcttatttgaagtacgccatcagctcgcagatggtatcctacagctctgtgctcactgcaataatgtgtttgcaacggttagaaaagaccttatctagtaccaagaacagagcactgttgcacatagccaagttagaggaggcttccctgcacacgtctcaggggctcggacagggtggcacgcgggcaaatcaaccgaccgcctcctggactgccatagaacacagccttctgaagcttggtgagattctagcaaatctgagtaacccacaactgcgctcccaggcagagcagtgcgggaccctgatccggtcaattccaaccatgctaagcgttcatgccgaacagatgcacaaaaccggcttcccaactgtccatgccgtgatactcttggaaggcactatgaatctcacaggcgagacccagtctctggtggagcagcttaccatggttaaacgcatgcaacacatacctactcctctgtttgttcttgaaatatggaaagcatgctttgtgggcctcatcgaatcgcccgaggggaccgaggagctgaagtggacagcttttactttcctcaagatcccgcaggtgctcgtcaagttgaagaagtactcgcacggggacaaagactttacagaggacgtcaactgcgccttcgaattcctgctgaagctgacaccattactggacaaggcggaccagaggtgtaattgcgattgcaccaatttcctgcttcaggaatgcggcaaacagggattgctgagtgaggctagcgtgaataacctgatggcgaagcggaaagcggacagggaacatgcaccacagcagaaatcaggggagaatgccaacattcaaccgaatattcagttaattcttagggctgagcccacagtaaccaatatcctgaagaccatggacgctgatcactctaaaagtccagagggtctcctgggcgtcctgggacatatgctctccggtaagtcattggaccttctgcttgcagctgcggcagcaacaggcaaacttaagtctttcgcccgcaagtttatcaacctgaatgaattcaccacatatggctctgaagaatctactaaaccagctagcgtgagggcactcctcttcgatatcagcttcctgatgctctgccatgttgcccagacctacgggtcggaagtgattctttcagaaagccgcacaggtgccgaggtccccttcttcgagacctggatgcagacctgcatgcccgaagagggaaaaatcctgaaccccgatcatccctgcttccggcccgacagtacgaaagtcgagtctctggtagcacttcttaataattcctcagagatgaaactggtccagatgaaatggcacgaagcttgtttgtccataagcgcggccatactggagatactcaatgcctgggagaatggtgttctggcatttgagtctattcaaaaaattacagataacattaaaggaaaagtctgttcactggcagtctgcgcagtcgcatggctcgtggcccatgtccgtatgctgggactggacgagcgcgaaaagagccttcaaatgattagacagctggcagggcccctattttctgagaatacactgcagttttataatgagcgggtggtcatcatgaactccatcctggagcgcatgtgcgccgacgtgttgcagcaaacagcaactcagattaaatttcccagcactggagtagataccatgccttattggaacttactgcctccaaagaggcctatcaaagaagtgctcactgacatttttgctaaagtgctggagaaaggctgggtcgattcccggagcatacatatttttgacaccctcctacacatgggtggagtctattggttctgcaataatctcattaaagagctcctgaaggagacaaggaaagagcatactctgcgagcagtcgagctgctgtacagcatattttgccttgacatgcaacaggtgaccctggtgctcctgggccacatcctgcctggattattaactgacagtagcaagtggcatagtcttatggacccacccgggaccgcactggctaagctggctgtctggtgcgctctgtcttcgtattcatcccacaagggccaggcgtccactcgtcaaaagaagcggcacagagaggacatagaggactacatctcccttttccccctcgatgatgtccaaccaagtaagctgatgaggctgctgtcctccaacgaagacgatgctaatattctgagtagccccactgacagaagtatgtcaagttcactgtccgcatctcagctgcacactgttaatatgagggatccattgaacagggtcctggctaatttgttcctgcttatttcatcaatactcggatctaggaccgccggccctcacactcagttcgtacagtggtttatggaggaatgcgtggactgtctggaacaaggggggaggggatccgtgcttcagttcatgccattcactactgtgtctgaactggtgaaggtctcggccatgagcagtcccaaagttgtgctggcgattacagacctgagtttaccactggggaggcaggtagctgctaaggcgattgccgcactctag

SEQ ID NO: 182388 - DNA, 921 bp, Artificial Sequence
  derived and/or modified sequence
atgaagaagttcttccccaagggcgccacctgggacatcctgaacctggccgacgcactgctcgagcaggctatgataggaccaagtccaaaccccctgatcctcagttatctgaagtatgcaatttcaagccagatggttagctacagctccgtcctgactgcgattagcaagtttgacgatttcagccgagacctgtgtgtgcaagcactgctcgacatcatggacatgttctgtgataggttgtcctgccatgggaaagctgaggaatgtataggcctttgtcgggcgctgctcagcgccctccattggcttctccgctgtactgctgcatccgccgagaggctgagggaaggattggaagcagggacccccgctgcaggcgaaaagcagctcgcaatgtgtctgcaacgcctcgagaaaacattgtcatctactaagaacagggccctcctgcacattgccaagctggaagaagcaagctcatggactgctatcgaacactccttacttaaattaggcgaaattctcgcaaacctgtccaatccacaactccgctcccaggccgagcagtgcggtaccctgatacgctctataccaactatgcttagcgttcacgcggagcagatgcacaagacggggtttcccaccgtgcacgccgttatcttgctggaaggcacaatgaacttgaccggcgagacccagtccctggtcgaacaactgacaatggtgaaacgtatgcagcacatcccgacccctctgttcggaagaggatctgtcctgcaattcatgcctttcacaacggtgagcgagctcgtcaaggtgtccgcgatgtcctcccccaaagtagtgttggcaattacggatcttagtcttccactaggaagacaagtggccgctaaggctattgccgccctgtag

SEQ ID NO: 182389 - DNA, 2970 bp, Artificial Sequence
  derived and/or modified sequence
atgaaggtggtcaacctcaaacaggcaatcctccaggcttggaaggagaggtggtcagactatcaatgggctattaatatgaagaaattcttcccaaagggggctacatgggatatcctcaacttagccgacgctctgctggaacaagccatgattggaccctcacctaacccgctcatcttgtcttacctcaagtacgcaatctcgagccagatggtgagctactccagcgtactaacagccatcagcaaattcgatgacttctccagagacctctgcgtgcaggctctgttggacatcatggacatgttctgcgacaggctgtcatgccatggaaaagccgaagagtgcatcggtttgtgtcgcgctctgctgagtgctctccactggttgctgcggtgcacagcagcaagcgctgagcgactgagagagggcctggaggccggtacacccgctgccggagagaaacagcttgccatgtgtctgcagcgcctggaaaagacgctcagttcaacaaaaaatagagccctcctgcatatagccaaacttgaggaagcttcttcttggaccgcgatcgaacattcattgttaaagctcggggagatcctggctaacctttcgaatccccagctccggagccaggcagaacagtgtggtaccttgatccgatctatcccaacgatgctttccgtccacgcggaacaaatgcataagactggtttcccgaccgttcacgctgtgattctgctggaaggaacaatgaatctgaccggtgagacccagtccctggtcgaacaactgacaatggtgaagagaatgcagcacatcccaaccccactcttcgtcttggagatctggaaagcctgtttcgtaggtctgatcgagtctccagaagggacagaagagctcaaatggacagcgttcacttttctgaagatccctcaagttctggtgaagctgaagaaatacagccacggggacaaagattttacggaggatgtgaattgcgctttcgagtttcttctcaaattaacaccactcctggataaggccgaccaaaggtgcaattgcgattgtactaactttttactccaggagtgcggtaaacaggggctgctctccgaggcctcagtgaataaccttatggccaagcgcaaggccgacagagaacatgcaccccagcaaaagtctggagaaaacgcaaatatccaaccaaacatccagttaatcctgcgagccgaaccaacagtgactaacatcctgaagaccatggatgccgatcatagcaaatctcctgagggactgctcggcgtgctgggccacatgctgagtgggaagtctctagacctgctccttgccgcagctgctgctactggcaaactgaagagttttgccagaaagttcataaatctaaacgagttcaccacatacggctccgaagaatctaccaagccagcctctgtccgtgcactgctgttcgatatctcattcctgatgctttgtcacgtggcccaaacatatgggagcgaggtcatcctgtctgagtccaggaccggagctgaggtgcctttctttgaaacctggatgcagacctgcatgcccgaggaaggcaaaatcttaaacccagaccacccctgtttcaggccggactccaccaaagtggagtccttagtggccttgctaaataacagctccgagatgaaactcgtgcagatgaagtggcatgaggcatgcctatctatttcagccgctatcctggagatcctcaacgcttgggaaaatggagtgctggcttttgagtctatccagaagatcactgataacattaaaggcaaagtctgctccctagcggtctgcgcagtggcatggctggtggcccatgtccggatgctgggactagatgaacgggaaaaatctctgcagatgattagacagttggctggaccattattttctgagaacacactgcagttctacaatgaaagggtggttataatgaatagcatactcgaacggatgtgtgccgacgtactgcagcagacagctacacaaatcaaatttccctcaactggcgtcgacacaatgccgtactggaacctgctgccacctaagagaccgataaaagaagtccttactgatatctttgccaaagtccttgaaaagggatgggttgactcacggagtatccacatctttgatacgctcttgcatatgggtggggtttactggttttgcaataatctcatcaaggagcttcttaaagagactcgtaaggaacacacattgcgggctgtggagctgttatatagtatcttctgtttggatatgcagcaggtaactctcgtgctattgggtcacattctccccggactacttaccgactctagtaaatggcatagtctcatggatccgccaggcacggcacttgcaaagcttgccgtgtggtgcgccttgtcaagttactcgtcgcacaagggccaagcctccacaagacagaaaaagaggcaccgtgaggatattgaggattatatctctctgttccccctggatgacgtgcaaccgagcaagctgatgcggttactcagcagtaatgaggatgatgctaatattctgtctagccctacagaccgcagcatgagtagttcactgtctgcatcccagcttcacacagtgaatatgcgggatcccttaaatagagttctcgccaatctctttctgcttattagctcaattctgggcagtcgcaccgctggaccacatacccagtttgtgcaatggtttatggaagagtgtgtcgactgcctggagcagggagggaggggtagtgtgctgcaattcatgccattcactacagtttctgagctggtgaaagtctccgccatgagctctcctaaggtagtcctcgccattactgacctgagtctgcccctgggacgacaagtggcggctaaggctatcgctgctctctag

SEQ ID NO: 182390 - DNA, 2970 bp, Artificial Sequence
  derived and/or modified sequence
atgaaagtggtgaacctcaaacaggcgatactacaggcatggaaagagagatggagtgattatcagtgggccataaatatgaagaagttctttcccaaaggcgctacctgggacatcttgaatctggccgacgcccttctcgagcaggccatgatcggacctagcccgaatcctctgatcctctcgtacttaaaatacgcaatttcaagtcagatggtcagttactcaagcgtccttactgccataagcaagttcgacgatttctctagggatctttgtgtgcaggcactgcttgacattatggacatgttttgtgatcggctgtcatgtcacggaaaggcggaagagtgcatcgggctgtgccgcgcactactgtcagctctgcattggctgctgcgctgtaccgcggcttccgccgaacggctgcgtgagggcctcgaggcagggacccccgctgccggtgagaaacagcttgcaatgtgtctacagcgcctcgagaagacattgagctctactaagaaccgcgctttgttgcacatcgctaagctagaggaggcctctagttggactgcgatcgaacactctctcctaaagctgggcgagattctggccaaccttagcaaccctcagttgcggtcacaggccgagcaatgtggcaccctgattcgctcaatcccgactatgttgtcagtgcatgctgaacaaatgcacaaaacgggcttcccaaccgtgcatgctgtgattctgttggaaggcaccatgaatctcaccggtgagacccagagtctggttgagcagctcactatggtgaaacgcatgcagcacatccctacccccctcttcgtccttgagatctggaaggcctgttttgttggccttatcgagagccccgagggcactgaggagctcaaatggaccgccttcactttcctgaagattccacaggtcctggttaagctgaagaaatactcgcacggcgacaaggattttacagaagatgtcaattgcgcgttcgagtttttgcttaaacttactcctttattggataaggcagaccagcggtgcaattgcgactgtaccaacttcctgttgcaagagtgtggcaaacagggtctccttagtgaggctagtgtgaacaacctgatggccaagcgcaaagccgatcgggagcatgcgcctcaacagaagtctggggaaaacgcaaatatccaacccaacatccaactgatactccgggcagaacccactgtgaccaatattttgaagacaatggacgctgaccactctaaatctcctgagggacttctcggagtcctgggccatatgctctcaggcaaatccctggacctgttactggccgctgcagcggctacgggcaaactaaagagctttgccagaaagttcataaatctcaatgaattcaccacgtatggttcagaagagagtactaaaccagcatcagttagggccctgctgtttgatatatcttttctaatgttgtgccatgtggcacaaacctatggaagcgaggtgatcctgtcagaaagccggaccggtgccgaggtgcctttttttgagacatggatgcaaacttgtatgcccgaggaaggaaagatcttgaaccctgatcacccatgtttccgaccagacagtacaaaggttgagagcctcgtcgccttactgaacaattccagcgagatgaagttggtccaaatgaagtggcacgaggcttgtctttccatatccgccgcaatcctggaaattctcaacgcatgggagaacggcgtgctagcttttgagtccatccagaaaataaccgataatattaagggtaaagtttgtagtttggcagtgtgcgctgttgcatggcttgtggcccatgtgcggatgctgggcttggacgaaagagaaaagtcactgcagatgatccgtcagctagctggtcctttattttccgaaaacaccctgcagttttataacgagcgagtcgtcataatgaactcaattttggaacgcatgtgtgcagatgtgctccaacagaccgcaacacagattaaatttccatcaaccggcgtagatactatgccatactggaatctcctgcctccaaaaagacccataaaggaggtcttgacagatatctttgccaaggtgctggagaaggggtgggttgatagtcggagtatccacatattcgatacgctcttacatatgggcggagtatactggttctgtaacaatctgataaaagagctattgaaggaaacaagaaaggaacatacactcagagctgttgagctactttacagcatattctgtctagacatgcagcaggtgactcttgtgctactgggtcacattctcccagggttgctgaccgatagctctaagtggcattccttgatggaccccccaggaactgccctcgcgaagcttgctgtttggtgcgcactgtcctcttattctagccataaggggcaggcttcaacacggcagaagaaacggcatcgggaagacattgaagactatatttcactcttcccgctggatgatgtgcagccctctaagctcatgagacttctctctagcaatgaagatgacgccaacattctctcctccccaacagatagatcgatgtcatcttccctgagcgcatcacagcttcatactgtgaacatgagagatccacttaacagagtgttggcaaatctgttcttactcatttccagcatcctgggcagtagaactgccggtccccacacccagttcgtccagtggttcatggaggaatgtgtggattgcctggagcaagggggtagaggctcagtattgcagttcatgcccttcacgacagtatctgaacttgtgaaggtcagcgcaatgagttcgcccaaggtggtgctggcgatcaccgatctgtctctgcccttgggcagacaggtggcagctaaagccatcgcggcactttag

SEQ ID NO: 182391 - DNA, 2970 bp, Artificial Sequence
  derived and/or modified sequence
atgaaggttgttaatctcaagcaggctatcttgcaggcctggaaagaaagatggagtgattaccagtgggccatcaatatgaagaaattcttcccaaagggggctacatgggatatcttaaatcttgccgatgcgctcttggaacaggcaatgatcggaccgtccccgaatcctctgatcctcagctacctgaagtatgccatttcctcgcagatggtctcttatagctctgtgctgacagctatctcaaaattcgatgacttctcaagagatctttgcgtgcaggctctactcgatatcatggacatgttctgtgaccggctgagctgccacggcaaggctgaagagtgtattgggttgtgtagagcattgctatccgcgcttcactggctgttacgatgtaccgccgcatctgccgaacgccttagggaaggcctcgaagccggaacaccagctgctggggaaaaacagctggccatgtgtttgcagcggctggagaagacattatcttcgacaaagaaccgagctctcttgcatatcgcaaaactcgaagaggctagctcctggactgccatagagcatagcttacttaaactcggcgagattctcgcgaacctgtcgaatccacagctgcggagtcaggcagaacagtgcggaaccctaataagatctataccaactatgttgagcgtgcacgctgaacagatgcacaaaacaggtttcccaaccgttcacgcagtgattctgttggaaggcacgatgaatttaaccggagagacccagtcactggtggagcagctcacgatggtcaagcggatgcaacacatacccaccccgttgtttgtattggaaatctggaaggcctgttttgtaggattgattgaaagtcctgagggaacagaggagttaaagtggactgcattcaccttcttgaagatcccacaggtactcgtcaaacttaagaagtactcacacggggataaggacttcacggaggatgtgaactgcgcattcgaattcttgttaaagctgacacctctgctcgataaagccgatcagcggtgtaattgcgattgtacaaatttcctccttcaggagtgcgggaagcaaggactgctttcagaggcctcagtaaacaacctgatggccaaacgaaaagcagaccgcgaacacgcacctcagcagaaaagcggcgagaatgccaacatccagccgaacattcagctgatcctacgtgcggaacctacagtgacaaatattttaaagaccatggacgctgatcatagcaaatcccccgagggactgctgggcgtactcggccatatgttgagcggcaagtctctcgatctgctcttggctgctgcagctgcgacagggaagcttaaaagcttcgccagaaaattcataaacctgaacgagtttaccacctacggctccgaagaaagtaccaagcctgcctctgttcgtgccctactgtttgacataagcttcttaatgttgtgtcacgtcgctcagacttacgggagcgaagtcatcctttcggagagtaggaccggagccgaggtgcccttctttgagacttggatgcaaacctgcatgcccgaggaaggcaaaatactgaaccctgatcacccttgcttccgcccagattccacaaaggtggagtctttggttgcccttttaaataactcaagcgagatgaaacttgtgcaaatgaagtggcacgaagcatgtttatcaatctccgctgcaatcttggagattctgaatgcctgggagaacggagttctggccttcgagtcaatccagaagatcaccgacaacatcaagggtaaggtgtgctctctagccgtctgcgccgtagcgtggctggttgctcacgtgcgtatgctgggcctcgatgaaagagaaaagtccctccagatgattcggcagctggccggacctcttttttcagagaatacgctccaattttacaacgagagggtggtgataatgaatagtattctggagaggatgtgcgccgatgtgctgcagcagaccgcgacccaaatcaagttccctagcaccggcgtggacacaatgccatactggaaccttctgccacctaaacgacccattaaggaagtgttgacagatatcttcgccaaggtgctcgagaaaggatgggtggattcacggtccattcatattttcgatacacttcttcatatgggcggagtgtattggttttgcaacaacctgattaaggaactgctcaaggagactaggaaagaacacacgctgagagccgtggagttactctatagcatattctgtctcgatatgcagcaagtgactctcgtgctgctaggacacatcttgccgggactgctcactgattcttccaagtggcactcactaatggacccgccaggtaccgccctggctaaactcgctgtctggtgtgctttaagcagttacagctctcataaaggccaagcctccactaggcaaaagaaaaggcaccgagaggatattgaagactacatttctttatttcccttagacgacgtccagccttcaaaattgatgagactcttgtccagcaatgaggatgacgccaacattctctctagccccaccgacagatccatgtctagctcgctgtccgcatcccaactgcacactgtcaacatgcgggatcctctcaacagggtgcttgcaaacttatttttgctgatcagctctattcttggttcgaggacagctggaccccatactcagttcgtgcaatggtttatggaggagtgcgtggactgcctggaacagggaggtagaggaagcgtgctccagtttatgccattcacaacagtcagtgagctggtgaaggtctccgcgatgagttcacccaaggtagtcctcgccattaccgacctgagcttaccgctcggccgtcaagtggctgccaaggcaattgctgcactgtag

SEQ ID NO: 182392 - DNA, 2466 bp, Artificial Sequence
  derived and/or modified sequence
atgattggaccctccccaaacccgctgattttaagctacttaaagtatgcaatcagttcccaaatggtcagctactcttctgtgctaacagccattagcaagttcgacgactttagtcgcgacttgtgtgtgcaggccctgttggatattatggatatgttctgcgaccgcctctcttgtcacggcaaggcggaggaatgcattggactctgcagagccctcctgagtgccttacactggctgctccggtgcactgctgcatctgcggagcggctcagagagggtttggaagccggaactccggctgccggagaaaagcagctcgccatgtgtttacagcgcctggagaagacactaagctccacaaagaatagagctttactccacatcgccaagcttgaggaggcatctagctggacggctatagagcacagtctcctgaaactcggtgagattctcgccaacctgtcaaacccccagctaaggtcccaagctgagcagtgcgggactctcattcgatcgatacctaccatgctgtccgtgcacgcggagcagatgcacaaaactgggtttcccacagtgcacgccgtgatcctcctcgagggaactatgaatttaaccggagagactcagagtctggtagagcagctgactatggtaaagaggatgcagcatattcccaccccactcttcgtcttggagatttggaaggcttgttttgtgggactgattgaatctcccgagggaaccgaggaactcaaatggacagctttcacgtttctgaaaatcccccaggtcttggttaaactgaagaaatattcacacggagacaaggactttacagaagatgttaattgtgcctttgagtttcttttaaagttgacacccctattggataaggctgatcaaagatgcaactgtgattgtaccaattttctacttcaggagtgcggtaagcagggcctactgtctgaagcgagcgtgaacaatctcatggccaagcggaaagctgacagagagcatgcgcctcagcagaagtcgggcgagaatgccaacatccagcccaatatccaacttatcctgcgtgccgaaccgactgtgactaacatcctgaagactatggatgctgatcatagcaaatcccccgaggggctgctgggcgtgctggggcatatgctatcaggtaagtcgcttgaccttctgctcgccgcagctgccgcaaccggaaaactgaaatctttcgcccgaaaattcatcaacctcaacgagttcactacctacggatccgaagagtcgactaagcctgcaagcgtgcgcgcactactctttgatatctcattcctcatgctgtgccacgtcgcccagacgtatgggtctgaagtgattctttcagagagccgcactggggcagaggtgcccttttttgaaacatggatgcagacctgtatgccagaagagggaaaaatcctgaatcccgaccatccatgctttcgtcctgatagtacgaaggttgagtcactcgtcgccctgctgaacaattcatccgagatgaagctcgtccaaatgaaatggcacgaggcctgtctaagcatctcagcagcaattctggaaatactgaacgcctgggaaaacggggtccttgcttttgaatccattcagaagattaccgataatatcaaaggcaaagtttgcagcctcgctgtttgtgctgtggcatggctggtggcccacgtgcggatgcttggcctcgatgaacgcgagaaaagtctgcagatgatccggcaacttgccggacctttatttagtgaaaatactctccagttttataacgaaagggtcgttattatgaacagcattttggaacgtatgtgcgccgacgtgctgcagcagaccgcaacacagatcaaattcccttccaccggagtggatactatgccttattggaacctgctacccccaaaaagaccaatcaaggaggtacttacagatattttcgcaaaggtgctggagaagggctgggtcgacagccggtctatccatatcttcgatactcttttgcatatggggggtgtctactggttttgcaataacctgataaaagagttgctgaaggagacccgtaaagaacacacactgcgagcagtagaactgctctattctatcttttgccttgatatgcaacaagtaaccctcgtgttgctgggccacatcctgccgggattgctcacggattcatctaagtggcattcactgatggatccccctggaaccgcgttagctaagcttgcagtctggtgtgctctgagttcgtattcaagccataaggggcaggccagtacacgtcaaaagaagcggcacagagaagacatcgaggattatatttcaccaaaggtagtgctggccattacagacttaagtctgcctctgggccgtcaagtcgctgccaaggccattgcagctctgtag

SEQ ID NO: 182393 - DNA, 1026 bp, Artificial Sequence
  derived and/or modified sequence
atgaagaagttcttccctaagggcgcaacctgggatatcctgaatcttgccgacgccctgcttgagcaggcgatgataggtccctctcccaatcccctcatattgtcttacttaaagtacgccatcagttcccaaatggtgtcctacagctctgttctgacagccatcagcaaattcgacgatttcagcagggacctgtgtgtgcaggcactactcgatatcatggatatgttctgtgaccgcctgagctgtcatggcaaggcagaggagtgcattggtctgtgtcgtgcactgctgagcgctctccactggctgttgagatgtacagccgcaagtgccgagagattgcgagaaggcttagaggcaggcacgccagcagctggggaaaaacaacttgccatgtgcctccagcgactggaaaaaacactgtcatccactaaaaacagagcgctcctccacatcgctaaattagaggaggcatcctcatggaccgcaatcgaacatagtcttctcaaactcggagagattctggccaacttatccaacccacagcttcgtagccaggctgagcagtgcggtactctcatacgcagcatccccactatgctttcagtacacgctgagcagatgcacaagacaggttttcccacggtccatgctgtaatcttgctggaaggtaccatgaacctcaccggggagactcaaagcctcgttgagcagcagaccgctactcagataaaatttcctagcactggagtggacaccatgccttattggaatttacttcctcccaagaggccaatcaaggaggttctcacagacatattcgcaaaggtgctggaaaagggatgggtcgactctcgcagcattcatattttcgacaccctactgcacatgggtggagtgtactggttttgtaacaatctcattaaggagcttctgaaggagaccaggaaggagcacactcttcgagccgttgagcttctgtattcgatcttctgtcttgatatgcagcaggtcacctag

SEQ ID NO: 182394 - DNA, 2796 bp, Artificial Sequence
  derived and/or modified sequence
atgaaggtcgtgaaccttaaacaggcaatcctccaggcttggaaagagcggtggtcagattaccagtgggccattaacatgaagaaattctttccgaaaggggctacatgggatatcctgaacttagctgacgccttgttagagcaagctatgatcggccctagtcccaatccattgatcttaagctacctgaagtacgcaatcagtagccagatggtatcctactcttcagtcctcacggcaattatgtgtttgcagagactcgagaagaccctgtcatcgacgaagaacagggccttgctccacatcgccaagctggaggaagcaagcctgcatacgagccagggacttggacagggcggaacccgcgcaaatcaacctaccgcatcttggaccgcaatcgagcactccctcctgaagctgggagagatccttgccaatttgagcaacccacaactgaggtcccaggcggaacagtgtggtacgcttatacggtccatcccaacaatgctgagtgtgcatgcagaacagatgcataaaacaggtttccccaccgtgcatgccgttatcctcttggaagggacgatgaatttgactggggagacccagtcattagtagaacagctgacaatggtcaaaagaatgcagcatatcccaactcctctcttcgtgctggagatatggaaggcatgctttgtcgggttgatcgagagccccgaaggcactgaggagctgaaatggactgcctttaccttccttaagataccccaggtgctggtgaaattgaaaaaatacagccacggcgacaaagactttaccgaagacgtgaattgtgcgtttgagttcctgttgaagctcacaccactactggacaaggccgaccaaagatgcaactgtgactgcaccaactttctcttgcaggaatgcggtaagcagggattactgtcagaggccagtgtgaataatctaatggcaaaacgtaaggccgatcgcgagcatgccccacagcaaaagtcgggcgaaaacgccaacattcagcctaatatccagctgatactgagagccgaaccaaccgtaacaaatatcttgaagacaatggacgctgaccatagtaagagtcctgagggcctgttaggagtcctgggtcacatgctgtctggcaaaagtctagacctgctcctggccgcagccgctgccacaggcaagcttaaatccttcgctagaaaatttataaacctcaacgaattcactacttacggttctgaggaaagtacaaaacctgcttccgtacgagcactcttattcgatatatctttcctgatgctctgtcatgtggcacagacctatgggagcgaggtgattctgtcagaaagccgaacaggcgctgaggtaccattttttgagacatggatgcagacgtgcatgcctgaggagggtaaaatcctcaatcctgaccatccttgtttcagacccgacagtacgaaggtcgagagcctggtggcacttttaaataattcctccgagatgaaacttgttcagatgaagtggcacgaggcgtgcctgagtattagtgccgcaattctcgaaatcctgaacgcctgggaaaacggagtgctcgccttcgaaagtattcagaagatcactgacaatatcaaaggaaaagtttgttcattggcggtgtgcgctgtcgcgtggctcgtggcacacgtgcgcatgctgggcctggatgaacgcgagaagtctctccagatgatacgccagctcgcagggcctctattttcagagaacactttgcagttctataatgagcgcgtcgtgatcatgaatagcatcctcgagcggatgtgcgccgatgttcttcaacagaccgctacgcagattaaattcccttctaccggcgtggataccatgccttactggaacttactgcctcctaagcgaccaataaaagaggtactgactgacattttcgcgaaggttttagagaagggctgggtcgacagccgctctattcatatttttgatacactgctacatatggggggagtctactggttctgtaataacctaatcaaggagctccttaaagaaaccagaaaagaacataccttacgagctgtcgaattgttatactcgattttctgtctggatatgcagcaagtcaccctggtactgctgggccatattctccctgggttgctcaccgactcctctaagtggcacagtctgatggaccccccaggaacagctctggcaaaacttgctgtttggtgtgccctttcttcctatagcagtcataaaggccaggcgtcaacgagacagaagaaaagacaccgggaagacattgaagactacatttccttattccctttggacgacgtccagccgtctaagctgatgcgcctcctgagctcaaacgaagacgatgcaaatattcttagctcaccaactgatcggtccatgagctcttctctgagcgcctctcagctccacacggtgaacatgagggacccactgaaccgggtactggctaatctgtttctgctaatctcatctatcctagggagtcgaaccgccggaccccatacacagttcgttcagtggttcatggaggagtgtgtggattgcctcgaacagggagggcgaggtagcgtgctgcagttcatgccattcaccaccgtgtctgaactggtaaaggtctccgccatgtcttctccaaaagtagtgctcgccatcactgacttgagtctgccactcggcagacaagtggcagcaaaagcaatcgcagccctatag

SEQ ID NO: 182395 - DNA, 921 bp, Artificial Sequence
  derived and/or modified sequence
atgaagaaatttttccctaaaggggctacgtgggatattttaaacctggccgatgctctcctcgagcaggccatgatcggcccttcaccaaaccctcttattctcagttacctgaagtacgccatatcttcacagatggtgtcctatagctcagtgttgactgccatttccaagttcgacgatttcagccgagatttatgcgtccaggccctgctcgacataatggatatgttttgtgatcgattgtcctgccacggcaaggctgaagagtgcatagggctctgtcgagctttactgtcggccctgcattggctgctgaggtgtactgctgcctccgcagaaagactccgggagggactcgaggctggcacccccgcagcgggagaaaaacagctggctatgtgcctgcagaggctggagaagactttgagcagtactaagaatagggctctgctccatatcgcaaagttggaagaagcgtcaagctggacagcgattgaacacagcctgttgaaattaggtgagatcttagctaacctgagtaatcctcaattgagatcccaggcggagcagtgtgggacgttaataaggtccattccgacaatgctctccgttcatgcggaacaaatgcacaaaactggctttcccaccgtgcatgctgtcatattgttggagggcacgatgaatttaaccggagaaacccagtccttagttgagcagctgactatggtgaaaaggatgcaacacattccaacaccactgtttggacggggaagcgtgctgcagttcatgcccttcaccacagtatcagaattggtcaaagtcagcgccatgagctctcctaaggtcgtcctggccatcactgatctctccctcccactgggcagacaggttgcagccaaggctatagccgcactatag

SEQ ID NO: 182396 - DNA, 2970 bp, Artificial Sequence
  derived and/or modified sequence
atgaaggtggtgaacctgaagcaggccatcctgcaggcctggaaggagagatggagcgactaccagtgggccatcaacatgaagaagttcttccccaagggcgccacctgggacatcctgaacctggccgacgccctgctggagcaggccatgatcggccccagccccaaccccctgatcctgagctacctgaagtacgccatcagcagccagatggtgagctacagcagcgtgctgaccgccatcagcaagttcgacgacttcagcagagacctgtgcgtgcaggccctgctggacatcatggacatgttctgcgacagactgagctgccacggcaaggccgaggagtgcatcggcctgtgcagagccctgctgagcgccctgcactggctgctgagatgcaccgccgccagcgccgagagactgagagagggcctggaggccggcacccccgccgccggcgagaagcagctggccatgtgcctgcagagactggagaagaccctgagcagcaccaagaacagagccctgctgcacatcgccaagctggaggaggccagcagctggaccgccatcgagcacagcctgctgaagctgggcgagatcctggccaacctgagcaacccccagctgagaagccaggccgagcagtgcggcaccctgatcagaagcatccccaccatgctgagcgtgcacgccgagcagatgcacaagaccggcttccccaccgtgcacgccgtgatcctgctggagggcaccatgaacctgaccggcgagacccagagcctggtggagcagctgaccatggtgaagagaatgcagcacatccccacccccctgttcgtgctggagatctggaaggcctgcttcgtgggcctgatcgagagccccgagggcaccgaggagctgaagtggaccgccttcaccttcctgaagatcccccaggtgctggtgaagctgaagaagtacagccacggcgacaaggacttcaccgaggacgtgaactgcgccttcgagttcctgctgaagctgacccccctgctggacaaggccgaccagagatgcaactgcgactgcaccaacttcctgctgcaggagtgcggcaagcagggcctgctgagcgaggccagcgtgaacaacctgatggccaagagaaaggccgacagagagcacgccccccagcagaagagcggcgagaacgccaacatccagcccaacatccagctgatcctgagagccgagcccaccgtgaccaacatcctgaagaccatggacgccgaccacagcaagagccccgagggcctgctgggcgtgctgggccacatgctgagcggcaagagcctggacctgctgctggccgccgccgccgccaccggcaagctgaagagcttcgccagaaagttcatcaacctgaacgagttcaccacctacggcagcgaggagagcaccaagcccgccagcgtgagagccctgctgttcgacatcagcttcctgatgctgtgccacgtggcccagacctacggcagcgaggtgatcctgagcgagagcagaaccggcgccgaggtgcccttcttcgagacctggatgcagacctgcatgcccgaggagggcaagatcctgaaccccgaccacccctgcttcagacccgacagcaccaaggtggagagcctggtggccctgctgaacaacagcagcgagatgaagctggtgcagatgaagtggcacgaggcctgcctgagcatcagcgccgccatcctggagatcctgaacgcctgggagaacggcgtgctggccttcgagagcatccagaagatcaccgacaacatcaagggcaaggtgtgcagcctggccgtgtgcgccgtggcctggctggtggcccacgtgagaatgctgggcctggacgagagagagaagagcctgcagatgatcagacagctggccggccccctgttcagcgagaacaccctgcagttctacaacgagagagtggtgatcatgaacagcatcctggagagaatgtgcgccgacgtgctgcagcagaccgccacccagatcaagttccccagcaccggcgtggacaccatgccctactggaacctgctgccccccaagagacccatcaaggaggtgctgaccgacatcttcgccaaggtgctggagaagggctgggtggacagcagaagcatccacatcttcgacaccctgctgcacatgggcggcgtgtactggttctgcaacaacctgatcaaggagctgctgaaggagaccagaaaggagcacaccctgagagccgtggagctgctgtacagcatcttctgcctggacatgcagcaggtgaccctggtgctgctgggccacatcctgcccggcctgctgaccgacagcagcaagtggcacagcctgatggacccccccggcaccgccctggccaagctggccgtgtggtgcgccctgagcagctacagcagccacaagggccaggccagcaccagacagaagaagagacacagagaggacatcgaggactacatcagcctgttccccctggacgacgtgcagcccagcaagctgatgagactgctgagcagcaacgaggacgacgccaacatcctgagcagccccaccgacagaagcatgagcagcagcctgagcgccagccagctgcacaccgtgaacatgagagaccccctgaacagagtgctggccaacctgttcctgctgatcagcagcatcctgggcagcagaaccgccggcccccacacccagttcgtgcagtggttcatggaggagtgcgtggactgcctggagcagggcggcagaggcagcgtgctgcagttcatgcccttcaccaccgtgagcgagctggtgaaggtgagcgccatgagcagccccaaggtggtgctggccatcaccgacctgagcctgcccctgggcagacaggtggccgccaaggccatcgccgccctgtag

SEQ ID NO: 182397 - DNA, 2466 bp, Artificial Sequence
  derived and/or modified sequence
atgatcggccccagccccaaccccctgatcctgagctacctgaagtacgccatcagcagccagatggtgagctacagcagcgtgctgaccgccatcagcaagttcgacgacttcagcagagacctgtgcgtgcaggccctgctggacatcatggacatgttctgcgacagactgagctgccacggcaaggccgaggagtgcatcggcctgtgcagagccctgctgagcgccctgcactggctgctgagatgcaccgccgccagcgccgagagactgagagagggcctggaggccggcacccccgccgccggcgagaagcagctggccatgtgcctgcagagactggagaagaccctgagcagcaccaagaacagagccctgctgcacatcgccaagctggaggaggccagcagctggaccgccatcgagcacagcctgctgaagctgggcgagatcctggccaacctgagcaacccccagctgagaagccaggccgagcagtgcggcaccctgatcagaagcatccccaccatgctgagcgtgcacgccgagcagatgcacaagaccggcttccccaccgtgcacgccgtgatcctgctggagggcaccatgaacctgaccggcgagacccagagcctggtggagcagctgaccatggtgaagagaatgcagcacatccccacccccctgttcgtgctggagatctggaaggcctgcttcgtgggcctgatcgagagccccgagggcaccgaggagctgaagtggaccgccttcaccttcctgaagatcccccaggtgctggtgaagctgaagaagtacagccacggcgacaaggacttcaccgaggacgtgaactgcgccttcgagttcctgctgaagctgacccccctgctggacaaggccgaccagagatgcaactgcgactgcaccaacttcctgctgcaggagtgcggcaagcagggcctgctgagcgaggccagcgtgaacaacctgatggccaagagaaaggccgacagagagcacgccccccagcagaagagcggcgagaacgccaacatccagcccaacatccagctgatcctgagagccgagcccaccgtgaccaacatcctgaagaccatggacgccgaccacagcaagagccccgagggcctgctgggcgtgctgggccacatgctgagcggcaagagcctggacctgctgctggccgccgccgccgccaccggcaagctgaagagcttcgccagaaagttcatcaacctgaacgagttcaccacctacggcagcgaggagagcaccaagcccgccagcgtgagagccctgctgttcgacatcagcttcctgatgctgtgccacgtggcccagacctacggcagcgaggtgatcctgagcgagagcagaaccggcgccgaggtgcccttcttcgagacctggatgcagacctgcatgcccgaggagggcaagatcctgaaccccgaccacccctgcttcagacccgacagcaccaaggtggagagcctggtggccctgctgaacaacagcagcgagatgaagctggtgcagatgaagtggcacgaggcctgcctgagcatcagcgccgccatcctggagatcctgaacgcctgggagaacggcgtgctggccttcgagagcatccagaagatcaccgacaacatcaagggcaaggtgtgcagcctggccgtgtgcgccgtggcctggctggtggcccacgtgagaatgctgggcctggacgagagagagaagagcctgcagatgatcagacagctggccggccccctgttcagcgagaacaccctgcagttctacaacgagagagtggtgatcatgaacagcatcctggagagaatgtgcgccgacgtgctgcagcagaccgccacccagatcaagttccccagcaccggcgtggacaccatgccctactggaacctgctgccccccaagagacccatcaaggaggtgctgaccgacatcttcgccaaggtgctggagaagggctgggtggacagcagaagcatccacatcttcgacaccctgctgcacatgggcggcgtgtactggttctgcaacaacctgatcaaggagctgctgaaggagaccagaaaggagcacaccctgagagccgtggagctgctgtacagcatcttctgcctggacatgcagcaggtgaccctggtgctgctgggccacatcctgcccggcctgctgaccgacagcagcaagtggcacagcctgatggacccccccggcaccgccctggccaagctggccgtgtggtgcgccctgagcagctacagcagccacaagggccaggccagcaccagacagaagaagagacacagagaggacatcgaggactacatcagccccaaggtggtgctggccatcaccgacctgagcctgcccctgggcagacaggtggccgccaaggccatcgccgccctgtag

SEQ ID NO: 182398 - DNA, 1026 bp, Artificial Sequence
  derived and/or modified sequence
atgaagaagttcttccccaagggcgccacctgggacatcctgaacctggccgacgccctgctggagcaggccatgatcggccccagccccaaccccctgatcctgagctacctgaagtacgccatcagcagccagatggtgagctacagcagcgtgctgaccgccatcagcaagttcgacgacttcagcagagacctgtgcgtgcaggccctgctggacatcatggacatgttctgcgacagactgagctgccacggcaaggccgaggagtgcatcggcctgtgcagagccctgctgagcgccctgcactggctgctgagatgcaccgccgccagcgccgagagactgagagagggcctggaggccggcacccccgccgccggcgagaagcagctggccatgtgcctgcagagactggagaagaccctgagcagcaccaagaacagagccctgctgcacatcgccaagctggaggaggccagcagctggaccgccatcgagcacagcctgctgaagctgggcgagatcctggccaacctgagcaacccccagctgagaagccaggccgagcagtgcggcaccctgatcagaagcatccccaccatgctgagcgtgcacgccgagcagatgcacaagaccggcttccccaccgtgcacgccgtgatcctgctggagggcaccatgaacctgaccggcgagacccagagcctggtggagcagcagaccgccacccagatcaagttccccagcaccggcgtggacaccatgccctactggaacctgctgccccccaagagacccatcaaggaggtgctgaccgacatcttcgccaaggtgctggagaagggctgggtggacagcagaagcatccacatcttcgacaccctgctgcacatgggcggcgtgtactggttctgcaacaacctgatcaaggagctgctgaaggagaccagaaaggagcacaccctgagagccgtggagctgctgtacagcatcttctgcctggacatgcagcaggtgacctag

SEQ ID NO: 182399 - DNA, 2796 bp, Artificial Sequence
  derived and/or modified sequence
atgaaggtggtgaacctgaagcaggccatcctgcaggcctggaaggagagatggagcgactaccagtgggccatcaacatgaagaagttcttccccaagggcgccacctgggacatcctgaacctggccgacgccctgctggagcaggccatgatcggccccagccccaaccccctgatcctgagctacctgaagtacgccatcagcagccagatggtgagctacagcagcgtgctgaccgccatcatgtgcctgcagagactggagaagaccctgagcagcaccaagaacagagccctgctgcacatcgccaagctggaggaggccagcctgcacaccagccagggcctgggccagggcggcaccagagccaaccagcccaccgccagctggaccgccatcgagcacagcctgctgaagctgggcgagatcctggccaacctgagcaacccccagctgagaagccaggccgagcagtgcggcaccctgatcagaagcatccccaccatgctgagcgtgcacgccgagcagatgcacaagaccggcttccccaccgtgcacgccgtgatcctgctggagggcaccatgaacctgaccggcgagacccagagcctggtggagcagctgaccatggtgaagagaatgcagcacatccccacccccctgttcgtgctggagatctggaaggcctgcttcgtgggcctgatcgagagccccgagggcaccgaggagctgaagtggaccgccttcaccttcctgaagatcccccaggtgctggtgaagctgaagaagtacagccacggcgacaaggacttcaccgaggacgtgaactgcgccttcgagttcctgctgaagctgacccccctgctggacaaggccgaccagagatgcaactgcgactgcaccaacttcctgctgcaggagtgcggcaagcagggcctgctgagcgaggccagcgtgaacaacctgatggccaagagaaaggccgacagagagcacgccccccagcagaagagcggcgagaacgccaacatccagcccaacatccagctgatcctgagagccgagcccaccgtgaccaacatcctgaagaccatggacgccgaccacagcaagagccccgagggcctgctgggcgtgctgggccacatgctgagcggcaagagcctggacctgctgctggccgccgccgccgccaccggcaagctgaagagcttcgccagaaagttcatcaacctgaacgagttcaccacctacggcagcgaggagagcaccaagcccgccagcgtgagagccctgctgttcgacatcagcttcctgatgctgtgccacgtggcccagacctacggcagcgaggtgatcctgagcgagagcagaaccggcgccgaggtgcccttcttcgagacctggatgcagacctgcatgcccgaggagggcaagatcctgaaccccgaccacccctgcttcagacccgacagcaccaaggtggagagcctggtggccctgctgaacaacagcagcgagatgaagctggtgcagatgaagtggcacgaggcctgcctgagcatcagcgccgccatcctggagatcctgaacgcctgggagaacggcgtgctggccttcgagagcatccagaagatcaccgacaacatcaagggcaaggtgtgcagcctggccgtgtgcgccgtggcctggctggtggcccacgtgagaatgctgggcctggacgagagagagaagagcctgcagatgatcagacagctggccggccccctgttcagcgagaacaccctgcagttctacaacgagagagtggtgatcatgaacagcatcctggagagaatgtgcgccgacgtgctgcagcagaccgccacccagatcaagttccccagcaccggcgtggacaccatgccctactggaacctgctgccccccaagagacccatcaaggaggtgctgaccgacatcttcgccaaggtgctggagaagggctgggtggacagcagaagcatccacatcttcgacaccctgctgcacatgggcggcgtgtactggttctgcaacaacctgatcaaggagctgctgaaggagaccagaaaggagcacaccctgagagccgtggagctgctgtacagcatcttctgcctggacatgcagcaggtgaccctggtgctgctgggccacatcctgcccggcctgctgaccgacagcagcaagtggcacagcctgatggacccccccggcaccgccctggccaagctggccgtgtggtgcgccctgagcagctacagcagccacaagggccaggccagcaccagacagaagaagagacacagagaggacatcgaggactacatcagcctgttccccctggacgacgtgcagcccagcaagctgatgagactgctgagcagcaacgaggacgacgccaacatcctgagcagccccaccgacagaagcatgagcagcagcctgagcgccagccagctgcacaccgtgaacatgagagaccccctgaacagagtgctggccaacctgttcctgctgatcagcagcatcctgggcagcagaaccgccggcccccacacccagttcgtgcagtggttcatggaggagtgcgtggactgcctggagcagggcggcagaggcagcgtgctgcagttcatgcccttcaccaccgtgagcgagctggtgaaggtgagcgccatgagcagccccaaggtggtgctggccatcaccgacctgagcctgcccctgggcagacaggtggccgccaaggccatcgccgccctgtag

SEQ ID NO: 182400 - DNA, 921 bp, Artificial Sequence
  derived and/or modified sequence
atgaagaagttcttccccaagggcgccacctgggacatcctgaacctggccgacgccctgctggagcaggccatgatcggccccagccccaaccccctgatcctgagctacctgaagtacgccatcagcagccagatggtgagctacagcagcgtgctgaccgccatcagcaagttcgacgacttcagcagagacctgtgcgtgcaggccctgctggacatcatggacatgttctgcgacagactgagctgccacggcaaggccgaggagtgcatcggcctgtgcagagccctgctgagcgccctgcactggctgctgagatgcaccgccgccagcgccgagagactgagagagggcctggaggccggcacccccgccgccggcgagaagcagctggccatgtgcctgcagagactggagaagaccctgagcagcaccaagaacagagccctgctgcacatcgccaagctggaggaggccagcagctggaccgccatcgagcacagcctgctgaagctgggcgagatcctggccaacctgagcaacccccagctgagaagccaggccgagcagtgcggcaccctgatcagaagcatccccaccatgctgagcgtgcacgccgagcagatgcacaagaccggcttccccaccgtgcacgccgtgatcctgctggagggcaccatgaacctgaccggcgagacccagagcctggtggagcagctgaccatggtgaagagaatgcagcacatccccacccccctgttcggcagaggcagcgtgctgcagttcatgcccttcaccaccgtgagcgagctggtgaaggtgagcgccatgagcagccccaaggtggtgctggccatcaccgacctgagcctgcccctgggcagacaggtggccgccaaggccatcgccgccctgtag

SEQ ID NO: 182401 - protein, 1216 aa, Artificial Sequence
  derived and/or modified sequence
MARNCSECKEKRAAHILCTYCNRWLCSSCTEEHRHSPVPGGPFFPRAQKGSPGVNGGPGDFTLYCPLHTQEVLKLFCETCDMLTCHSCLVVEHKEHRCRHVEEVLQNQRMLLEGVTTQVAHKKSSLQTSAKQIEDRIFEVKHQHRKVENQIKMAKMVLMNELNKQANGLIEELEGITNERKRKLEQQLQSIMVLNRQFEHVQNFINWAVCSKTSVPFLFSKELIVFQMQRLLETSCNTDPGSPWSIRFTWEPNFWTKQLASLGCITTEGGQMSRADAPAYGGLQGSSPFYQSHQSPVAQQEALSHPSHKFQSPAVCSSSVCCSHCSPVSPSLKGQVPPPSIHPAHSFRQPPEMVPQQLGSLQCSALLPREKELACSPHPPKLLQPWLETQPPVEQESTSQRLGQQLTSQPVCIVPPQDVQQGAHAQPTLQTPSIQVQFGHHQKLKLSHFQQQPQQQLPPPPPPLPHPPPPLPPPPQQPHPPLPPSQHLASSQHESPPGPACSQNMDIMHHKFELEEMQKDLELLLQAQQPSLQLSQTKSPQHLQQTIVGQINYIVRQPAPVQSQSQEETLQATDEPPASQGSKPALPLDKNTAAALPQASGEETPLSVPPVDSTIQHSSPNVVRKHSTSLSIMGFSNTLEMELSSTRLERPLEPQIQSVSNLTAGAPQAVPSLLSAPPKMVSSLTSVQNQAMPSLTTSHLQTVPSLVHSTFQSMPNLISDSPQAMASLASDHPQAGPSLMSGHTQAVPSLATCPLQSIPPVSDMQPETGSSSSSGRTSGSLCPRDGADPSLENALCKVKLEEPINLSVKKPPLAPVVSTSTALQQYQNPKECENFEQGALELDAKENQSIRAFNSEHKIPYVRLERLKICAASSGEMPVFKLKPQKNDQDGSFLLIIECGTESSSMSIKVSQDRLSEATQAPGLEGRKVTVTSLAGQRPPEVEGTSPEEHRLIPRTPGAKKGPPAPIENEDFCAVCLNGGELLCCDRCPKVFHLSCHVPALLSFPGGEWVCTLCRSLTQPEMEYDCENACYNQPGMRASPGLSMYDQKKCEKLVLSLCCNNLSLPFHEPVSPLARHYYQIIKRPMDLSIIRRKLQKKDPAHYTTPEEVVSDVRLMFWNCAKFNYPDSEVAEAGRCLEVFFEGWLKEIYPEKRFAQPRQEDSDSEEVSSESGCSTPQGFPWPPYMQEGIQPKRRRRHMENERAKRMSFRLANSISQV

SEQ ID NO: 182402 - DNA, 3651 bp, Artificial Sequence
  derived and/or modified sequence
atggccagaaactgcagcgagtgcaaggagaagagagccgcccacatcctgtgcacctactgcaacagatggctgtgcagcagctgcaccgaggagcacagacacagccccgtgcccggcggccccttcttccccagagcccagaagggcagccccggcgtgaacggcggccccggcgacttcaccctgtactgccccctgcacacccaggaggtgctgaagctgttctgcgagacctgcgacatgctgacctgccacagctgcctggtggtggagcacaaggagcacagatgcagacacgtggaggaggtgctgcagaaccagagaatgctgctggagggcgtgaccacccaggtggcccacaagaagagcagcctgcagaccagcgccaagcagatcgaggacagaatcttcgaggtgaagcaccagcacagaaaggtggagaaccagatcaagatggccaagatggtgctgatgaacgagctgaacaagcaggccaacggcctgatcgaggagctggagggcatcaccaacgagagaaagagaaagctggagcagcagctgcagagcatcatggtgctgaacagacagttcgagcacgtgcagaacttcatcaactgggccgtgtgcagcaagaccagcgtgcccttcctgttcagcaaggagctgatcgtgttccagatgcagagactgctggagaccagctgcaacaccgaccccggcagcccctggagcatcagattcacctgggagcccaacttctggaccaagcagctggccagcctgggctgcatcaccaccgagggcggccagatgagcagagccgacgcccccgcctacggcggcctgcagggcagcagccccttctaccagagccaccagagccccgtggcccagcaggaggccctgagccaccccagccacaagttccagagccccgccgtgtgcagcagcagcgtgtgctgcagccactgcagccccgtgagccccagcctgaagggccaggtgcccccccccagcatccaccccgcccacagcttcagacagccccccgagatggtgccccagcagctgggcagcctgcagtgcagcgccctgctgcccagagagaaggagctggcctgcagcccccacccccccaagctgctgcagccctggctggagacccagccccccgtggagcaggagagcaccagccagagactgggccagcagctgaccagccagcccgtgtgcatcgtgcccccccaggacgtgcagcagggcgcccacgcccagcccaccctgcagacccccagcatccaggtgcagttcggccaccaccagaagctgaagctgagccacttccagcagcagccccagcagcagctgccccccccccccccccccctgccccacccccccccccccctgcccccccccccccagcagccccacccccccctgccccccagccagcacctggccagcagccagcacgagagcccccccggccccgcctgcagccagaacatggacatcatgcaccacaagttcgagctggaggagatgcagaaggacctggagctgctgctgcaggcccagcagcccagcctgcagctgagccagaccaagagcccccagcacctgcagcagaccatcgtgggccagatcaactacatcgtgagacagcccgcccccgtgcagagccagagccaggaggagaccctgcaggccaccgacgagccccccgccagccagggcagcaagcccgccctgcccctggacaagaacaccgccgccgccctgccccaggccagcggcgaggagacccccctgagcgtgccccccgtggacagcaccatccagcacagcagccccaacgtggtgagaaagcacagcaccagcctgagcatcatgggcttcagcaacaccctggagatggagctgagcagcaccagactggagagacccctggagccccagatccagagcgtgagcaacctgaccgccggcgccccccaggccgtgcccagcctgctgagcgccccccccaagatggtgagcagcctgaccagcgtgcagaaccaggccatgcccagcctgaccaccagccacctgcagaccgtgcccagcctggtgcacagcaccttccagagcatgcccaacctgatcagcgacagcccccaggccatggccagcctggccagcgaccacccccaggccggccccagcctgatgagcggccacacccaggccgtgcccagcctggccacctgccccctgcagagcatcccccccgtgagcgacatgcagcccgagaccggcagcagcagcagcagcggcagaaccagcggcagcctgtgccccagagacggcgccgaccccagcctggagaacgccctgtgcaaggtgaagctggaggagcccatcaacctgagcgtgaagaagccccccctggcccccgtggtgagcaccagcaccgccctgcagcagtaccagaaccccaaggagtgcgagaacttcgagcagggcgccctggagctggacgccaaggagaaccagagcatcagagccttcaacagcgagcacaagatcccctacgtgagactggagagactgaagatctgcgccgccagcagcggcgagatgcccgtgttcaagctgaagccccagaagaacgaccaggacggcagcttcctgctgatcatcgagtgcggcaccgagagcagcagcatgagcatcaaggtgagccaggacagactgagcgaggccacccaggcccccggcctggagggcagaaaggtgaccgtgaccagcctggccggccagagaccccccgaggtggagggcaccagccccgaggagcacagactgatccccagaacccccggcgccaagaagggcccccccgcccccatcgagaacgaggacttctgcgccgtgtgcctgaacggcggcgagctgctgtgctgcgacagatgccccaaggtgttccacctgagctgccacgtgcccgccctgctgagcttccccggcggcgagtgggtgtgcaccctgtgcagaagcctgacccagcccgagatggagtacgactgcgagaacgcctgctacaaccagcccggcatgagagccagccccggcctgagcatgtacgaccagaagaagtgcgagaagctggtgctgagcctgtgctgcaacaacctgagcctgcccttccacgagcccgtgagccccctggccagacactactaccagatcatcaagagacccatggacctgagcatcatcagaagaaagctgcagaagaaggaccccgcccactacaccacccccgaggaggtggtgagcgacgtgagactgatgttctggaactgcgccaagttcaactaccccgacagcgaggtggccgaggccggcagatgcctggaggtgttcttcgagggctggctgaaggagatctaccccgagaagagattcgcccagcccagacaggaggacagcgacagcgaggaggtgagcagcgagagcggctgcagcaccccccagggcttcccctggcccccctacatgcaggagggcatccagcccaagagaagaagaagacacatggagaacgagagagccaagagaatgagcttcagactggccaacagcatcagccaggtgtag

SEQ ID NO: 182403 - DNA, 3651 bp, Artificial Sequence
  derived and/or modified sequence
atggcccgcaattgctccgaatgcaaggaaaaacgggccgcccatatcctgtgtacctactgcaatagatggctttgtagcagttgcacagaagagcaccggcattctcccgtacccggaggcccgttctttccacgagcacaaaagggctccccaggggtaaatggcgggccaggcgacttcacgctatattgtcctttgcacacccaggaggtgctgaaactgttctgcgagacatgcgacatgctcacgtgtcatagctgcttggttgttgaacacaaagagcatcgatgtcgacatgtggaggaggtgttgcaaaatcagcgaatgctgctagaaggcgtcacaacccaggtagcgcataagaaaagctcgctgcagacatcagccaagcaaattgaggatcggatattcgaggtgaaacaccagcatagaaaggtagagaaccagatcaagatggcgaagatggtacttatgaacgaactcaataaacaagccaacggcctcatcgaagagctggaaggcataacaaatgagaggaaacgtaaattggagcagcagctgcagagcattatggtcctcaatagacagtttgagcacgtccagaatttcattaattgggccgtatgctctaagacctcagtgccatttctgttcagcaaagaactgatcgtgttccagatgcagcggctgcttgagacctcctgtaatactgaccccgggtctccctggtcaattaggtttacttgggagcccaacttctggactaaacaattggccagcctcgggtgcatcacaaccgagggtgggcagatgagccgagccgacgctcccgcgtatgggggcttgcagggaagcagcccgttttaccagtctcaccagagtcctgtcgcccagcaggaggccttgagtcacccatcgcacaaattccagagccctgctgtttgcagctcttcagtgtgttgttctcactgcagccctgttagcccatcccttaaaggccaagtcccgcccccatctatccacccagcacattcctttcgacagcccccagaaatggtgccccaacagcttgggagtctacaatgtagcgcactactccctcgggagaaagaactggcttgcagccctcacccgcctaagctcctgcagccgtggctcgaaacccagccacccgtcgagcaggagtcaacatcccaaaggctggggcagcaattaacctcacaacccgtgtgcattgtgccaccacaagatgtccagcagggcgctcatgcacaaccaactctccagaccccaagcatccaggtccagttcggtcaccatcaaaagctgaaactttctcattttcagcaacagccgcagcagcagctccccccgccgcctccacccttgccccaccccccaccgcccctacctcctccaccccagcagccccacccacccctcccgccgtcacagcacctcgcgtcttcacagcacgagtctccaccgggccccgcctgtagccagaatatggatatcatgcaccataagttcgagctagaggagatgcagaaggatctagagctcctcctacaagcacagcaaccctctttacagctttcccagaccaaaagtccccagcatctgcagcagacgatcgtgggccaaatcaattacatcgttcgccagcccgcacctgtgcagagtcagagccaggaagagactctccaagcaactgacgagcctccagctagtcaggggagcaagcccgctttacccctggacaaaaataccgccgccgcgttgcctcaagcctcaggcgaggagacccctctgtcggtgccccctgtagactctactatccagcattcttcccccaacgtggtgagaaagcactcaaccagcctttctatcatgggatttagcaacacgcttgagatggaactgtcctctacaaggttggaaaggcctttagagccgcagatccagagtgtgagcaatcttacagccggagcaccacaggccgtgcctagtctgttgtcagctcctcccaaaatggtgagtagcctaaccagtgtacagaaccaggctatgccaagcttgactacttcccacttacagaccgtgcctagtctggtgcacagtacgttccagtcaatgccgaacctaatctccgatagcccgcaggccatggcctcacttgcgtcggaccatcctcaggccgggccatctctgatgtctggtcacacacaggcagtgccttccttggccacctgtccactacagtctattcctcccgtgtcggatatgcagccagaaactggatcatcatcctcatctggacgcacctcgggctctttgtgtccccgagacggcgctgatccaagtctggagaatgctctgtgcaaagtcaagctggaagaaccaatcaatctcagcgtgaagaaacctcccctagctcctgtggtgtctaccagcactgctctgcagcaataccagaacccaaaggaatgcgagaactttgaacagggagccctggagctggatgccaaagaaaatcagagtatcagggcatttaacagcgagcacaagatcccttacgtaaggctggaacggctcaaaatatgcgccgcctcctctggcgagatgcccgtctttaagctcaaaccacaaaagaatgatcaggacggtagctttttgctaataatcgagtgcggaacggagagctcctcgatgagcattaaagtctctcaggaccgactgagcgaggcgacacaagcacccggtctcgagggacgtaaggtgaccgtaaccagcctggcaggccagaggcccccagaagtggaggggacctctcctgaggagcaccggttgatcccaagaacacctggagctaaaaaagggccaccagcgccaattgagaacgaggatttttgcgcagtgtgtctgaacggaggagaactcttatgctgcgatagatgtcccaaagttttccatctgtcctgtcacgtgcccgccttgctgagcttcccaggcggcgaatgggtttgcactctctgccgcagcctgacccaaccggaaatggaatacgactgcgagaacgcttgttataatcaacccggcatgagggcttcacccggactgagtatgtacgatcagaagaagtgcgaaaaacttgtgctgtctctgtgctgtaataatctctctttaccattccacgaacctgtctcccctctcgcccgccactactatcagattatcaagaggcccatggacctgtctataattagacggaaacttcagaagaaagatccagcacattacaccacaccggaagaggtggtctcagatgtcagactaatgttctggaactgcgcgaagtttaactaccccgattcagaagtggctgaggcaggccggtgcctggaggttttttttgagggctggctcaaggagatttatcctgagaaacgatttgcccagccaaggcaggaagattctgactctgaagaagtttcatcagagagcgggtgcagcaccccacagggattcccgtggccgccctatatgcaggaaggtattcaaccaaaaaggaggagaagacacatggaaaacgagcgcgccaagcgcatgtcttttaggcttgcaaactctatttcgcaagtgtag

SEQ ID NO: 182404 - DNA, 3651 bp, Artificial Sequence
  derived and/or modified sequence
atggccaggaactgcagcgagtgcaaggagaagagagctgcccacatcctgtgcacctactgcaaccgctggctgtgcagcagctgcacagaggagcaccgccacagccctgtgcctgggggccccttcttcccccgggcccagaagggcagccctggggtgaatggaggccctggggacttcaccctgtactgccccctgcacacccaggaggtgctgaagctgttctgtgagacctgtgacatgctgacctgccacagctgcctggtggtggagcacaaggagcaccgctgccgccacgtggaggaggtgctgcagaaccagaggatgctgctggagggcgtgaccacccaggtggcccacaagaagagcagcctgcagaccagcgccaagcagatcgaggaccgcatctttgaggtgaagcaccagcacaggaaggtggagaaccagatcaagatggccaagatggtgctgatgaatgagctgaacaagcaggccaacggcctcatcgaggagctggagggcatcaccaatgaaaggaagaggaagctggagcagcagctgcagagcatcatggtgctgaaccggcagtttgagcacgtgcagaacttcatcaactgggccgtgtgcagcaagacctctgtgcccttcctgttcagcaaggagctgattgtgttccagatgcagaggctgctggagaccagctgcaacacagaccccggcagcccctggagcatccgcttcacctgggagcccaacttctggaccaagcagctggccagcctgggctgcatcaccacagaaggaggccagatgagcagagcagatgccccagcctacggcggcctgcagggcagcagccccttctaccagagccaccagagccctgtggcccagcaggaggccctgagccaccccagccacaagttccagagccctgctgtgtgcagcagctctgtgtgctgcagccactgcagccctgtgagccccagcctgaagggccaggtgcccccacccagcatccacccagcccacagcttccggcagcccccagagatggtgccccagcagctgggcagcctgcagtgcagcgccctgctgccccgggagaaggagctggcctgcagcccccacccccccaagctgctgcagccctggctggagacccagccccctgtggagcaggagagcaccagccagaggctgggccagcagctgaccagccagcctgtgtgcatcgtgcccccccaggatgtgcagcagggcgcccacgcccagcccaccctgcagacccccagcatccaggtgcagtttggccaccaccagaagctgaagctgagccacttccagcagcagccccagcagcagctgcccccacctcctccacccctgccccaccccccaccacccctgcccccaccaccccagcagccccacccccccctgccccccagccagcacctggccagcagccagcacgagagccccccaggccctgcctgcagccagaacatggacatcatgcaccacaagtttgagctggaggagatgcagaaggacctggagctgctgctgcaggcccagcagcccagcctgcagctgagccagaccaagagcccccagcacctgcagcagaccatcgtgggccagatcaactacatcgtgcggcagcctgcccctgtgcagagccagagccaggaggagaccctgcaggccacagatgagcccccagccagccagggcagcaagccagccctgcccctggacaagaacacagctgctgccctgccccaggccagcggggaggagacccccctgtctgtgccccctgtggacagcaccatccagcacagcagccccaacgtggtgaggaagcacagcaccagcctgagcatcatgggcttcagcaacaccctggagatggagctgagcagcacccggctggagcggcccctggagccccagatccagagcgtgagcaacctgacagctggggccccccaggccgtgcccagcctgctgagcgccccacccaagatggtgagcagcctgacctctgtgcagaaccaggccatgcccagcctgaccaccagccacctgcagacagtgcccagcctggtgcacagcaccttccagagcatgcccaacctgatcagtgacagcccccaggccatggccagcctggccagtgaccacccccaggccggccccagcctgatgagcggccacacccaggccgtgcccagcctggccacctgccccctgcagagcatcccccctgtgtctgacatgcagcctgagaccggcagcagcagcagcagcggccgcaccagcggcagcctgtgccccagagatggagctgaccccagcctggagaatgccctgtgcaaggtgaagctggaggagcccatcaacctgtctgtgaagaagccacccctggcccctgtggtgtccaccagcacagccctgcagcagtaccagaaccccaaggaatgtgaaaattttgagcagggcgccctggagctggatgccaaggagaaccagagcatccgggccttcaacagcgagcacaagatcccctacgtgcggctggagcggctgaagatctgtgccgccagcagcggggagatgcctgtgttcaagctgaagccccagaagaatgaccaggacggcagcttcctgctgatcattgaatgtggcacagagagcagctccatgagcatcaaggtgtcccaggaccggctgtctgaggccacccaggcccctggcctggagggcaggaaggtgacagtgaccagcctggccggccagaggcctcctgaggtggagggcaccagccctgaggagcacaggctcatccccaggacccctggggccaagaagggccccccagcccccattgaaaatgaagacttctgtgctgtgtgcctgaatggaggagagctgctgtgctgtgaccgctgccccaaggtgttccacctgagctgccacgtgcctgccctgctgtccttccctggaggagagtgggtgtgcaccctgtgccgcagcctgacccagcctgagatggagtatgactgtgaaaatgcctgctacaaccagcccggcatgagggccagccctggcctgtccatgtatgaccagaagaagtgtgagaagctggtgctgagcctgtgctgcaacaacctgagcctgcccttccacgagcctgtgagccccctggcccggcactactaccagatcatcaagaggcccatggacctgagcatcatccggaggaagctgcagaagaaggaccctgcccactacaccaccccagaggaggtggtgtctgatgtgcggctgatgttctggaactgtgccaagttcaactacccagattctgaggtggccgaggccggccgctgcctggaggtgttctttgagggctggctgaaggagatctacccagagaagagatttgcccagccccggcaggaggacagcgacagcgaggaggtgagcagcgagagcggctgcagcaccccccagggcttcccctggccaccctacatgcaggagggcatccagcccaagagaagaagaagacacatggagaatgaaagagccaagaggatgtccttccggctggccaacagcatcagccaggtgtag

SEQ ID NO: 182405 - DNA, 3651 bp, Artificial Sequence
  derived and/or modified sequence
atggcccggaactgcagcgagtgcaaggagaagcgggccgcccacattctatgcacctattgcaacaggtggctatgctcttcatgcactgaagagcatcgccattctcctgtacctggaggacccttttttcctcgggcacagaaagggtcccctggggtcaacgggggtcctggtgatttcacgctgtactgtcccctgcacactcaggaagtcctcaaacttttttgcgaaacttgcgacatgctgacatgccattcttgtctggtcgtggaacataaggagcacagatgtagacacgtggaggaggttctacagaatcaaagaatgttgttagaaggagtcaccacccaagtggcacacaagaagagctcactccaaacctctgcaaagcagatcgaggaccgcatctttgaagtgaaacatcagcacagaaaggtggaaaaccagattaagatggcgaagatggtgttaatgaacgagttgaacaagcaagccaacggtttgattgaagagctggaggggattaccaatgagcgtaaaaggaagctcgaacaacagttgcaatctatcatggtccttaacagacagttcgaacacgttcagaactttattaactgggcagtgtgctctaagacgtctgtgccatttcttttcagcaaggagttaatcgtgtttcagatgcagcggctgctcgagacttcctgcaatacggaccctggctctccctggtcaatccgatttacgtgggaacctaatttctggaccaaacagctcgccagcctgggttgtatcacgaccgaaggaggccaaatgtctcgcgccgacgcacccgcctacggcggacttcaggggagtagccctttctaccaatcacatcagtctcccgtcgcacaacaagaggccctgtcccaccccagccacaaattccagagccccgcagtgtgtagttcgagcgtgtgctgcagtcattgtagcccagtgagcccctccttgaagggccaggtcccacccccttctatacatccagctcatagcttcagacagccacccgagatggtacctcagcaactcgggtcactgcagtgttccgccctcctaccccgggaaaaagaactggcttgtagtccacatccaccaaaactgctgcaaccttggcttgaaactcagccacctgtggaacaggaaagtaccagccagaggctcgggcaacaactcaccagccagccagtatgtatcgtgccccctcaggacgttcagcaaggcgcgcacgctcaacctaccctccagaccccttctatacaggtgcagtttgggcaccaccagaaacttaagctgtcacatttccagcagcaaccgcagcagcagttaccacctccccctccgcctctgccccatcctccaccaccactgccaccccctccccagcagccgcatccaccgttaccacccagtcagcatttggcttcgtcacagcatgaaagcccccctggacccgcctgcagccaaaatatggacataatgcatcataaattcgagctggaggaaatgcagaaagacctcgagctgctcctccaggcacaacagcccagtctccagctttcccagacgaaatctccccaacacctgcaacagactatcgttggacagattaactatattgtccggcagcctgctcccgtccagagccagagtcaagaggaaaccctgcaggctaccgatgagcccccagcgagccagggctctaaaccagcgttgcctttagacaaaaatacagcggccgccctgccccaagcttctggagaggagacccccctttcagtgcctcctgtggacagtactattcagcacagcagcccaaatgtcgtgcggaaacacagcacttctctgtccataatgggattttcaaacaccctagaaatggaactgagcagtacgaggcttgaacggcccctagaaccgcagatacaatcggtgtccaacttgactgctggggccccacaggcggtcccatcgctgctcagcgcacccccaaaaatggtgagctcacttacaagcgtacaaaatcaggcgatgcccagcctgactactagtcacctccagacggtgccgtccctcgtgcatagcacattccagtcaatgcccaatctcatatctgacagccctcaggctatggcttctcttgcaagtgaccacccccaggccggtccctcacttatgtcgggacacactcaagcagttccatcactagccacatgtccactgcagagtattcctccggtcagcgatatgcagcccgagactggaagcagctctagctccgggagaacttctggcagcctgtgtcccagggacggagcggacccatcccttgagaacgctctgtgcaaggttaaactggaggaacctatcaacttgtctgtgaagaagcctccactggctcctgtcgtaagcacttcaacagccttacagcagtaccaaaatcctaaggagtgtgaaaattttgaacagggtgccctcgagctggacgccaaagaaaaccagtccatcagagcattcaactcagaacacaagataccttacgtgagactggagagactgaaaatatgcgctgcctcttcaggagagatgccagtgtttaagttgaaaccccagaagaatgaccaggacgggtcttttctgctgatcattgaatgcggaactgagagcagcagcatgtccattaaagtgagccaggaccgcctctccgaggcaacccaggctcctggcctggagggtaggaaggtgactgtgacatccctcgctggccagaggccgcctgaagttgaaggaacatcacccgaagagcatcgcctgattcctagaacccctggagctaaaaagggccctcccgccccgattgagaatgaggacttttgcgctgtatgtctgaatggtggagaactgttatgctgcgacaggtgtccaaaggtattccatctgagttgccacgttccagccctgctgagcttccctgggggagagtgggtctgtactctgtgtcggagtcttactcagcctgaaatggagtacgactgcgagaacgcctgctacaatcagcccggcatgcgtgccagccctgggctctccatgtacgaccagaaaaaatgtgaaaagcttgttctctccttgtgttgtaataatttgtccctgcctttccacgagccggtgagtccccttgctcggcattactaccagatcattaaacggccaatggacttaagcatcattaggcgaaaacttcagaagaaggatcccgcacactacaccacaccggaggaagtggttagcgacgtgaggctcatgttctggaactgtgcgaagttcaactacccagatagtgaagtggcagaggctggccggtgtctggaagtgttttttgagggatggctgaaggaaatctaccctgagaaaaggtttgcccagcctcgacaggaggactcagattccgaagaggtgtctagcgagtctggctgcagcactccccagggatttccatggcctccttacatgcaggagggcatacagcctaaacggcgcaggaggcacatggagaacgaacgcgcaaaaaggatgagcttccgcttggctaatagcatttcccaggtgtag

SEQ ID NO: 182406 - DNA, 3651 bp, Artificial Sequence
  derived and/or modified sequence
atggccagaaattgttccgagtgtaaagagaaacgggcagcccatatcctttgcacatattgtaatcgctggctttgctcttcttgtaccgaggagcatagacattcgccggtccctggcggacccttttttcctagagctcagaaagggagtcctggcgtgaatgggggtcccggagatttcacactgtattgcccgttacatacacaggaggtgctgaaattattctgtgaaacatgcgacatgctgacatgccactcctgtttggttgttgagcataaagagcaccggtgtaggcacgtggaagaggtgctgcagaatcagcgcatgcttctggagggtgtcactacacaggtcgcccataaaaaatcgtccctccagacttccgccaaacagatagaagaccgtatattcgaagtgaagcaccagcataggaaggtggagaaccaaataaaaatggctaagatggtgctgatgaatgaactcaacaaacaagctaacggactcatcgaggagctggagggcattactaatgagcgcaaacgcaaattggaacagcagttacagagcataatggtgctgaatagacaattcgagcatgttcagaacttcataaactgggcagtttgttcaaagaccagtgtaccattcctattttctaaagaactgatcgtgttccagatgcagcggcttcttgaaacatcctgtaacacagatcccggaagcccttggtccatacgcttcacttgggagcccaacttctggactaagcaactggcttccttaggatgcatcacaaccgagggcggtcagatgagtagggcagatgcgccagcatatggaggcctccaaggcagttcaccattttaccaaagccaccaatctcccgtggcccaacaggaagcgttgagtcacccgtcccacaagtttcaatcccccgctgtgtgctccagctctgtctgttgctcccactgcagcccagtgtcaccaagccttaaaggccaggtaccacctccctctattcaccctgcgcactccttcaggcagccacctgagatggtgccccagcagctaggtagcttacagtgctcagcccttctccctagggagaaggagctggcttgctccccacacccaccaaaactgctgcagccgtggttggagacccagccccctgtggaacaggaaagtacctcacagcgtctcggacagcagctcactagtcagcccgtctgtatagttccaccccaggatgtgcagcaaggggcacacgctcaacctaccctgcaaaccccttccatccaggtgcagtttggacaccaccagaagctcaagttgtcccacttccagcagcagccacagcaacaacttccgccaccgcctccacctttgccgcacccccctcctccactgccaccaccaccacagcagccgcacccaccgctgcctccttcgcaacatctggcctcctcccagcatgaatcgccaccaggccctgcctgttctcagaacatggatatcatgcatcacaaattcgagctagaggaaatgcaaaaagatctggaattgcttctacaggcccagcagccatccctgcagcttagtcagacaaagtctcctcagcacctgcagcagaccatcgtgggacagatcaattacattgtccgtcagcccgcacccgtgcagtcacagtcccaggaggagactctgcaggccaccgatgagcctcccgcttcacaaggaagcaaacctgccctgcccctcgataaaaataccgctgcagctctgcctcaagcctctggagaggaaacacctctttccgtgcctccagtcgacagcaccatccaacatagcagtccaaacgttgtccggaaacactcaaccagtctgtctattatggggttctccaacacacttgaaatggaactctcgtccacccggctcgagaggccactggagccccagatacagtccgtctcaaatcttactgcaggcgcacctcaagccgtgccatccctactgtctgctcctcccaaaatggtgagcagcctaacaagcgtccaaaaccaagctatgcctagtttgacaactagtcacctgcagactgttccttccctggttcattcaacatttcagtcaatgccgaacctcatttctgattcacctcaggcaatggcttccctcgccagtgatcatcctcaggccggaccttccctgatgtctggacacacgcaggccgtcccctcattagcgacttgccctctgcagtcaatccctccagtgtctgacatgcagcccgaaaccggatcttcatcatcttctgggaggacaagtgggagcctgtgtccccgagatggggctgatccatctctggaaaacgccctgtgtaaagtgaagttagaagaacctatcaatctgtctgtaaaaaagccgcctcttgcgccagtcgtgtcaacaagtaccgcgctacagcagtaccaaaaccctaaggaatgcgaaaacttcgagcagggggctctggaacttgatgccaaggaaaaccaatccatccgggcttttaactctgaacataagattccgtatgtgagattggaaaggctcaagatctgtgccgctagcagcggcgaaatgccagtcttcaaactgaaacctcagaagaatgatcaggacgggagcttcttactcataattgagtgcggaactgagtcctcctctatgtcgatcaaagttagtcaggataggctgtcggaggccacacaagctcccggactggaaggcagaaaagtaacggtcacatcactggccggacaacggcctcccgaagtggaaggcactagcccggaggaacacaggttgatcccacgcacccctggggctaagaagggaccgcctgcccctattgaaaacgaggacttctgcgccgtctgccttaacggcggagagttactgtgttgcgatcgttgccccaaggtattccacctgtcctgccacgtgcccgcactcctgtcctttccgggaggcgagtgggtctgtacactgtgccggagcctgacgcaacccgagatggaatacgactgtgagaacgcatgttacaatcaacctgggatgagagccagtcccggactgtctatgtatgatcagaagaaatgtgaaaagctggtcttgagtttgtgttgcaataatctgtccctgcctttccacgaacccgtatctccgctggcacggcactattatcagatcataaaacgcccaatggacttgagtattatcaggcggaagttgcagaagaaggatccagctcactataccacccctgaagaagtcgtcagtgacgtgagactgatgttctggaattgcgccaaatttaattacccagactctgaggtagcagaagctggtcgttgtctagaagtcttctttgaaggatggctcaaagaaatctatcctgaaaagcggtttgcccagccccgacaagaggactctgactccgaggaggtcagttctgagtcagggtgctcaacaccgcagggcttcccatggcccccttacatgcaagaagggattcagcccaagagacgcagaaggcacatggaaaatgagcgtgccaaaagaatgagcttccgactggccaactctatttcacaggtctag

SEQ ID NO: 182407 - protein, 708 aa, Artificial Sequence
  derived and/or modified sequence
MSQYTEKEPAAMDQESGKAVWPKPAGGYQTITGRRYGRRHAYVSFKPCMTRHERSLGRAGDDYEVLELDDVPKENSSGSSPLDQVDSSLPSEPIFEKSETEIPTCGSALNQTTESSQSFVAVHHSEEGRDTLGSSTNLHNHSEGEYIPGACSASSVQNGIALVHTDSYDPDGKHGEDNDHLQLSAEVVEGSRYQESLGNTVFELENREAEAYTGLSPPVPSFNCEVRDEFEELDSVPLVKSSAGDTEFVHQNSQEIQRSSQDEMVSTKQQNNTSQERQTEHSPEDAACGPGHICSEQNTNDREKNHGSSPEQVVRPKVRKLISSSQVDQETGFNRHEAKQRSVQRWREALEVEESGSDDLLIKCEEYDGEHDCMFLDPPYSRVITQRETENNQMTSESGATAGRQEVDNTFWNGCGDYYQLYDKDEDSSECSDGEWSASLPHRFSGTEKDQSSSDESWETLPGKDENEPELQSDSSGPEEENQELSLQEGEQTSLEEGEIPWLQYNEVNESSSDEGNEPANEFAQPAFMLDGNNNLEDDSSVSEDLDVDWSLFDGFADGLGVAEAISYVDPQFLTYMALEERLAQAMETALAHLESLAVDVEVANPPASKESIDGLPETLVLEDHTAIGQEQCCPICCSEYIKDDIATELPCHHFFHKPCVSIWLQKSGTCPVCRRHFPPAVIEASAAPSSEPDPDAPPSNDSIAEAP

SEQ ID NO: 182408 - DNA, 2127 bp, Artificial Sequence
  derived and/or modified sequence
atgagccagtacaccgagaaggagcccgccgccatggaccaggagagcggcaaggccgtgtggcccaagcccgccggcggctaccagaccatcaccggcagaagatacggcagaagacacgcctacgtgagcttcaagccctgcatgaccagacacgagagaagcctgggcagagccggcgacgactacgaggtgctggagctggacgacgtgcccaaggagaacagcagcggcagcagccccctggaccaggtggacagcagcctgcccagcgagcccatcttcgagaagagcgagaccgagatccccacctgcggcagcgccctgaaccagaccaccgagagcagccagagcttcgtggccgtgcaccacagcgaggagggcagagacaccctgggcagcagcaccaacctgcacaaccacagcgagggcgagtacatccccggcgcctgcagcgccagcagcgtgcagaacggcatcgccctggtgcacaccgacagctacgaccccgacggcaagcacggcgaggacaacgaccacctgcagctgagcgccgaggtggtggagggcagcagataccaggagagcctgggcaacaccgtgttcgagctggagaacagagaggccgaggcctacaccggcctgagcccccccgtgcccagcttcaactgcgaggtgagagacgagttcgaggagctggacagcgtgcccctggtgaagagcagcgccggcgacaccgagttcgtgcaccagaacagccaggagatccagagaagcagccaggacgagatggtgagcaccaagcagcagaacaacaccagccaggagagacagaccgagcacagccccgaggacgccgcctgcggccccggccacatctgcagcgagcagaacaccaacgacagagagaagaaccacggcagcagccccgagcaggtggtgagacccaaggtgagaaagctgatcagcagcagccaggtggaccaggagaccggcttcaacagacacgaggccaagcagagaagcgtgcagagatggagagaggccctggaggtggaggagagcggcagcgacgacctgctgatcaagtgcgaggagtacgacggcgagcacgactgcatgttcctggaccccccctacagcagagtgatcacccagagagagaccgagaacaaccagatgaccagcgagagcggcgccaccgccggcagacaggaggtggacaacaccttctggaacggctgcggcgactactaccagctgtacgacaaggacgaggacagcagcgagtgcagcgacggcgagtggagcgccagcctgccccacagattcagcggcaccgagaaggaccagagcagcagcgacgagagctgggagaccctgcccggcaaggacgagaacgagcccgagctgcagagcgacagcagcggccccgaggaggagaaccaggagctgagcctgcaggagggcgagcagaccagcctggaggagggcgagatcccctggctgcagtacaacgaggtgaacgagagcagcagcgacgagggcaacgagcccgccaacgagttcgcccagcccgccttcatgctggacggcaacaacaacctggaggacgacagcagcgtgagcgaggacctggacgtggactggagcctgttcgacggcttcgccgacggcctgggcgtggccgaggccatcagctacgtggacccccagttcctgacctacatggccctggaggagagactggcccaggccatggagaccgccctggcccacctggagagcctggccgtggacgtggaggtggccaacccccccgccagcaaggagagcatcgacggcctgcccgagaccctggtgctggaggaccacaccgccatcggccaggagcagtgctgccccatctgctgcagcgagtacatcaaggacgacatcgccaccgagctgccctgccaccacttcttccacaagccctgcgtgagcatctggctgcagaagagcggcacctgccccgtgtgcagaagacacttcccccccgccgtgatcgaggccagcgccgcccccagcagcgagcccgaccccgacgccccccccagcaacgacagcatcgccgaggccccctag

SEQ ID NO: 182409 - DNA, 2127 bp, Artificial Sequence
  derived and/or modified sequence
atgtctcagtacacggagaaggagccagccgccatggatcaggagtctggaaaagcagtgtggccaaaacccgctggcggataccaaaccataacagggaggcggtatggaagacgccatgcttatgtttccttcaagccgtgtatgacccggcatgagcgctcgctgggccgggccggcgacgattatgaggtgttggaacttgatgacgtgcctaaggagaactcatccgggtcaagtcctttggaccaagtggattcatcacttccttccgagccaattttcgagaagagcgagaccgaaattccgacctgcggctccgcgctaaaccaaaccacggagtcctcgcaaagttttgtggcagttcaccattcagaagagggtcgcgatactttgggttcctccaccaaccttcataatcactccgagggagagtatatacccggggcctgcagcgcatcttctgtacagaatggaattgctctcgtgcacacagactcatacgatccagacggcaagcacggcgaagataatgatcatcttcagctgtctgctgaagttgtggaaggatcgcgttatcaagaatcattagggaataccgtattcgaacttgagaaccgagaggctgaagcttacacaggcctgtccccccccgttccttctttcaattgtgaagtccgcgacgaatttgaagaactcgatagcgtccctttagtgaaaagcagcgctggggatactgaattcgtacaccagaactcgcaggagatccagcgatcctcacaggacgaaatggtgagcaccaaacagcaaaataacaccagtcaggagagacagacagagcatagtcccgaagacgccgcttgtggcccgggacatatttgctcggaacagaacacaaatgacagagaaaagaaccacgggtcctcccccgagcaagttgtccggccgaaggtgaggaagctgatctcaagcagtcaagttgaccaagagactggatttaatagacatgaagccaagcagcgtagtgtacaaagatggcgggaggctctagaagtggaggagtctgggtcagatgacctcctaatcaaatgcgaggaatacgatggagagcatgactgcatgttcctggatcctccttactcacgggtgatcactcagagagagacagagaataatcagatgacctcagaaagcggtgccactgctgggcggcaagaagtagacaataccttttggaacggctgtggcgactactaccagctatatgacaaggacgaagacagttctgagtgctctgatggggaatggagtgccagccttccacatcggttctcaggaacggagaaggaccagtcctcgtccgatgagagttgggagaccctccccggcaaagacgaaaatgagccagaattacaatctgattccagtggccccgaggaggagaatcaggagctaagcctgcaggaaggagagcagacgtccctcgaggagggagagataccctggctccagtataatgaggtgaatgaaagtagctctgatgagggcaacgagccagccaacgagtttgcgcaacctgcgtttatgctggatggcaacaataacttggaggacgattcatccgtgtccgaggacctcgacgttgactggtccctcttcgatggcttcgccgacggccttggagtggctgaagctatcagctacgtggacccccagttccttacctacatggccctagaggaacggctggcccaagcaatggaaaccgccttagcacatctggagtccctagccgtagacgttgaggtggccaatccgccagcgtccaaagaatccattgacggtctacccgaaaccctggttctcgaggaccataccgctatcggacaggaacaatgttgtcccatctgctgctcggagtacatcaaagatgacatcgctaccgagctgccatgccaccacttttttcacaagccttgcgtgtccatatggctgcaaaaatccggtacttgtccagtgtgcaggagacacttccctccagctgtcattgaggcgtcggctgcccccagttcagagccagatccagatgcgcctccttcaaatgactccattgcagaggctccctag

SEQ ID NO: 182410 - DNA, 2127 bp, Artificial Sequence
  derived and/or modified sequence
atgtcgcagtacactgagaaagagccagcagcaatggaccaggagtctgggaaagctgtctggcctaaaccagccggtggctatcagaccattaccggacgccgatatggccgccgtcacgcctatgtgtcgttcaaaccatgtatgactaggcatgagaggagtctgggcagagccggtgacgattacgaggtgcttgagttagacgatgttcctaaggagaacagctcaggctcttctcccctggatcaggtagatagttctctgcccagcgaacccatcttcgagaaatcagaaactgagattcctacatgtggtagcgcacttaatcagaccacagagtcctctcaaagctttgtggccgttcatcactcagaagagggaagagatacactaggcagctctactaatctacataaccattccgaaggagaatacatccccggggcctgctcagcctcttctgtacagaacggaatcgctctcgtgcacactgattcctacgaccccgacggaaagcacggcgaagacaacgatcacctgcagctgagtgctgaggttgttgagggatctcgatatcaggagagtcttggtaacaccgtttttgagttggagaaccgcgaggctgaggcctacaccgggttgagtcctcccgtgccgtcattcaactgtgaggtgcgggacgagttcgaggaactagacagcgtccccctggttaagagctccgccggcgacactgagttcgtgcaccaaaactcacaggaaatccaacggtcctctcaggatgaaatggtctccaccaagcagcaaaataatacctcacaggagcgccagacagaacacagcccggaggatgcggcctgcgggcctggccatatctgcagcgaacagaacactaatgaccgcgagaaaaaccacggaagttccccagagcaggtggtcaggcctaaggtccgtaaattgatcagcagtagtcaggtcgaccaggaaaccgggtttaaccgtcacgaggccaagcagcgcagcgtgcagcggtggcgggaagcgctggaagtcgaggaaagtgggagcgatgacttgctaataaagtgtgaggagtatgacggggagcacgattgtatgttcctggaccctccctactccagggtgatcactcaaagagaaacagagaacaaccagatgacttctgaatctggtgctaccgccggccgccaggaggttgataatacattttggaacggttgcggagactattaccagctctatgacaaggatgaagattcctctgaatgttctgacggtgaatggagcgcctctctcccccatcgcttctctggtacagagaaggaccagagtagctccgatgaatcgtgggagacattacccggcaaggacgagaacgaaccagagctccagtcagatagttcaggacctgaagaggagaaccaggagttatcactgcaagagggtgagcaaacatctctcgaagagggggagattccctggcttcagtacaacgaggttaatgaatcctcttcagacgagggcaacgagccagccaacgaatttgcgcagccggccttcatgctggacggaaataataacttagaagacgattcgagcgtgtctgaagacctggacgttgattggagcctctttgacggatttgctgatggccttggagtagctgaggccatctcctatgtagatcctcagttcctgacttatatggccctggaagagcgcctcgctcaggcgatggagactgccctggcacacctggagtccctcgctgtggacgttgaggtcgcaaacccccccgcatccaaggagagtattgatggcctgcctgagaccttagtgcttgaggaccacactgccattgggcaagagcagtgctgtccgatatgctgttccgagtacatcaaagatgacattgcaacagaactgccatgtcaccacttttttcacaaaccatgcgtgagcatctggctgcagaagtctgggacatgccccgtgtgtagaagacacttccctcccgcggtgatagaggcttcagcagcaccttcttccgagcctgaccccgatgctccccctagtaacgattctatcgccgaggccccgtag

SEQ ID NO: 182411 - DNA, 2127 bp, Artificial Sequence
  derived and/or modified sequence
atgagccagtacacagagaaggagcctgctgccatggaccaggagagcggcaaggctgtgtggcccaagccagctgggggctaccagaccatcaccggccgccgctatggaagaagacatgcctacgtgtccttcaagccctgcatgaccaggcatgagaggagcctgggccgggctggagatgattatgaggtgctggagctggatgatgtgcccaaggagaacagcagcggcagcagccccctggaccaggtggacagcagcctgcccagcgagcccatctttgagaagtcagaaacagagatccccacctgtggcagcgccctgaaccagaccacagagagcagccagagctttgtggccgtgcaccacagcgaggagggccgggacaccctgggcagcagcaccaacctgcacaaccacagcgagggggagtacatccctggggcctgcagcgccagctctgtgcagaatggcatcgccctggtgcacacagacagctatgaccctgatggcaagcacggggaggacaatgaccacctgcagctgtctgctgaggtggtggagggcagccgctaccaggagagcctgggcaacacagtgtttgagctggagaaccgggaggccgaggcctacacaggcctgagcccccctgtgcccagcttcaactgtgaggtgagagatgaatttgaggagctggacagcgtgcccctggtgaagagcagcgctggggacacagaatttgtgcaccagaacagccaggagatccagaggagcagccaggatgagatggtgtccaccaagcagcagaacaacaccagccaggagcggcagacagagcacagcccagaagatgctgcctgtggccctggccacatctgcagcgagcagaacaccaatgaccgggagaagaaccacggcagcagccctgagcaggtggtgcggcccaaggtgaggaagctgatcagcagcagccaggtggaccaggagaccggcttcaacagacatgaggccaagcagaggtctgtgcagcgctggagggaggccctggaggtggaggagagcggcagtgatgacctgctgatcaagtgtgaggagtatgatggagaacatgactgcatgttcctggaccccccctacagcagggtcatcacccagcgggagacagagaacaaccagatgaccagcgagagcggggccacagctggccggcaggaggtggacaacaccttctggaatggctgtggggactactaccagctgtatgacaaggatgaggacagcagcgagtgcagtgatggagagtggagcgccagcctgccccaccgcttctctggaacagagaaggaccagagcagcagtgatgagagctgggagaccctgcccgggaaggatgaaaatgaacctgagctgcagagcgacagcagcggccctgaggaggagaaccaggagctgagcctgcaggagggggagcagaccagcctggaggagggggagatcccctggctgcagtacaatgaggtgaatgaaagcagcagtgatgagggcaatgaaccagccaatgaatttgcccagcctgccttcatgctggatggcaacaacaacctggaggatgacagctctgtgtctgaggacctggatgtggactggagcctgtttgatggctttgctgatggcctgggcgtggccgaggccatctcctatgtggacccccagttcctgacctacatggccctggaggagcggctggcccaggccatggagacagccctggcccacctggagagcctggccgtggatgtggaggtggccaaccccccagccagcaaggagagcattgatggcctgcctgagaccctggtgctggaggaccacacagccatcggccaggagcagtgctgccccatctgctgcagcgagtacatcaaggatgacatcgccacagagctgccctgccaccacttcttccacaagccctgtgtgtccatctggctgcagaagagcggcacctgccctgtgtgcagaagacacttccccccagctgtgattgaggccagcgctgcccccagcagcgagccagaccctgatgccccacccagcaatgacagcattgctgaggccccctag

SEQ ID NO: 182412 - DNA, 2127 bp, Artificial Sequence
  derived and/or modified sequence
atgagccagtacaccgagaaggagcccgccgccatggaccaggagtccggaaaggccgtgtggcccaagccggccggcggctaccagaccattaccgggcgccggtacgggaggcgtcacgcttacgtcagctttaagccgtgtatgacccgtcacgagcggtcactgggccgagccggggacgactacgaggtcctggagctcgacgatgtgcctaaagagaatagtagcgggagcagtccgttggaccaggtggacagttcccttccatcagagcctatcttcgaaaagtcagagacagaaatcccaacctgtggcagtgccctaaatcaaacaacagagagttcccagtccttcgtcgcagtccaccattccgaagagggccgggatacactgggatcgagcactaatctccacaaccattctgaaggcgaatatatccccggtgcctgttctgcttcaagcgtgcagaacggcattgcacttgtccacacagactcatacgaccctgatgggaagcatggggaagacaatgaccacctgcagctcagcgcagaagtcgtcgaaggctccagatatcaagaatctctgggaaataccgtgttcgagctcgagaacagagaggccgaagcatacactgggctctcacctcctgtaccatcattcaactgtgaggtgagggatgaattcgaggaactggactctgttcctttagtcaaatcctccgccggcgatacagagttcgtccatcagaatagtcaggaaatccagcgatcaagccaagatgagatggtttctacaaagcaacagaacaatacctcacaggaaagacaaactgagcacagtcctgaggacgcagcttgcggaccaggccacatttgttctgagcagaatacaaacgatcgcgagaagaaccatgggagtagcccagagcaggtggtgaggcctaaagtccgcaagctcattagttcctcccaggtggaccaagagacgggtttcaatagacacgaagccaaacaacgttccgtgcagcggtggagagaagcgcttgaagtggaagagagcggatctgatgatctgcttatcaaatgcgaggagtatgatggagaacacgactgtatgttcctggaccccccatacagtcgagtgataacccagcgagagaccgagaacaaccagatgaccagcgagtccggtgctacagcaggcagacaagaagtggataacacattttggaacggatgcggagattattaccaactatacgacaaggacgaggattcatctgagtgttcggacggggaatggagcgcgagcctgcctcacagattttctgggaccgaaaaggaccagtcatcatcagatgagtcttgggagacactgcctgggaaagacgagaacgagcccgagctgcaaagcgatagcagcgggccagaggaggaaaaccaggaactgagtctgcaagagggagagcaaacctccctcgaagaaggcgagattccatggcttcagtacaacgaggtgaatgaatcatcgagcgacgagggaaacgagccagccaacgagttcgcccagccagcgtttatgttggacggcaacaataacctggaggacgacagcagtgtgtccgaggaccttgacgtagactggagtctgtttgatgggtttgcagacggactgggagtggccgaggctatttcgtacgtcgacccccagtttctgacttatatggcgttggaagaaaggctcgcgcaagccatggagactgctctggcacatctcgaaagcctggccgtcgacgttgaagtagctaaccccccagccagtaaagagagcatcgacgggttacccgagactctcgtgttggaagaccatactgccataggccaggaacagtgttgcccaatctgttgtagcgaatacatcaaagatgacatcgccaccgagttgccctgtcatcacttctttcacaaaccctgtgtgagtatatggctgcagaaaagcgggacttgccctgtctgtagacgacactttccgcctgctgtgattgaagcaagtgcggctcctagctcagaacccgatcctgacgcccccccttctaacgactccatcgcagaggcaccatag

SEQ ID NO: 182413 - DNA, 2127 bp, Artificial Sequence
  derived and/or modified sequence
atgagccagtacaccgagaaggagcccgccgccatggaccaggagagcggcaaggctgtgtggccaaaacctgccggagggtaccagactatcacgggaagaaggtacggaagacgacacgcctatgtgagttttaaaccatgcatgacccgtcacgagcggtccctcggaagagcaggggacgactatgaggtgctggagctggacgacgtccccaaggaaaattcctctggcagctctcccctggaccaggtagactcgtctctgccttcggagcccatttttgagaagtctgaaaccgagatacccacatgtggttctgccctgaaccaaacaactgagtctagtcagtctttcgtggctgtgcaccactcagaagaaggaagagatacactgggatcatcaacaaacctgcacaatcactcagagggtgagtacatccctggagcttgctccgcctcctcagtacagaatggaattgcgcttgttcatacagacagttatgaccctgacggtaaacacggagaagacaacgatcacctgcaactctccgccgaagtggttgaagggtcacggtaccaagagagcctaggcaacactgtgttcgaactggagaaccgggaggcggaagcctataccgggcttagtcctcccgtccccagcttcaactgcgaggtgagagacgagttcgaggaactagatagcgttcccctggtgaagagctccgctggagatactgaatttgtacatcaaaacagccaggagatccagcggagtagccaggatgaaatggttagtactaagcagcagaataatacctcacaggaaagacagactgagcactcaccagaagatgctgcttgtggacccggccacatatgcagtgaacagaatacaaacgaccgggaaaaaaaccacggctcatcgccagagcaggtcgtgcgacccaaggtgagaaaacttatctcgtccagtcaggtcgaccaggaaactggattcaatcgacatgaggcaaagcaaaggtctgtgcaaagatggagggaggctttggaggtggaagaaagcgggagcgacgacctgctaatcaagtgtgaggagtatgatggcgaacacgactgcatgttcctcgatcccccttatagccgggtcatcacccagagggaaaccgagaataaccaaatgacttcagaaagcggcgctacggctggccgccaggaagtcgacaacaccttttggaatggctgtggggactattaccagctctacgacaaagatgaagattcgagtgagtgttccgacggcgagtggagtgcatctctgccacataggttctctggaaccgagaaagatcagagctcctcagatgagtcctgggagacattacccggtaaagatgagaacgaacccgagctccagtccgatagctccgggcccgaggaagaaaatcaggagctaagcctgcaagagggcgagcagacctccctggaggagggcgaaattccctggctccagtacaacgaggtcaatgaaagcagttctgacgaagggaacgaacccgcgaatgagtttgctcagcctgcatttatgttggacggaaacaacaacctggaggacgattcctccgtgtctgaagatttagatgtcgactggagcctgtttgatggattcgccgacggcctgggagtcgcggaagccatatcttacgttgacccacagttcttgacttacatggccctggaggaacggcttgcacaggccatggagactgccttggcgcatttggagtccttggctgtcgacgtggaggtggccaacccaccggccagcaaagagagcattgatggattgcccgagacgttggtcctcgaagatcatacagctatcggacaggaacagtgttgtcctatttgttgtagcgagtatatcaaagatgatattgccacagagctcccttgccaccacttcttccataaaccatgtgtttccatttggctccagaagtctggaacttgtccagtatgccgccgccactttccccccgctgtgatcgaagcctccgcggccccctcaagcgagcccgacccagacgccccaccgtctaacgacagtatagcagaagctccttag

SEQ ID NO: 182414 - DNA, 4889 bp, Artificial Sequence
  derived and/or modified sequence
cctctgcttccgccgccgccaccgccgccgccgccgccacagccgccagccgcttcgcgttcggcgggggaggagttggaggcggagaagaaggcggtggtggcgggtggaggttcgagcgctgttctcgctccggagccgctgcacatttcggaatcttctgcggcttgtccatagtgtgaataaaaactaaatcacatctataattctactgaactggtcacacagacgctgccatatatgtcacagtacactgaaaaggagccagcagcaatggaccaagaatctggtaaggctgtctggcccaaaccagcaggagggtatcagacaattacaggcaggagatatggaagaagacatgcttatgtcagttttaaaccatgtatgaccagacatgaaagaagcttaggtcgggctggtgatgactatgaagtgttggaactagatgatgttccaaaggaaaattcctcaggttccagtcctttggatcaagttgattcttctttacccagtgaacctatatttgaaaaaagtgaaacagaaattcccacttgtggttcagcattgaatcaaaccactgagagcagtcaatcctttgttgcagtacatcacagtgaggaaggcagggataccttaggaagcagtacaaatcttcataatcactctgagggagagtatattccaggagcttgtagtgcttcaagtgtccaaaatggaattgcattggttcatacagactcttatgatccagatggcaaacatggagaagataatgaccatcttcaactttctgcagaagtcgtggaaggtagtagataccaggaatcattaggcaatacagtatttgagttggaaaacagagaggcagaggcatacactggtctttcaccaccagttccctcatttaactgtgaagtaagagatgagtttgaagagttagattctgtaccattagtgaaaagttctgctggtgatactgagtttgtccatcagaatagccaggaaattcagaggtcttctcaagatgaaatggttagtacgaaacaacaaaataatactagccaggaaagacagacagaacattcacctgaagatgcagcctgtggtccagggcatatttgtagtgaacaaaataccaatgatagggaaaagaaccatggaagttctcctgaacaggtagtgaggccaaaagttagaaaactgataagttcaagccaggtggaccaagaaacaggttttaataggcatgaggcgaaacaaagaagtgttcaaagatggagagaggctttggaagttgaggaaagtggctcagatgacctcttaataaaatgtgaagaatatgatggagagcatgactgtatgttcttggatccaccatactcaagagttattacacaaagggaaacagaaaataaccaaatgacatcagaaagtggagccacagcaggaaggcaagaggtggataacaccttttggaatggctgtggagattattaccaactctatgacaaagatgaagatagttctgaatgcagtgatggggaatggtctgcttctttgcctcatcgattttctggtacagaaaaagatcaatcctcaagtgatgaaagctgggagactctgccaggaaaagatgagaatgaacctgagctacaaagtgatagcagtggccctgaagaagaaaaccaagaattatctcttcaggaaggggaacagacatccttggaagagggagaaattccttggttacagtacaatgaagtcaatgaaagcagcagtgatgagggaaatgaacctgccaatgaatttgcacagccagctttcatgttggatggtaacaataacctggaggatgactccagtgtgagtgaagacttagatgtggattggagcctatttgatggctttgcagatggactaggagttgctgaagctatttcatatgtggatcctcagttccttacctacatggcactagaagaacgcttagcccaggctatggagactgctctggcccatttagagtctcttgcagtggatgttgaggtggccaatccaccagctagtaaggaaagcattgatggtcttccagagacccttgttcttgaagatcacactgctattggtcaggaacaatgctgtccaatctgttgcagtgagtatattaaggatgatatagcaacagagttgccctgtcaccatttctttcacaaaccttgtgtctcaatttggctacaaaagtcgggaacatgccctgtgtgccgccgtcatttcccacctgcggttattgaagcatctgcagctccttcctctgagcctgatcctgatgccccaccttcaaatgacagtattgcagaagcaccctaaaccttgacagttgaaatgagatcagtgtatcaaagtaaatctgcaaattccttctaaatttcatgtgcaaataattatatataaatatatttaaaaatgctatatatagtatatgccatagtttagaaagaatattaacctttctaaactaaatttaggtttgcagaaagtattaaacatttttaagctgaatgttgagacagtgcatccattttctttagttgaatatgtttgtattaattgtaaagccaagcttatcagttgactctctccagaataaataatcatctgtgtggcatacgttattggctttgtctgtaatactgccactaagtgattataattaagctgtcctgtttgcatcaaatgtaaagactgtgttcacaaccgtagtaaaatttggtttcattggaaatgaaacaaattctaaagtatgctttttcactagtccctttgattttgctatatcataacctcttggttcatatgctgagaaatttttcagaaagtccatttttgtttaaaattagaacttttcagaatgccaaatgaaggctaaaattttggccagaacattacaaaagttttaaatcgtagacgtaactccccctgaaataaagttaggtagtaaaatccttaatgaaaccagtggatgtgcttaacgtaaggttagtaaagcatacaaagaatctagtgtgctcagggcttggtacaatgagctgaattagatggccttatgaaactctttctaacctcttacccaacctgtttctccttggttaaaattatacttgaaggcccagaacactcatggcacatttgtttaatattgcttatagttagtttaaggtaattttgcttctacagtattttggaaggtctgaaaacttgcacagggtcatctttgtaattatataaccccaaactaagatgcacaatgtctccttcaggtgatcacacacagtggacgagtatgtgcaaacatggacataatagttcacttacaaatgtgatttgatgttaacactagagaatgatgactgtagaacatttgagcaagtaaaatagtaaagcacatagtgagtgtatgtccgtctaactggtacattgataatttagtttgggcacataaaaggaatatttatatggcttcccaaatgcagagttacatcttattcgtgtatttctctgagtatttatatcccgtctccttttttcattcttaaaaataaatgaattttcactgttggcacatatgaggcttaaatataaggaacataacacttgcattctaatttttgcatatattgtaaatgtgtctggtatttacagcaaaatactgtgtatccttttatgggtaaaacaaaagtgaacattgcatgcatgtaatgtgatgaatttgtaatttaggagttctttggggcttctgtgacttgggaaatgcttacattcaggccttaatgttgcattagctagcatgttttccctctgatgtatatagtcactgttgtataaactaatctttgcttgttttctactctgtgatctttccatatcatatttcattaatgatcagttagtgtcaaggagtcaaaacagattaaaattaatttcatgtgtatatggtggaaatttgtggctagtgtgatttttgtttgtttccttttaagtactgttgatcagttgtgacacttactggttaaacttacgttgctaaagatttctctataataagccacacattatatttagactatattaagggaccttggttttcttctagatagcagctgtcccaaagaaaatatttcttctttgtctgttaagatttagctattatctgccagttgttaagaggttttggttccaaactcaaccagcaatgttgagagctgaacttaagatagctgttgtactttttgctttccatctgttactgtccttcattcttggctccctactatctataaacagctgctgtgaagaagaaaagttgaataagagttggcttaaattttaaaaaagaaaaagaaaattgaggttttaggattttcatggtaacaagctctggtataagctaaggctggcaagttcagatactaaaatattatttgatcatatcttggatccttttgaaaaagttaagactatatgaaggtaaattagaaataagtatgaatattaataaaatagcatttatcttatttctctattttatgttgtgacttaacctaattttatttttttaacattttcttatttcttataatatgaatgctgatatttaaaggtagatctatgtggtattctttgtgtttcttaattgtttaactcttaagattatttgtgatctggatttatgtatttgttagatacatacgaattgttaaaatggaatgcaagtttttcaaaagcccaggtctaaatgtaatggttggtttattgttctataaccccagcccatcattttctgtgtaaatcataaacaataaacagaatatactcggtggtcatttctaata

SEQ ID NO: 182415 - DNA, 4737 bp, Artificial Sequence
  derived and/or modified sequence
tgtaggaatcttctgcggcttgtccatagtgtgaataaaaactaaatcacatctataattctactgaactggtcacacagacgctgccatatatgtcacagtacactgaaaaggagccagcagcaatggaccaagaatctggtaaggctgtctggcccaaaccagcaggagggtatcagacaattacaggcaggagatatggaagaagacatgcttatgtcagttttaaaccatgtatgaccagacatgaaagaagcttaggtcgggctggtgatgactatgaagtgttggaactagatgatgttccaaaggaaaattcctcaggttccagtcctttggatcaagttgattcttctttacccagtgaacctatatttgaaaaaagtgaaacagaaattcccacttgtggttcagcattgaatcaaaccactgagagcagtcaatcctttgttgcagtacatcacagtgaggaaggcagggataccttaggaagcagtacaaatcttcataatcactctgagggagagtatattccaggagcttgtagtgcttcaagtgtccaaaatggaattgcattggttcatacagactcttatgatccagatggcaaacatggagaagataatgaccatcttcaactttctgcagaagtcgtggaaggtagtagataccaggaatcattaggcaatacagtatttgagttggaaaacagagaggcagaggcatacactggtctttcaccaccagttccctcatttaactgtgaagtaagagatgagtttgaagagttagattctgtaccattagtgaaaagttctgctggtgatactgagtttgtccatcagaatagccaggaaattcagaggtcttctcaagatgaaatggttagtacgaaacaacaaaataatactagccaggaaagacagacagaacattcacctgaagatgcagcctgtggtccagggcatatttgtagtgaacaaaataccaatgatagggaaaagaaccatggaagttctcctgaacaggtagtgaggccaaaagttagaaaactgataagttcaagccaggtggaccaagaaacaggttttaataggcatgaggcgaaacaaagaagtgttcaaagatggagagaggctttggaagttgaggaaagtggctcagatgacctcttaataaaatgtgaagaatatgatggagagcatgactgtatgttcttggatccaccatactcaagagttattacacaaagggaaacagaaaataaccaaatgacatcagaaagtggagccacagcaggaaggcaagaggtggataacaccttttggaatggctgtggagattattaccaactctatgacaaagatgaagatagttctgaatgcagtgatggggaatggtctgcttctttgcctcatcgattttctggtacagaaaaagatcaatcctcaagtgatgaaagctgggagactctgccaggaaaagatgagaatgaacctgagctacaaagtgatagcagtggccctgaagaagaaaaccaagaattatctcttcaggaaggggaacagacatccttggaagagggagaaattccttggttacagtacaatgaagtcaatgaaagcagcagtgatgagggaaatgaacctgccaatgaatttgcacagccagctttcatgttggatggtaacaataacctggaggatgactccagtgtgagtgaagacttagatgtggattggagcctatttgatggctttgcagatggactaggagttgctgaagctatttcatatgtggatcctcagttccttacctacatggcactagaagaacgcttagcccaggctatggagactgctctggcccatttagagtctcttgcagtggatgttgaggtggccaatccaccagctagtaaggaaagcattgatggtcttccagagacccttgttcttgaagatcacactgctattggtcaggaacaatgctgtccaatctgttgcagtgagtatattaaggatgatatagcaacagagttgccctgtcaccatttctttcacaaaccttgtgtctcaatttggctacaaaagtcgggaacatgccctgtgtgccgccgtcatttcccacctgcggttattgaagcatctgcagctccttcctctgagcctgatcctgatgccccaccttcaaatgacagtattgcagaagcaccctaaaccttgacagttgaaatgagatcagtgtatcaaagtaaatctgcaaattccttctaaatttcatgtgcaaataattatatataaatatatttaaaaatgctatatatagtatatgccatagtttagaaagaatattaacctttctaaactaaatttaggtttgcagaaagtattaaacatttttaagctgaatgttgagacagtgcatccattttctttagttgaatatgtttgtattaattgtaaagccaagcttatcagttgactctctccagaataaataatcatctgtgtggcatacgttattggctttgtctgtaatactgccactaagtgattataattaagctgtcctgtttgcatcaaatgtaaagactgtgttcacaaccgtagtaaaatttggtttcattggaaatgaaacaaattctaaagtatgctttttcactagtccctttgattttgctatatcataacctcttggttcatatgctgagaaatttttcagaaagtccatttttgtttaaaattagaacttttcagaatgccaaatgaaggctaaaattttggccagaacattacaaaagttttaaatcgtagacgtaactccccctgaaataaagttaggtagtaaaatccttaatgaaaccagtggatgtgcttaacgtaaggttagtaaagcatacaaagaatctagtgtgctcagggcttggtacaatgagctgaattagatggccttatgaaactctttctaacctcttacccaacctgtttctccttggttaaaattatacttgaaggcccagaacactcatggcacatttgtttaatattgcttatagttagtttaaggtaattttgcttctacagtattttggaaggtctgaaaacttgcacagggtcatctttgtaattatataaccccaaactaagatgcacaatgtctccttcaggtgatcacacacagtggacgagtatgtgcaaacatggacataatagttcacttacaaatgtgatttgatgttaacactagagaatgatgactgtagaacatttgagcaagtaaaatagtaaagcacatagtgagtgtatgtccgtctaactggtacattgataatttagtttgggcacataaaaggaatatttatatggcttcccaaatgcagagttacatcttattcgtgtatttctctgagtatttatatcccgtctccttttttcattcttaaaaataaatgaattttcactgttggcacatatgaggcttaaatataaggaacataacacttgcattctaatttttgcatatattgtaaatgtgtctggtatttacagcaaaatactgtgtatccttttatgggtaaaacaaaagtgaacattgcatgcatgtaatgtgatgaatttgtaatttaggagttctttggggcttctgtgacttgggaaatgcttacattcaggccttaatgttgcattagctagcatgttttccctctgatgtatatagtcactgttgtataaactaatctttgcttgttttctactctgtgatctttccatatcatatttcattaatgatcagttagtgtcaaggagtcaaaacagattaaaattaatttcatgtgtatatggtggaaatttgtggctagtgtgatttttgtttgtttccttttaagtactgttgatcagttgtgacacttactggttaaacttacgttgctaaagatttctctataataagccacacattatatttagactatattaagggaccttggttttcttctagatagcagctgtcccaaagaaaatatttcttctttgtctgttaagatttagctattatctgccagttgttaagaggttttggttccaaactcaaccagcaatgttgagagctgaacttaagatagctgttgtactttttgctttccatctgttactgtccttcattcttggctccctactatctataaacagctgctgtgaagaagaaaagttgaataagagttggcttaaattttaaaaaagaaaaagaaaattgaggttttaggattttcatggtaacaagctctggtataagctaaggctggcaagttcagatactaaaatattatttgatcatatcttggatccttttgaaaaagttaagactatatgaaggtaaattagaaataagtatgaatattaataaaatagcatttatcttatttctctattttatgttgtgacttaacctaattttatttttttaacattttcttatttcttataatatgaatgctgatatttaaaggtagatctatgtggtattctttgtgtttcttaattgtttaactcttaagattatttgtgatctggatttatgtatttgttagatacatacgaattgttaaaatggaatgcaagtttttcaaaagcccaggtctaaatgtaatggttggtttattgttctataaccccagcccatcattttctgtgtaaatcataaacaataaacagaatatactcggtggtcatttct

SEQ ID NO: 182416 - DNA, 2127 bp, Artificial Sequence
  derived and/or modified sequence
atgagccagtacaccgagaaagaacctgctgccatggatcaggagtctggcaaagctgtctggcccaagcctgctggtggataccaaactatcaccggacgcagatacgggcgaaggcacgcctatgtctctttcaagccttgtatgactcggcacgaacggtctctcggaagggccggagacgattatgaggtactggagctggacgacgtccctaaggaaaacagcagcggaagttcgcccctcgatcaggttgacagcagcttgccatccgaacctatcttcgagaagagtgaaacagagatccccacatgtggaagtgctttgaatcagacaacggagagcagccagtcctttgtggctgttcaccattcagaagagggtcgtgatacattgggcagttccacgaaccttcataaccacagtgagggcgagtacatccctggagcatgctccgcttcttccgttcagaatggaattgcactcgttcacacagattcatacgatcctgacggtaaacatggagaggataatgaccacctccagctaagcgcagaagtcgtggaaggcagccgatatcaagagtccttgggcaataccgtattcgagctggagaatcgagaagccgaagcctacaccggactgtcccctcctgtgccttcctttaactgtgaagtgagagacgagtttgaagaactggactccgtccccttagtgaaaagcagtgctggtgacacggaatttgtgcaccagaactcacaggaaattcaacggagcagccaggacgaaatggtgtctaccaagcaacagaataacacctctcaggaaagacagaccgaacatagccccgaagatgccgcttgcggacctggccacatctgctcagagcaaaacactaacgaccgcgagaagaatcacggctcctcacctgagcaggtggtgcgccctaaggtgcggaaactcatctctagctcacaagtggaccaagagactggattcaatagacacgaggcgaagcagcgctctgttcagaggtggagagaggctcttgaagtcgaagaatccgggtctgatgacctcttgataaagtgcgaagagtatgacggcgaacacgattgcatgtttttggatccaccttattcccgtgtgatcactcagcgagaaaccgagaataaccagatgacttcagaaagcggggctactgcaggacgtcaggaagtcgataacaccttttggaatgggtgcggagactactatcagttatacgacaaagacgaggactccagcgaatgttcagatggcgaatggtcagcaagcctccctcataggtttagtggtacagagaaagaccagagctcatccgatgagtcctgggagacactaccagggaaggatgaaaatgaaccagaactgcaaagtgattctagtgggcctgaggaagagaatcaagaacttagcttacaagagggagagcaaacaagtctcgaagaaggagagataccctggctgcagtataacgaggtgaacgagtctagctccgatgaaggtaacgaaccagccaacgaattcgcccagccagctttcatgttagatgggaacaacaatttagaagatgacagcagcgtctctgaagacctagatgtcgattggtctctgttcgatgggtttgcagatggactcggagtggctgaggccatctcttacgtcgatccacaattccttacctacatggccctggaagagcggctggcgcaggctatggaaaccgcactggctcatcttgaaagtctcgccgttgatgtcgaagttgctaatccacctgcttcaaaagagagtattgacggcctacccgaaacattagtgcttgaagaccacaccgccattggacaggagcagtgctgtcctatctgctgctccgagtacatcaaagacgatattgcgacggagttaccatgtcatcactttttccataaaccctgcgtctctatctggctgcaaaaatccggtacctgtcctgtctgcaggcgacacttcccacccgctgttatcgaagccagtgccgcaccaagcagcgaacctgacccggacgcaccgccttccaacgattccattgctgaagccccatag

SEQ ID NO: 182417 - DNA, 2127 bp, Artificial Sequence
  derived and/or modified sequence
atgagccagtacactgaaaaagaaccagccgcaatggatcaggaatccggcaaagccgtgtggcccaaaccagcaggcggttatcagactattacagggaggcgctatggtcgacgtcatgcctatgtgagcttcaagccatgcatgacacgacacgagcgctctttgggcagagccggtgacgattatgaggtccttgaactggatgatgtgcccaaggaaaatagtagtggaagttcccccttggaccaagtggattcatctctgccatctgaacccatcttcgagaagtcagaaactgagatccccacctgcggttctgccctgaatcagactactgaaagctcccagtcttttgttgcagtgcaccattctgaggaaggaagagacaccttgggaagctctactaacctgcataatcatagcgagggcgaatacatccctggggcatgcagtgctagctctgtgcagaatggcatagctttggtgcacaccgacagttacgaccctgacggcaaacacggcgaggataatgatcacttgcagctgtctgccgaggtggtggaggggagcaggtaccaggaatccctggggaatacagtctttgaattagagaaccgagaggccgaggcctatactggtttatcgccccctgtcccgagctttaattgcgaagttagagatgagtttgaagaattggactctgtaccacttgtcaagtcctctgctggggatactgagttcgtgcatcagaattcacaagaaatccaacggtcatcacaggacgaaatggtctccactaagcagcaaaacaacacttcacaagagaggcagacagaacattcccccgaggatgccgcttgcgggcctggccacatttgctctgagcagaataccaatgaccgagaaaaaaatcatgggagcagtcctgagcaagtggtgcgcccaaaagtgcgcaagctgatcagtagcagccaggtggatcaggaaactggattcaacagacacgaggctaaacagcgttcagtgcagcgatggagggaggcccttgaagttgaggaaagtggcagcgatgacctgctgatcaaatgtgaggaatacgacggggaacatgattgtatgttcttagacccaccgtatagtcgcgttatcacccagagggagactgagaataatcagatgacttcggaatcaggtgccacagctggcagacaagaagtggataacactttctggaacggatgtggagattactaccagctgtacgataaggacgaagacagtagcgagtgctccgacggtgaatggtcagcatccctcccccaccgattcagcggtaccgaaaaggaccagtcttcttcggacgaaagctgggagacattgccaggcaaggacgagaacgagccagaattgcagtccgactctagcggacctgaagaggaaaatcaggaactctcgctgcaggagggggaacagacatccctcgaggagggagagattccctggctgcagtacaatgaggttaacgaatcttcttccgatgagggcaacgaacctgccaacgagtttgctcagccagcattcatgttagacgggaataataaccttgaggatgatagcagcgtgtcagaggacctggatgtggactggtcgctgttcgacgggttcgccgatggattgggtgtcgccgaggcaattagctacgtcgaccctcagttccttacgtacatggctctagaggagcgcctggcacaggcaatggagactgcgctggcacatctggaatctctagccgtggacgttgaggtcgcgaatcccccagcttcaaaagagagcatcgacggcctgcctgagaccctggtcctcgaagaccacactgcgatagggcaagaacagtgctgccccatttgctgttcagagtatattaaggatgacatagcgaccgagttgccttgtcaccattttttccacaagccctgcgtgagtatctggctgcagaagtccggaacctgtccggtttgtaggcgccatttcccacccgcagtgatcgaggcaagtgccgcacctagcagcgagcctgaccctgacgcgccaccgtctaatgactctatagcagaggccccatag

SEQ ID NO: 182418 - protein, 608 aa, Artificial Sequence
  derived and/or modified sequence
MAASKPVEAAVVAAAVPSSGSGVGGGGTAGPGTGGLPRWQLALAVGAPLLLGAGAIYLWSRQQRRREARGRGDASGLKRNSERKTPEGRASPAPGSGHPEGPGAHLDMNSLDRAQAAKNKGNKYFKAGKYEQAIQCYTEAISLCPTEKNVDLSTFYQNRAAAFEQLQKWKEVAQDCTKAVELNPKYVKALFRRAKAHEKLDNKKECLEDVTAVCILEGFQNQQSMLLADKVLKLLGKEKAKEKYKNREPLMPSPQFIKSYFSSFTDDIISQPMLKGEKSDEDKDKEGEALEVKENSGYLKAKQYMEEENYDKIISECSKEIDAEGKYMAEALLLRATFYLLIGNANAAKPDLDKVISLKEANVKLRANALIKRGSMYMQQQQPLLSTQDFNMAADIDPQNADVYHHRGQLKILLDQVEEAVADFDECIRLRPESALAQAQKCFALYRQAYTGNNSSQIQAAMKGFEEVIKKFPRCAEGYALYAQALTDQQQFGKADEMYDKCIDLEPDNATTYVHKGLLQLQWKQDLDRGLELISKAIEIDNKCDFAYETMGTIEVQRGNMEKAIDMFNKAINLAKSEMEMAHLYSLCDAAHAQTEVAKKYGLKPPTL

SEQ ID NO: 182419 - protein, 501 aa, Artificial Sequence
  derived and/or modified sequence
MNSLDRAQAAKNKGNKYFKAGKYEQAIQCYTEAISLCPTEKNVDLSTFYQNRAAAFEQLQKWKEVAQDCTKAVELNPKYVKALFRRAKAHEKLDNKKECLEDVTAVCILEGFQNQQSMLLADKVLKLLGKEKAKEKYKNREPLMPSPQFIKSYFSSFTDDIISQPMLKGEKSDEDKDKEGEALEVKENSGYLKAKQYMEEENYDKIISECSKEIDAEGKYMAEALLLRATFYLLIGNANAAKPDLDKVISLKEANVKLRANALIKRGSMYMQQQQPLLSTQDFNMAADIDPQNADVYHHRGQLKILLDQVEEAVADFDECIRLRPESALAQAQKCFALYRQAYTGNNSSQIQAAMKGFEEVIKKFPRCAEGYALYAQALTDQQQFGKADEMYDKCIDLEPDNATTYVHKGLLQLQWKQDLDRGLELISKAIEIDNKCDFAYETMGTIEVQRGNMEKAIDMFNKAINLAKSEMEMAHLYSLCDAAHAQTEVAKKYGLKPPTL

SEQ ID NO: 182420 - DNA, 1827 bp, Artificial Sequence
  derived and/or modified sequence
atggccgccagcaagcccgtggaggccgccgtggtggccgccgccgtgcccagcagcggcagcggcgtgggcggcggcggcaccgccggccccggcaccggcggcctgcccagatggcagctggccctggccgtgggcgcccccctgctgctgggcgccggcgccatctacctgtggagcagacagcagagaagaagagaggccagaggcagaggcgacgccagcggcctgaagagaaacagcgagagaaagacccccgagggcagagccagccccgcccccggcagcggccaccccgagggccccggcgcccacctggacatgaacagcctggacagagcccaggccgccaagaacaagggcaacaagtacttcaaggccggcaagtacgagcaggccatccagtgctacaccgaggccatcagcctgtgccccaccgagaagaacgtggacctgagcaccttctaccagaacagagccgccgccttcgagcagctgcagaagtggaaggaggtggcccaggactgcaccaaggccgtggagctgaaccccaagtacgtgaaggccctgttcagaagagccaaggcccacgagaagctggacaacaagaaggagtgcctggaggacgtgaccgccgtgtgcatcctggagggcttccagaaccagcagagcatgctgctggccgacaaggtgctgaagctgctgggcaaggagaaggccaaggagaagtacaagaacagagagcccctgatgcccagcccccagttcatcaagagctacttcagcagcttcaccgacgacatcatcagccagcccatgctgaagggcgagaagagcgacgaggacaaggacaaggagggcgaggccctggaggtgaaggagaacagcggctacctgaaggccaagcagtacatggaggaggagaactacgacaagatcatcagcgagtgcagcaaggagatcgacgccgagggcaagtacatggccgaggccctgctgctgagagccaccttctacctgctgatcggcaacgccaacgccgccaagcccgacctggacaaggtgatcagcctgaaggaggccaacgtgaagctgagagccaacgccctgatcaagagaggcagcatgtacatgcagcagcagcagcccctgctgagcacccaggacttcaacatggccgccgacatcgacccccagaacgccgacgtgtaccaccacagaggccagctgaagatcctgctggaccaggtggaggaggccgtggccgacttcgacgagtgcatcagactgagacccgagagcgccctggcccaggcccagaagtgcttcgccctgtacagacaggcctacaccggcaacaacagcagccagatccaggccgccatgaagggcttcgaggaggtgatcaagaagttccccagatgcgccgagggctacgccctgtacgcccaggccctgaccgaccagcagcagttcggcaaggccgacgagatgtacgacaagtgcatcgacctggagcccgacaacgccaccacctacgtgcacaagggcctgctgcagctgcagtggaagcaggacctggacagaggcctggagctgatcagcaaggccatcgagatcgacaacaagtgcgacttcgcctacgagaccatgggcaccatcgaggtgcagagaggcaacatggagaaggccatcgacatgttcaacaaggccatcaacctggccaagagcgagatggagatggcccacctgtacagcctgtgcgacgccgcccacgcccagaccgaggtggccaagaagtacggcctgaagccccccaccctgtag

SEQ ID NO: 182421 - DNA, 1506 bp, Artificial Sequence
  derived and/or modified sequence
atgaacagcctggacagagcccaggccgccaagaacaagggcaacaagtacttcaaggccggcaagtacgagcaggccatccagtgctacaccgaggccatcagcctgtgccccaccgagaagaacgtggacctgagcaccttctaccagaacagagccgccgccttcgagcagctgcagaagtggaaggaggtggcccaggactgcaccaaggccgtggagctgaaccccaagtacgtgaaggccctgttcagaagagccaaggcccacgagaagctggacaacaagaaggagtgcctggaggacgtgaccgccgtgtgcatcctggagggcttccagaaccagcagagcatgctgctggccgacaaggtgctgaagctgctgggcaaggagaaggccaaggagaagtacaagaacagagagcccctgatgcccagcccccagttcatcaagagctacttcagcagcttcaccgacgacatcatcagccagcccatgctgaagggcgagaagagcgacgaggacaaggacaaggagggcgaggccctggaggtgaaggagaacagcggctacctgaaggccaagcagtacatggaggaggagaactacgacaagatcatcagcgagtgcagcaaggagatcgacgccgagggcaagtacatggccgaggccctgctgctgagagccaccttctacctgctgatcggcaacgccaacgccgccaagcccgacctggacaaggtgatcagcctgaaggaggccaacgtgaagctgagagccaacgccctgatcaagagaggcagcatgtacatgcagcagcagcagcccctgctgagcacccaggacttcaacatggccgccgacatcgacccccagaacgccgacgtgtaccaccacagaggccagctgaagatcctgctggaccaggtggaggaggccgtggccgacttcgacgagtgcatcagactgagacccgagagcgccctggcccaggcccagaagtgcttcgccctgtacagacaggcctacaccggcaacaacagcagccagatccaggccgccatgaagggcttcgaggaggtgatcaagaagttccccagatgcgccgagggctacgccctgtacgcccaggccctgaccgaccagcagcagttcggcaaggccgacgagatgtacgacaagtgcatcgacctggagcccgacaacgccaccacctacgtgcacaagggcctgctgcagctgcagtggaagcaggacctggacagaggcctggagctgatcagcaaggccatcgagatcgacaacaagtgcgacttcgcctacgagaccatgggcaccatcgaggtgcagagaggcaacatggagaaggccatcgacatgttcaacaaggccatcaacctggccaagagcgagatggagatggcccacctgtacagcctgtgcgacgccgcccacgcccagaccgaggtggccaagaagtacggcctgaagccccccaccctgtag

SEQ ID NO: 182422 - DNA, 1827 bp, Artificial Sequence
  derived and/or modified sequence
atggctgcctctaaaccagtcgaagctgctgtagtggcagccgcggtcccgtcatccggctccggtgtgggcgggggcggcaccgccggaccaggaaccgggggcttgcccaggtggcagctggcattggctgttggcgctcccctgcttctcggagccggcgcaatctacttatggagccggcagcagcgtagacgagaggcccgcggccggggagacgcttctggattgaagaggaattcggaacggaagacacccgaagggagagccagccccgcaccgggttccggtcaccccgaaggccctggcgcccatctagatatgaatagccttgatcgagcgcaagctgccaagaacaaggggaacaaatacttcaaggctggcaagtacgaacaagcaatccaatgttacactgaagcaattagcctgtgtcctactgaaaagaatgtggatctttcaaccttttaccagaatcgcgccgcagctttcgagcagctgcagaaatggaaggaggttgcgcaagattgtaccaaggcggtggaactcaaccctaagtacgttaaggccctattcaggcgtgcgaaagctcatgagaagttggataacaaaaaggagtgcctcgaagacgtgaccgcggtgtgtattctcgaaggcttccaaaaccaacagagtatgctgctcgccgataaggtgctgaaactcctggggaaagaaaaggccaaggaaaagtacaaaaatagggagccattgatgccctccccacaattcatcaaatcctatttctcttcctttacagatgatattatctctcagcccatgttgaaaggtgaaaagtccgacgaagacaaggacaaggagggcgaggccttggaggtcaaggagaactccgggtatctaaaggctaaacagtatatggaggaggagaactacgacaaaattatctcggaatgctcgaaagagattgatgctgaggggaagtacatggctgaagcactgctgttgagggctacattctaccttctaattggcaatgccaatgcagcaaaacctgacctggacaaggtcatctcacttaaggaagctaatgtcaagctgagagcgaatgctctcatcaaacgcggtagtatgtacatgcagcagcagcaacccctgttatccacccaagatttcaatatggctgcagacattgaccctcagaatgcagacgtgtaccatcaccgagggcagttgaaaatccttcttgaccaggttgaagaagccgtagcggatttcgacgagtgcataaggctgaggcccgagtctgccctcgcccaggcccagaagtgcttcgctttatatcgccaggcctacacaggaaacaacagttcccagatccaagctgcaatgaaaggttttgaagaagtgattaagaaatttcctcgctgcgcagagggttatgccctgtatgcccaggctctcaccgaccagcagcagtttggaaaggctgacgagatgtatgataagtgcatcgatctcgaaccagataacgccacaacctacgtgcacaaaggcctcctgcagctgcagtggaaacaggatctggatcggggactggagctcatttccaaggctattgagatcgacaacaagtgcgatttcgcgtacgagacaatggggacaattgaagtgcagaggggcaacatggagaaggctatagacatgttcaataaagctatcaatctcgcaaaatctgagatggaaatggcacacctctacagcctgtgtgatgccgcccatgcccaaaccgaggtggccaagaagtacgggctgaagccgccgaccctatag

SEQ ID NO: 182423 - DNA, 1506 bp, Artificial Sequence
  derived and/or modified sequence
atgaactctctggacagggcccaggccgccaagaacaaaggcaacaagtattttaaggctggcaagtatgagcaagccatccagtgttacactgaggccatttcgctgtgtcccaccgagaaaaacgtggacctgagcacgttctaccagaatcgagcagccgcatttgagcagttgcagaagtggaaggaagtggcgcaggattgcactaaagcagtggaattgaatccgaagtacgtgaaggccctgttccgaagagccaaggcgcacgaaaaattagacaataaaaaagaatgtctggaggacgtgacagccgtctgcattttggagggatttcagaaccagcagagcatgctgctagccgacaaagttctgaagttgctcgggaaggaaaaagcaaaggagaagtataaaaatcgcgaaccactgatgccaagccctcaattcataaaatcctatttctcgtcttttactgatgatatcatctcccaacctatgttgaagggcgagaagagcgatgaggacaaagacaaagagggggaagcgctggaggtaaaagagaattctgggtatctcaaagccaaacagtatatggaggaggagaactacgacaagatcatttccgaatgttccaaggagatcgatgctgaaggtaagtacatggcagaggctcttctgctgcgagccacattctatcttcttattggcaacgcgaatgccgcgaagccggacttggataaggtcattagcttgaaagaggctaacgtaaagctccgcgctaacgcgctgataaaaaggggatctatgtacatgcagcagcagcagccactgctgtccacccaagactttaacatggccgcggacattgaccctcagaacgctgacgtgtatcatcatcggggccagttaaaaatcttacttgatcaggtagaagaggccgtggcagactttgatgaatgtattcgactgagaccagagagcgccctcgcccaagcccagaaatgcttcgccctgtacagacaggcttacaccggcaacaacagctcccagatccaggccgccatgaagggattcgaagaagtgattaagaagttccctaggtgtgctgaaggctatgccttgtacgcacaggccctcaccgatcaacagcagtttgggaaggccgatgagatgtacgacaaatgtattgaccttgagcccgacaatgccacaacttatgtgcacaagggcttgttgcagcttcagtggaaacaggacctcgatcgtggacttgagctgatttccaaagccattgagatcgacaataagtgtgacttcgcctatgagactatggggacgatcgaagtccagcgcggtaacatggaaaaggctatcgacatgttcaataaagccatcaatctcgcgaaaagcgagatggagatggcccacttgtattccctgtgcgacgctgctcacgcgcagacggaggttgctaaaaaatacggcttgaagccccccaccctctag

SEQ ID NO: 182424 - DNA, 1827 bp, Artificial Sequence
  derived and/or modified sequence
atggccgccagcaagcctgtggaggccgctgtggtggccgctgctgtgcccagcagcggcagcggcgtgggcggcggcggcacagctggccctggcactggaggcctgccccgctggcagctggccctggccgtgggcgcccccctgctgctgggcgctggggccatctacctgtggagccggcagcagaggagaagagaggcccggggcagaggagatgccagcggcctgaagagaaattctgagaggaagaccccagagggccgggccagccctgcccctggcagcggccaccctgagggccctggggcccacctggacatgaacagcctggaccgggcccaggccgccaagaacaagggcaacaagtacttcaaggccggcaagtatgagcaggccatccagtgctacacagaggccatcagcctgtgccccacagagaagaatgtggacctgagcaccttctaccagaacagagctgctgcctttgagcagctgcagaagtggaaggaggtggcccaggactgcaccaaggctgtggagctgaaccccaagtatgtgaaggccctcttccggcgggccaaggcccacgagaagctggacaacaagaaggaatgtctggaggatgtgacagctgtgtgcatcctggagggcttccagaaccagcagagcatgctgctggccgacaaggtgctgaagctgctgggcaaggagaaggccaaggagaagtacaagaaccgggagcccctgatgcccagcccccagttcatcaagagctacttcagcagcttcacagatgacatcatcagccagcccatgctgaagggggagaagagtgatgaggacaaggacaaggagggggaggccctggaggtgaaggagaacagcggctacctgaaggccaagcagtacatggaggaggagaactatgacaagatcatcagcgagtgcagcaaggagattgatgctgagggcaagtacatggccgaggccctgctgctgcgggccaccttctacctgctgattggaaatgccaatgctgccaagccagacctggacaaggtgatcagcctgaaggaggccaacgtgaagctgcgggccaatgccctgatcaagaggggctccatgtacatgcagcagcagcagcccctgctgagcacccaggacttcaacatggctgctgacatcgacccccagaatgctgatgtgtaccaccaccggggccagctgaagatcctgctggaccaggtggaggaggccgtggccgactttgatgagtgcatccggctgcggcctgagagcgccctggcccaggcccagaagtgctttgccctgtaccggcaggcctacacaggcaacaacagcagccagatccaggccgccatgaagggctttgaggaggtgatcaagaagttcccccgctgtgccgagggctacgccctgtatgcccaggccctgacagaccagcagcagtttgggaaggcagatgagatgtatgacaagtgcatcgacctggagccagacaatgccaccacctacgtgcacaagggcctgctgcagctgcagtggaagcaggacctggaccggggcctggagctgatcagcaaggccatcgagattgacaacaagtgtgactttgcctatgagaccatgggcaccatcgaggtgcagaggggcaacatggagaaggccatcgacatgttcaacaaggccatcaacctggccaagtctgagatggagatggcccacctgtacagcctgtgtgatgctgcccacgcccagacagaggtggccaagaagtatggcctgaagccacccaccctgtag

SEQ ID NO: 182425 - DNA, 1506 bp, Artificial Sequence
  derived and/or modified sequence
atgaacagcctggaccgggcccaggccgccaagaacaagggcaacaagtacttcaaggccggcaagtatgagcaggccatccagtgctacacagaggccatcagcctgtgccccacagagaagaatgtggacctgagcaccttctaccagaacagagctgctgcctttgagcagctgcagaagtggaaggaggtggcccaggactgcaccaaggctgtggagctgaaccccaagtatgtgaaggccctcttcagaagagccaaggcccacgagaagctggacaacaagaaggagtgcctggaggatgtgacagctgtgtgcatcctggagggcttccagaaccagcagagcatgctgctggccgacaaggtgctgaagctgctgggcaaggagaaggccaaggagaagtacaagaaccgggagcccctgatgcccagcccccagttcatcaagagctacttcagcagcttcacagatgacatcatcagccagcccatgctgaagggggagaagagtgatgaggacaaggacaaggagggggaggccctggaggtgaaggaaaattctggctacctgaaggccaagcagtacatggaggaggagaactatgacaagatcatcagtgaatgttccaaggagattgatgctgagggcaagtacatggccgaggccctgctgctgcgggccaccttctacctgctgattggaaatgccaatgctgccaagccagacctggacaaggtgatcagcctgaaggaggccaacgtgaagctgcgggccaatgccctgatcaagaggggctccatgtacatgcagcagcagcagcccctgctgagcacccaggacttcaacatggctgctgacatcgacccccagaatgctgatgtgtaccaccaccggggccagctgaagatcctgctggaccaggtggaggaggccgtggccgactttgatgagtgcatccggctgcggcctgagagcgccctggcccaggcccagaagtgctttgccctgtaccggcaggcctacacaggcaacaacagcagccagatccaggccgccatgaagggctttgaggaggtgatcaagaagttcccccgctgtgccgagggctacgccctgtatgcccaggccctgacagaccagcagcagtttgggaaggcagatgagatgtatgacaagtgcatcgacctggagccagacaatgccaccacctacgtgcacaagggcctgctgcagctgcagtggaagcaggacctggaccggggcctggagctgatcagcaaggccattgaaattgacaacaagtgtgactttgcctatgagaccatgggcaccatcgaggtgcagaggggcaacatggagaaggccatcgacatgttcaacaaggccatcaacctggccaagtctgagatggagatggcccacctgtacagcctgtgtgatgctgcccacgcccagacagaggtggccaagaagtatggcctgaagccacccaccctgtag

SEQ ID NO: 182426 - DNA, 1827 bp, Artificial Sequence
  derived and/or modified sequence
atggccgccagcaagcccgtggaggccgccgtggtggccgccgccgtcccctcctctggcagcggcgtgggtggcggtgggacggccggaccaggtacaggcggcctcccccgctggcagctagccctggcagtaggcgcaccgctgctgctcggcgccggcgccatctatctgtggtcacgccagcagagacggcgggaagcacgggggaggggcgacgccagcggactgaaacgaaattcggagcgcaagactccagagggtcgggcaagtcccgcccctggctctggacaccctgaggggcccggtgcccatctggacatgaactcactcgaccgagctcaggctgctaagaataaaggaaacaaatacttcaaagccggtaagtacgagcaggcaattcagtgttataccgaggcgatcagcttgtgccccactgagaagaatgttgacctgtcgacattttaccagaaccgggcagctgcttttgaacaactgcaaaaatggaaggaagttgcacaggactgcacaaaagccgtggaactgaatcctaagtacgtcaaagctctgttccgcagagccaaagcgcacgaaaagttggataacaaaaaagagtgtctcgaagatgtgaccgcagtgtgtattctcgagggtttccagaatcaacagtccatgctgttggctgacaaggtgctgaagctcctcgggaaagagaaagccaaggagaaatacaaaaaccgggaaccattaatgccgtcgcctcagttcatcaagtcttatttcagcagttttactgacgatatcatctctcaacctatgctgaagggcgagaaatccgatgaggataaagacaaggagggagaagcactggaggtgaaggaaaattctgggtaccttaaggccaagcagtacatggaggaagagaactatgacaagattattagcgagtgctcaaaagagatcgatgccgagggcaaatatatggcggaagcactgcttctgagagctaccttctatctgctgatcgggaatgcgaacgccgctaaaccagatctcgacaaggtcatttccctcaaagaggccaatgtgaagctccgggccaatgcactgatcaagcgcgggtccatgtacatgcaacagcagcagcccctgctttcaacccaggactttaacatggctgcggatatcgatccacaaaacgccgatgtgtaccatcatagaggacaacttaaaatacttctcgatcaggtcgaagaggccgtcgccgactttgatgagtgtatccgattgaggcccgagagtgcattggctcaagctcaaaagtgtttcgccttatacagacaggcatacacaggcaataatagcagtcaaattcaggcagcgatgaaggggttcgaggaggtaattaagaaatttcctcgatgcgccgaggggtatgccctgtatgcccaggccctgactgaccagcagcagtttggcaaggcggatgagatgtatgataagtgcatagacctagaacccgacaatgccactacgtacgtgcataagggtttgctgcaacttcaatggaaacaggatctagaccggggcctggagctcatctcgaaagcaatagagattgataataaatgcgattttgcgtacgagactatgggcaccattgaggtccaacggggcaatatggaaaaagctattgacatgttcaacaaggctattaatcttgcgaagagtgaaatggaaatggcacacctttactcactgtgtgacgccgcccatgcccagacggaggtagccaaaaaatacggtctgaaacctcctaccctctag

SEQ ID NO: 182427 - DNA, 1506 bp, Artificial Sequence
  derived and/or modified sequence
atgaacagcctggaccgggcccaggccgccaagaacaagggcaacaaatacttcaaggccggcaagtacgaacaggctattcagtgttacaccgaagcgatctccctgtgtcccacagaaaaaaacgtggatctaagcactttctaccagaatcgtgctgccgcatttgagcagctccagaagtggaaggaagttgctcaggattgcaccaaggctgtggagctcaacccaaaatacgtcaaagctctttttcggcgcgcgaaagcacacgagaagttagacaataagaaagaatgcctggaagatgtaaccgctgtctgcatcttagaaggctttcagaaccaacagagtatgttgttggcagacaaagtactcaaactcctaggcaaagagaaggccaaggaaaagtataaaaatcgggagcccctcatgccaagcccccagttcataaagagctacttctcaagctttactgatgacataatttctcagcccatgctgaagggcgagaaaagtgatgaggacaaagacaaagagggagaggcattagaggttaaggaaaacagtgggtacttaaaagcgaagcagtacatggaagaggaaaactacgataaaatcatcagcgaatgctccaaagagatcgatgcggagggaaagtatatggccgaggccctgctgctcagggctacattctatctgctaatcggcaatgccaatgccgccaagcccgacctggataaagtcatatccctgaaagaggccaacgtgaagctgcgcgccaatgccctcatcaaacggggttctatgtacatgcagcaacaacagcccttgttaagtacacaggatttcaatatggccgccgatatagacccacaaaatgccgacgtgtaccaccacagggggcaacttaagatattgctcgatcaggtggaggaagctgtcgccgattttgatgagtgcatccgcttacggccagagagtgctctagcacaggcccaaaagtgtttcgccttgtaccgccaggcttacaccggcaacaactctagtcagatccaagcagccatgaagggatttgaggaggtcattaagaagttcccccgctgtgctgaagggtatgcactgtatgcacaggccctaactgaccagcagcagtttggcaaggccgatgagatgtatgacaagtgcatcgacttggaaccagataacgccaccacctacgtccacaaagggctgctgcagctgcagtggaaacaggatctcgataggggacttgagctgatcagcaaggccattgaaatagacaacaaatgtgatttcgcctatgagaccatggggactattgaggtgcagagagggaacatggaaaaggcaatcgatatgttcaacaaagcaataaaccttgccaagtctgaaatggagatggcccacctgtacagtctgtgtgatgccgctcatgctcagactgaggtggcaaaaaagtacggactgaagcccccgaccctgtag

SEQ ID NO: 182428 - DNA, 1827 bp, Artificial Sequence
  derived and/or modified sequence
atggccgctagtaagccagtcgaggccgcagtggtggccgctgcggttcccagttctggatcaggcgtcggtggcggaggtaccgctggacctggtaccggcggacttccaaggtggcagctggctctggccgtgggtgcccctctcctgctcggcgctggtgcgatctacctttggagccgtcaacagagaaggcgagaagcacggggacggggtgatgcctctggactgaagagaaattccgaaagaaagacccccgagggacgcgctagcccggcaccaggcagtggacatcccgaaggtcctggcgcacacctcgacatgaacagtctcgatcgcgctcaggcagctaaaaataaagggaataagtatttcaaggccggaaagtacgaacaggcgatccagtgttacacagaagccatttctctttgccctacagagaagaacgttgatctctccactttttatcagaacagggccgcagccttcgaacagctgcagaaatggaaagaagtggcccaggattgtacaaaagctgtggaattgaatcctaaatatgttaaggccctttttcgtcgcgcaaaggcccatgagaaactcgacaataagaaggaatgcttggaggatgttaccgctgtttgtattcttgaaggattccagaaccaacagtccatgctgctcgccgataaagttctcaaactactcggcaaagaaaaagccaaggagaaatataagaacagagagcccctaatgcccagtccgcagttcatcaagagttactttagctctttcaccgacgacatcatcagtcagcctatgctcaagggggagaaaagcgatgaggacaaggataaggagggagaggccctggaggtgaaggagaactctgggtacctgaaagctaagcagtacatggaggaggaaaactatgacaagatcatcagcgagtgttccaaagaaattgacgcggaaggtaagtatatggcggaagctcttctcctccgagccaccttctatctcttgatagggaatgctaacgccgcaaagccagacctggacaaggtcataagcctgaaagaggctaatgtgaagctcagggcgaatgccctgattaagcgcggtagcatgtacatgcagcagcaacagcctctactctctacacaggatttcaatatggctgcagatatcgatccgcaaaatgccgacgtctaccaccatcgaggccaacttaagattctgcttgaccaagtggaggaggcggtggccgacttcgacgaatgcattagactgcggccagagtcggccctagcacaggctcaaaaatgctttgccttgtaccgccaggcatacacagggaataatagctcccagatccaggctgcaatgaaggggtttgaggaagtcatcaagaagtttcccaggtgcgccgagggatacgctctgtacgctcaggcgctcacagaccagcagcagttcggaaaagccgacgagatgtacgataaatgcatcgacctggagccagacaacgccacaacatacgttcataaagggctgctgcagttgcagtggaagcaggacctggaccggggattggagctgatctctaaagcaattgagattgataataagtgtgactttgcatacgaaacaatgggcaccattgaagttcaaagggggaatatggaaaaagccatcgacatgttcaacaaggccattaaccttgccaagtctgagatggagatggctcatctgtattctctatgtgacgctgcgcacgcccaaactgaagttgccaagaagtatggtttaaagcctccaacattatag

SEQ ID NO: 182429 - DNA, 1506 bp, Artificial Sequence
  derived and/or modified sequence
atgaacagcctagatagggcacaggcagccaagaacaaaggaaacaaatatttcaaggccggtaaatatgagcaggccatacaatgctataccgaagctatttcactctgcccaaccgaaaagaatgtggacctaagcacgttttaccaaaatcgcgcagcagctttcgaacagcttcagaaatggaaggaggttgcccaagactgcactaaagctgtggaactgaatccaaaatatgtaaaagcactgttccgtcgggcaaaggcacatgagaaactcgataataagaaagaatgcttagaagacgtgaccgccgtatgtatcctcgaagggttccagaaccaacagtccatgctgctggctgacaaggtgctcaagttgctgggtaaggagaaggccaaagagaagtacaaaaatagggagcctttaatgccatcaccccaatttattaagtcatatttcagttccttcactgacgacatcattagccagcctatgctgaagggagagaaatcggacgaagacaaggacaaggaaggggaagcactggaagttaaggagaactcaggatatttgaaggcaaaacagtatatggaggaggagaactatgataaaataatctcggaatgctccaaagaaattgacgctgagggcaagtatatggccgaggctctgcttctccgcgcaactttttatcttctgatcggcaatgccaacgccgctaagcctgatcttgataaggtgatctccttgaaagaggccaacgtgaaattacgcgctaacgccctgatcaaaagaggttctatgtacatgcaacaacagcagccccttctatctactcaggacttcaacatggccgctgatatcgacccgcagaatgccgatgtgtatcatcacaggggacagctcaaaatcttactggatcaggtcgaggaagccgttgctgacttcgatgaatgcatccgtctgcgcccagagtccgcgctggcccaggcacagaaatgcttcgccttataccgccaggcctacaccggtaacaactcttcacagatccaggcggctatgaaggggttcgaagaggtgataaaaaagttccctcggtgtgccgagggatacgcactctatgcgcaggccctgacagatcagcagcagttcggaaaagccgatgagatgtacgacaaatgtatcgacctcgagcccgacaacgcaactacatatgtgcacaagggactcctgcagcttcaatggaaacaggacttagataggggcttagaattgatctcaaaagccatcgagattgataacaagtgcgatttcgcttatgaaacaatgggtaccattgaagtgcagcggggaaacatggagaaagccattgacatgttcaataaggccattaatctggccaaaagcgaaatggaaatggcccacctgtactcactgtgcgatgccgctcacgcccaaaccgaagttgccaaaaaatacggcctgaaacccccaactctttag

SEQ ID NO: 182430 - DNA, 4409 bp, Artificial Sequence
  derived and/or modified sequence
cttgagcgcccttagcccgctgtatacgcgcccctcctcggcttcagtaggcaagagggccatctgcccttctttcctgaaggtagaggggacaacaccagctacgacggggactccagaagtccatctcccgaacagcagcggggcgaaaagaaagaaaaagggtttccgaagactcctactcacacccacgctttcccttaacccggaagtgatttccgcccctcctctccctcttcggttgatactggaggagaaggacggccaggtctggcccggcatgccctgggcttccggtgacctctggcccttttctgtcgtccgctctctctgcctagcgtgctcgctcgctcattgctttccttccctccctcggtcttccttcgcacgctgtttggtgattgtggcgctcgcgacagacagggaggcggtggcagaggacacttgtcatggccgcctctaaacctgtggaggcagcggtggtcgcagccgctgtaccgagctccgggagtggggtgggcggcggcgggactgcgggcccgggcacgggggggctgccgcgatggcagctggctctggcggtcggggcacccctgctgctgggcgcgggtgccatatacctgtggagtcggcagcaacggcgccgggaggccagaggccggggcgacgccagcggcctgaagcgcaacagcgaacggaagaccccggagggcagggccagtccggccccgggcagcggacaccctgaaggtcccggtgctcacttggacatgaactctcttgatagagcccaagcagccaagaataaaggcaataaatattttaaagcaggaaaatatgaacaagctattcagtgctatactgaggctattagcttgtgccctacagagaagaatgttgacctttctacattttatcaaaacagagctgctgcctttgaacagttgcaaaaatggaaagaagtggcacaagactgtacaaaagctgttgaacttaatcccaaatatgtgaaagctctctttagacgtgcaaaagcccatgagaagctagacaataagaaggaatgtttagaagatgtcactgctgtgtgtatattagaagggttccaaaatcaacaaagcatgctgttagccgataaagttcttaaactccttggaaaagagaaagccaaagaaaaatataagaatcgtgaacctctgatgccatctccacagtttatcaaatcttacttcagttctttcacggatgatatcatttcccagcccatgcttaaaggagagaaatctgatgaagataaagacaaggaaggggaggctttagaagtgaaagaaaattctggatacttaaaggccaaacagtatatggaagaagaaaactacgataaaatcataagtgaatgctcaaaagaaatagatgctgaaggcaaatacatggcagaagcattgctactacgagctaccttctacctgcttattggcaatgccaatgcagccaaaccagatttagataaagtcatcagtttgaaagaagctaatgtgaagcttcgagcaaatgctctcatcaaaagaggcagcatgtacatgcaacagcagcagcctttgctgtccactcaagattttaacatggctgctgacatcgatcctcagaatgcagatgtttatcaccaccgaggacagctgaaaatactccttgatcaagttgaagaagcagtggcagattttgatgaatgtattaggttaagacctgagtctgctctggcacaagcacagaaatgttttgcattgtaccgccaggcatatacgggaaacaactcttcacaaatccaagcagctatgaaaggttttgaagaggtcataaagaaatttccaaggtgtgccgaaggctatgcactatacgcccaggcattaacagatcaacaacagtttggtaaagctgatgaaatgtatgataaatgtattgatttggaaccagataatgctacaacatatgttcataaaggtttacttcaacttcagtggaagcaagatctggatagaggtttggaacttatcagcaaggctattgaaattgacaataaatgtgattttgcctatgaaaccatgggaactattgaagtacaaagaggaaacatggagaaagccattgacatgttcaacaaagctattaacctggccaaatcggaaatggagatggcccatctgtattcactttgcgatgccgcccatgcccagacagaagttgcaaagaaatacggattaaaaccaccaacattataaaacagggggaaagcagactgaccctctttttaaaagtttaccccctcttcaactgaaccctaaagacactgtcatgaactgtgttgaatggtggaaatcagtatttctgtttgtggtgttgttatttgttacatctgtttcatgtctaggtgttgtgggtgtggctgttgaaggaagtttgcagtcttgcagcttttattccctgtgcaacaaaagattagaacatgttaaagggatttttaaataaagttgcaaagagtacaaatgataattggccatgcaaataaaaactgatttgttgattttttttttaaggggggttggcagttgattatgttctggatgattccgtctatatatgtgtgaataatgtaagtattttacagcatgttgatttttaaattaacgtagtaaatgctgtaaaatagatttatattcagttaaccgctttcagttgattttttgaaagaaacaaaggttaaatgggggattaaagtaaaattgagagaccctttaaaccattgtcagcatgcacaatgcctctgattctgcagttttagaaacttggtggcacttattaatcctcttggcccctttccactctaatggatagtgtacattcttcttaaagtccacaacagcagattttcttgcagtaaattatgcagatgcaaaatattctaattgatatatgtgttggaagactgagtattgatgggggagtggaccagacaaagaggtaagatgaaacagtagtgtgtttataattgtctgtgactattttctataataattagtactatttaatggtgagcttttaaaaatgtaggatagagggtacagtggcactgtatatactatttatagtctcagctactagggaggctgaggcaagaggcttgagaccaggagctcgaggctgtaatgtgccatgatgattgcacctgcgaatagccactgcactccagcctgggcaatatagcaagaccccatcctttaaaaaattttagaacttttttaaaatcaaagtgcagattgcttgtatgtaaaacccaaataaaggtagagtaagtgtgatatatgggagtattaaaatagcttaaaatttctcgtgaaggacatgtggctaaagggtcaaaaaggatgtaagacttggagccagagcatagtatttcctgaaataacaagtttagtgctttaactatggctacatgtgcttaaggaattttgagccacttatttttgaagatgctgaggacatgtagagtgctttttgtagtgagctaaccttgatctctaaggactaactacccaggtccaggtcttcactaggggtactgacagtgtttaagctttactccacctccttacttagaaatcactttacgatttatttccattttccacttttatagaccatccttttgcttatatgctagatttttctggtgagggaagggttgtgttcttcaggggtcttttgttttgaaatactcaggatggggagaggtttatttaagaacgaattataattatggtttacactgttgggagtaaaggagcatttttacaccccttaagggtgcttaattctgttgaaaccaaaaagatttgtctacaaatgctatcttttttagaaactattagaaatgactccctttcaaagtcaatctttggaaaatattgaggaggtcactaattagttggtgcagttaatataattcaagatgatttggatgatgggaagtttgagaccgctgcattttgtttttaaattatgcaccttctgataacccccaaatacagaaatgttctacatctctgaatgacctctgactttaaaaaagtttttatttgcatggctgtatttacattaacactgacattttcttctactcttctcccttctttcatcttggggttgggtagagaaacacaaaggaaactgaagcatgtgccattctatactgtcattccaaattctcatggactattgcctgttgtgaaaatgtttgaaactgcactgaaagctgcatctgtctgtatctttcttttgtaaatgacctcacatgtaaattcaccaaataaatattacattcaagctcttctatctattctttaaatagaaagata

SEQ ID NO: 182431 - DNA, 1990 bp, Artificial Sequence
  derived and/or modified sequence
attccagtgctgtgccgctgctttttcttccactcggatctcttgagcgcccttagcccgctgtatacgcgcccctcctcggcttcagtaggcaagagggccatctgcccttctttcctgaaggtagaggggacaacaccagctacgacggggactccagaagtccatctcccgaacagcagcggggcgaaaagaaagaaaaagggtttccgaagactcctactcacacccacgctttcccttaacccggaagtgatttccgcccctcctctccctcttcggttgatactgaaggtcccggtgctcacttggacatgaactctcttgatagagcccaagcagccaagaataaaggcaataaatattttaaagcaggaaaatatgaacaagctattcagtgctatactgaggctattagcttgtgccctacagagaagaatgttgacctttctacattttatcaaaacagagctgctgcctttgaacagttgcaaaaatggaaagaagtggcacaagactgtacaaaagctgttgaacttaatcccaaatatgtgaaagctctctttagacgtgcaaaagcccatgagaagctagacaataagaaggaatgtttagaagatgtcactgctgtgtgtatattagaagggttccaaaatcaacaaagcatgctgttagccgataaagttcttaaactccttggaaaagagaaagccaaagaaaaatataagaatcgtgaacctctgatgccatctccacagtttatcaaatcttacttcagttctttcacggatgatatcatttcccagcccatgcttaaaggagagaaatctgatgaagataaagacaaggaaggggaggctttagaagtgaaagaaaattctggatacttaaaggccaaacagtatatggaagaagaaaactacgataaaatcataagtgaatgctcaaaagaaatagatgctgaaggcaaatacatggcagaagcattgctactacgagctaccttctacctgcttattggcaatgccaatgcagccaaaccagatttagataaagtcatcagtttgaaagaagctaatgtgaagcttcgagcaaatgctctcatcaaaagaggcagcatgtacatgcaacagcagcagcctttgctgtccactcaagattttaacatggctgctgacatcgatcctcagaatgcagatgtttatcaccaccgaggacagctgaaaatactccttgatcaagttgaagaagcagtggcagattttgatgaatgtattaggttaagacctgagtctgctctggcacaagcacagaaatgttttgcattgtaccgccaggcatatacgggaaacaactcttcacaaatccaagcagctatgaaaggttttgaagaggtcataaagaaatttccaaggtgtgccgaaggctatgcactatacgcccaggcattaacagatcaacaacagtttggtaaagctgatgaaatgtatgataaatgtattgatttggaaccagataatgctacaacatatgttcataaaggtttacttcaacttcagtggaagcaagatctggatagaggtttggaacttatcagcaaggctattgaaattgacaataaatgtgattttgcctatgaaaccatgggaactattgaagtacaaagaggaaacatggagaaagccattgacatgttcaacaaagctattaacctggccaaatcggaaatggagatggcccatctgtattcactttgcgatgccgcccatgcccagacagaagttgcaaagaaatacggattaaaaccaccaacattataaaacagggggaaagcagactgaccctctttttaaaagtttaccccctcttcaactgaaccctaaagacactgtcatgaactgtgttgaatggtggaaatcagtatttctgtttgtggtgttgttatttgttacatctgtttcatgtctaggtgttgtgggtgtggctgttg

SEQ ID NO: 182432 - protein, 2134 aa, Artificial Sequence
  derived and/or modified sequence
MSGGAAEKQSSTPGSLFLSPPAPAPKNGSSSDSSVGEKLGAAAADAVTGRTEEYRRRRHTMDKDSRGAAATTTTTEHRFFRRSVICDSNATALELPGLPLSLPQPSIPAAVPQSAPPEPHREETVTATATSQVAQQPPAAAAPGEQAVAGPAPSTVPSSTSKDRPVSQPSLVGSKEEPPPARSGSGGGSAKEPQEERSQQQDDIEELETKAVGMSNDGRFLKFDIEIGRGSFKTVYKGLDTETTVEVAWCELQDRKLTKSERQRFKEEAEMLKGLQHPNIVRFYDSWESTVKGKKCIVLVTELMTSGTLKTYLKRFKVMKIKVLRSWCRQILKGLQFLHTRTPPIIHRDLKCDNIFITGPTGSVKIGDLGLATLKRASFAKSVIGTPEFMAPEMYEEKYDESVDVYAFGMCMLEMATSEYPYSECQNAAQIYRRVTSGVKPASFDKVAIPEVKEIIEGCIRQNKDERYSIKDLLNHAFFQEETGVRVELAEEDDGEKIAIKLWLRIEDIKKLKGKYKDNEAIEFSFDLERDVPEDVAQEMVESGYVCEGDHKTMAKAIKDRVSLIKRKREQRQLVREEQEKKKQEESSLKQQVEQSSASQTGIKQLPSASTGIPTASTTSASVSTQVEPEEPEADQHQQLQYQQPSISVLSDGTVDSGQGSSVFTESRVSSQQTVSYGSQHEQAHSTGTVPGHIPSTVQAQSQPHGVYPPSSVAQGQSQGQPSSSSLTGVSSSQPIQHPQQQGIQQTAPPQQTVQYSLSQTSTSSEATTAQPVSQPQAPQVLPQVSAGKQSTQGVSQVAPAEPVAVAQTQATQPTTLASSVDSAHSDVASGMSDGNENVPSSSGRHEGRTTKRHYRKSVRSRSRHEKTSRPKLRILNVSNKGDRVVECQLETHNRKMVTFKFDLDGDNPEEIATIMVNNDFILAIERESFVDQVREIIEKADEMLSEDVSVEPEGDQGLESLQGKDDYGFSGSQKLEGEFKQPIPASSMPQQIGIPTSSLTQVVHSAGRRFIVSPVPESRLRESKVFPSEITDTVAASTAQSPGMNLSHSASSLSLQQAFSELRRAQMTEGPNTAPPNFSHTGPTFPVVPPFLSSIAGVPTTAAATAPVPATSSPPNDISTSVIQSEVTVPTEEGIAGVATSTGVVTSGGLPIPPVSESPVLSSVVSSITIPAVVSISTTSPSLQVPTSTSEIVVSSTALYPSVTVSATSASAGGSTATPGPKPPAVVSQQAAGSTTVGATLTSVSTTTSFPSTASQLCIQLSSSTSTPTLAETVVVSAHSLDKTSHSSTTGLAFSLSAPSSSSSPGAGVSSYISQPGGLHPLVIPSVIASTPILPQAAGPTSTPLLPQVPSIPPLVQPVANVPAVQQTLIHSQPQPALLPNQPHTHCPEVDSDTQPKAPGIDDIKTLEEKLRSLFSEHSSSGAQHASVSLETSLVIESTVTPGIPTTAVAPSKLLTSTTSTCLPPTNLPLGTVALPVTPVVTPGQVSTPVSTTTSGVKPGTAPSKPPLTKAPVLPVGTELPAGTLPSEQLPPFPGPSLTQSQQPLEDLDAQLRRTLSPEMITVTSAVGPVSMAAPTAITEAGTQPQKVSQVKEGPVLATSSGAGVFKMGRFQVSVAADGAQKEGKNKSEDAKSVHFESSTSESSVLSSSSPESTLVKPEPNGITIPGISSDVPESAHKTTASEAKSDTGQPTKVGRFQVTTTANKVGRFSVSKTEDKITDTKKEGPVASPPFMDLEQAVLPAVIPKKEKPELSEPSHLNGPSSDPEAAFLSRDVDDGSGSPHSPHQLSSKSLPSQNLSQSLSNSFNSSYMSSDNESDIEDEDLKLELRRLRDKHLKEIQDLQSRQKHEIESLYTKLGKVPPAVIIPPAAPLSGRRRRPTKSKGSKSSRSSSLGNKSPQLSGNLSGQSAASVLHPQQTLHPPGNIPESGQNQLLQPLKPSPSSDNLYSAFTSDGAISVPSLSAPGQGTSSTNTVGATVNSQAAQAQPPAMTSSRKGTFTDDLHKLVDNWARDAMNLSGRRGSKGHMNYEGPGMARKFSAPGQLCISMTSNLGGSAPISAASATSLGHFTKSMCPPQQYGFPATPFGAQWSGTGGPAPQPLGQFQPVGTASLQNFNISNLQKSISNPPGSNLRTT

SEQ ID NO: 182433 - DNA, 6405 bp, Artificial Sequence
  derived and/or modified sequence
atgagcggcggcgccgccgagaagcagagcagcacccccggcagcctgttcctgagcccccccgcccccgcccccaagaacggcagcagcagcgacagcagcgtgggcgagaagctgggcgccgccgccgccgacgccgtgaccggcagaaccgaggagtacagaagaagaagacacaccatggacaaggacagcagaggcgccgccgccaccaccaccaccaccgagcacagattcttcagaagaagcgtgatctgcgacagcaacgccaccgccctggagctgcccggcctgcccctgagcctgccccagcccagcatccccgccgccgtgccccagagcgccccccccgagccccacagagaggagaccgtgaccgccaccgccaccagccaggtggcccagcagccccccgccgccgccgcccccggcgagcaggccgtggccggccccgcccccagcaccgtgcccagcagcaccagcaaggacagacccgtgagccagcccagcctggtgggcagcaaggaggagcccccccccgccagaagcggcagcggcggcggcagcgccaaggagccccaggaggagagaagccagcagcaggacgacatcgaggagctggagaccaaggccgtgggcatgagcaacgacggcagattcctgaagttcgacatcgagatcggcagaggcagcttcaagaccgtgtacaagggcctggacaccgagaccaccgtggaggtggcctggtgcgagctgcaggacagaaagctgaccaagagcgagagacagagattcaaggaggaggccgagatgctgaagggcctgcagcaccccaacatcgtgagattctacgacagctgggagagcaccgtgaagggcaagaagtgcatcgtgctggtgaccgagctgatgaccagcggcaccctgaagacctacctgaagagattcaaggtgatgaagatcaaggtgctgagaagctggtgcagacagatcctgaagggcctgcagttcctgcacaccagaaccccccccatcatccacagagacctgaagtgcgacaacatcttcatcaccggccccaccggcagcgtgaagatcggcgacctgggcctggccaccctgaagagagccagcttcgccaagagcgtgatcggcacccccgagttcatggcccccgagatgtacgaggagaagtacgacgagagcgtggacgtgtacgccttcggcatgtgcatgctggagatggccaccagcgagtacccctacagcgagtgccagaacgccgcccagatctacagaagagtgaccagcggcgtgaagcccgccagcttcgacaaggtggccatccccgaggtgaaggagatcatcgagggctgcatcagacagaacaaggacgagagatacagcatcaaggacctgctgaaccacgccttcttccaggaggagaccggcgtgagagtggagctggccgaggaggacgacggcgagaagatcgccatcaagctgtggctgagaatcgaggacatcaagaagctgaagggcaagtacaaggacaacgaggccatcgagttcagcttcgacctggagagagacgtgcccgaggacgtggcccaggagatggtggagagcggctacgtgtgcgagggcgaccacaagaccatggccaaggccatcaaggacagagtgagcctgatcaagagaaagagagagcagagacagctggtgagagaggagcaggagaagaagaagcaggaggagagcagcctgaagcagcaggtggagcagagcagcgccagccagaccggcatcaagcagctgcccagcgccagcaccggcatccccaccgccagcaccaccagcgccagcgtgagcacccaggtggagcccgaggagcccgaggccgaccagcaccagcagctgcagtaccagcagcccagcatcagcgtgctgagcgacggcaccgtggacagcggccagggcagcagcgtgttcaccgagagcagagtgagcagccagcagaccgtgagctacggcagccagcacgagcaggcccacagcaccggcaccgtgcccggccacatccccagcaccgtgcaggcccagagccagccccacggcgtgtacccccccagcagcgtggcccagggccagagccagggccagcccagcagcagcagcctgaccggcgtgagcagcagccagcccatccagcacccccagcagcagggcatccagcagaccgcccccccccagcagaccgtgcagtacagcctgagccagaccagcaccagcagcgaggccaccaccgcccagcccgtgagccagccccaggccccccaggtgctgccccaggtgagcgccggcaagcagagcacccagggcgtgagccaggtggcccccgccgagcccgtggccgtggcccagacccaggccacccagcccaccaccctggccagcagcgtggacagcgcccacagcgacgtggccagcggcatgagcgacggcaacgagaacgtgcccagcagcagcggcagacacgagggcagaaccaccaagagacactacagaaagagcgtgagaagcagaagcagacacgagaagaccagcagacccaagctgagaatcctgaacgtgagcaacaagggcgacagagtggtggagtgccagctggagacccacaacagaaagatggtgaccttcaagttcgacctggacggcgacaaccccgaggagatcgccaccatcatggtgaacaacgacttcatcctggccatcgagagagagagcttcgtggaccaggtgagagagatcatcgagaaggccgacgagatgctgagcgaggacgtgagcgtggagcccgagggcgaccagggcctggagagcctgcagggcaaggacgactacggcttcagcggcagccagaagctggagggcgagttcaagcagcccatccccgccagcagcatgccccagcagatcggcatccccaccagcagcctgacccaggtggtgcacagcgccggcagaagattcatcgtgagccccgtgcccgagagcagactgagagagagcaaggtgttccccagcgagatcaccgacaccgtggccgccagcaccgcccagagccccggcatgaacctgagccacagcgccagcagcctgagcctgcagcaggccttcagcgagctgagaagagcccagatgaccgagggccccaacaccgccccccccaacttcagccacaccggccccaccttccccgtggtgccccccttcctgagcagcatcgccggcgtgcccaccaccgccgccgccaccgcccccgtgcccgccaccagcagcccccccaacgacatcagcaccagcgtgatccagagcgaggtgaccgtgcccaccgaggagggcatcgccggcgtggccaccagcaccggcgtggtgaccagcggcggcctgcccatcccccccgtgagcgagagccccgtgctgagcagcgtggtgagcagcatcaccatccccgccgtggtgagcatcagcaccaccagccccagcctgcaggtgcccaccagcaccagcgagatcgtggtgagcagcaccgccctgtaccccagcgtgaccgtgagcgccaccagcgccagcgccggcggcagcaccgccacccccggccccaagccccccgccgtggtgagccagcaggccgccggcagcaccaccgtgggcgccaccctgaccagcgtgagcaccaccaccagcttccccagcaccgccagccagctgtgcatccagctgagcagcagcaccagcacccccaccctggccgagaccgtggtggtgagcgcccacagcctggacaagaccagccacagcagcaccaccggcctggccttcagcctgagcgcccccagcagcagcagcagccccggcgccggcgtgagcagctacatcagccagcccggcggcctgcaccccctggtgatccccagcgtgatcgccagcacccccatcctgccccaggccgccggccccaccagcacccccctgctgccccaggtgcccagcatcccccccctggtgcagcccgtggccaacgtgcccgccgtgcagcagaccctgatccacagccagccccagcccgccctgctgcccaaccagccccacacccactgccccgaggtggacagcgacacccagcccaaggcccccggcatcgacgacatcaagaccctggaggagaagctgagaagcctgttcagcgagcacagcagcagcggcgcccagcacgccagcgtgagcctggagaccagcctggtgatcgagagcaccgtgacccccggcatccccaccaccgccgtggcccccagcaagctgctgaccagcaccaccagcacctgcctgccccccaccaacctgcccctgggcaccgtggccctgcccgtgacccccgtggtgacccccggccaggtgagcacccccgtgagcaccaccaccagcggcgtgaagcccggcaccgcccccagcaagccccccctgaccaaggcccccgtgctgcccgtgggcaccgagctgcccgccggcaccctgcccagcgagcagctgccccccttccccggccccagcctgacccagagccagcagcccctggaggacctggacgcccagctgagaagaaccctgagccccgagatgatcaccgtgaccagcgccgtgggccccgtgagcatggccgcccccaccgccatcaccgaggccggcacccagccccagaaggtgagccaggtgaaggagggccccgtgctggccaccagcagcggcgccggcgtgttcaagatgggcagattccaggtgagcgtggccgccgacggcgcccagaaggagggcaagaacaagagcgaggacgccaagagcgtgcacttcgagagcagcaccagcgagagcagcgtgctgagcagcagcagccccgagagcaccctggtgaagcccgagcccaacggcatcaccatccccggcatcagcagcgacgtgcccgagagcgcccacaagaccaccgccagcgaggccaagagcgacaccggccagcccaccaaggtgggcagattccaggtgaccaccaccgccaacaaggtgggcagattcagcgtgagcaagaccgaggacaagatcaccgacaccaagaaggagggccccgtggccagcccccccttcatggacctggagcaggccgtgctgcccgccgtgatccccaagaaggagaagcccgagctgagcgagcccagccacctgaacggccccagcagcgaccccgaggccgccttcctgagcagagacgtggacgacggcagcggcagcccccacagcccccaccagctgagcagcaagagcctgcccagccagaacctgagccagagcctgagcaacagcttcaacagcagctacatgagcagcgacaacgagagcgacatcgaggacgaggacctgaagctggagctgagaagactgagagacaagcacctgaaggagatccaggacctgcagagcagacagaagcacgagatcgagagcctgtacaccaagctgggcaaggtgccccccgccgtgatcatcccccccgccgcccccctgagcggcagaagaagaagacccaccaagagcaagggcagcaagagcagcagaagcagcagcctgggcaacaagagcccccagctgagcggcaacctgagcggccagagcgccgccagcgtgctgcacccccagcagaccctgcacccccccggcaacatccccgagagcggccagaaccagctgctgcagcccctgaagcccagccccagcagcgacaacctgtacagcgccttcaccagcgacggcgccatcagcgtgcccagcctgagcgcccccggccagggcaccagcagcaccaacaccgtgggcgccaccgtgaacagccaggccgcccaggcccagccccccgccatgaccagcagcagaaagggcaccttcaccgacgacctgcacaagctggtggacaactgggccagagacgccatgaacctgagcggcagaagaggcagcaagggccacatgaactacgagggccccggcatggccagaaagttcagcgcccccggccagctgtgcatcagcatgaccagcaacctgggcggcagcgcccccatcagcgccgccagcgccaccagcctgggccacttcaccaagagcatgtgccccccccagcagtacggcttccccgccacccccttcggcgcccagtggagcggcaccggcggccccgccccccagcccctgggccagttccagcccgtgggcaccgccagcctgcagaacttcaacatcagcaacctgcagaagagcatcagcaacccccccggcagcaacctgagaaccacctag

SEQ ID NO: 182434 - DNA, 6405 bp, Artificial Sequence
  derived and/or modified sequence
atgagcggtggcgcggccgaaaagcagtccagcactcccggttctttatttttgtccccaccggctcccgccccgaaaaatgggtctagctctgactcatcagtcggcgaaaaactaggcgccgctgccgctgatgccgtgacagggaggaccgaggaatatcgccggcggagacacaccatggataaagacagtcggggagccgccgcaacaactacaacaacagagcatcggttttttagacgcagcgtcatttgtgatagtaacgccactgccctggagttacctggactgccactgtctttgccgcagccgtccatccctgctgcagtgcctcaatccgcccctcccgagccacaccgcgaggagacagtgacagccaccgcgacgtcccaggtggcccagcagccccccgccgccgcggcaccaggcgaacaggccgtggctgggccggcccccagcacagtgcccagtagcacatccaaggaccgaccagtgagccaaccttctttagtcggttcaaaagaagagccccctccagccagatccggttctgggggcgggtctgccaaagagccacaggaggaacgatcacaacaacaggacgatatcgaggaattagaaaccaaggctgtcggcatgtctaacgatggacgtttcctgaagttcgatatcgagatcggtagagggtcatttaagaccgtgtacaagggccttgacacagagacaactgtagaagtcgcatggtgcgagctgcaggacagaaaacttaccaaatctgaacgacaaaggtttaaggaagaagccgagatgctgaaaggactgcagcaccccaacatagtgcggttttacgactcatgggagtcaacagtgaaagggaagaagtgcatagtgctcgttaccgagctaatgacttctggcacgcttaagacttatctgaaacggtttaaggtgatgaagatcaaggtgcttcggtcctggtgtcgacagattctcaaaggccttcagtttttgcacacaaggacaccgcccattattcatcgggacttgaaatgtgataacatttttatcaccggccccaccggctccgttaagatcggcgatttaggccttgcaacactgaagcgggctagcttcgctaagagtgtcattgggaccccagagtttatggcccctgagatgtacgaggaaaagtacgacgagagcgtagatgtatacgccttcggcatgtgcatgcttgagatggcaaccagcgaatacccctactctgaatgccagaacgctgctcaaatctatcgtagagtcacctcaggggtaaagcctgcaagctttgataaggtggctattccagaagttaaagagataattgaggggtgcatcagacagaacaaagacgaacggtactccatcaaggatttgctcaatcacgctttcttccaagaggagacgggcgtcagagtggagctggcggaggaggacgacggggagaaaattgcaatcaaattatggctacgcatcgaagatatcaagaaactgaaaggaaaatataaggataatgaggccatcgagttctcattcgacctcgaacgcgacgtccctgaggacgtggcccaggaaatggtagaaagtggctacgtatgcgaaggggatcacaagactatggctaaggccatcaaggacagggttagcctaatcaaaaggaagcgggaacagcgccaactcgtgcgagaagagcaagagaagaagaaacaggaagaaagctctcttaagcagcaagtcgagcaatcaagtgcctctcagactggaattaaacagctgcccagtgcatctaccggcataccaactgcatctaccacgtccgcctccgttagcacccaagtagagcccgaagagcccgaagcggatcagcaccaacagttacagtatcaacaaccttccataagcgtgctttccgatggcactgtggacagcggccagggctcctctgtgtttacagaaagtcgtgtgagctctcagcagactgtgagctatggcagtcagcatgaacaggcgcactccacaggaactgttcccggtcacattccatccacggttcaggcccagtctcagcctcatggggtctaccctccttctagcgtggcacagggtcagtctcagggtcaaccttctagcagcagtctgaccggcgtcagttcatcacagccaattcagcatccccagcaacagggaatccagcagaccgcaccgcctcagcagaccgtgcagtatagcttgagccagacctcgaccagcagtgaggctacaacggctcagccagtgtctcaaccacaagctcctcaggtgctgccccaggtgagtgctggcaaacagagcacgcagggagttagtcaagtcgcaccagcggagcccgtggcagtggcccagacccaggcaacacaacccaccacacttgcttcctctgtagactctgctcacagcgacgtggccagtgggatgtcagatggcaacgaaaacgttccatcttcttcggggcggcacgaaggccgcacgaccaagcggcactataggaaatccgtacggtcacgatctcgacatgaaaaaaccagtaggccaaaattgcgcatcttgaatgtgtctaataaaggcgatagagtggtagaatgtcagctagaaacacataatcgcaagatggtcacctttaagttcgatctagatggggacaatcctgaggagatagccacaattatggttaataacgactttatacttgccattgagagggagtcattcgtggatcaggtgcgcgaaatcattgaaaaggcagacgagatgctttcagaggatgtgagcgttgaacccgagggcgaccagggtttggagagccttcagggcaaagacgactacggcttctcaggaagccagaagctggagggtgagttcaaacagcccatcccagcaagcagcatgccccaacaaattggcatccccacatcaagcctgactcaggtagtgcacagcgctggacgacgcttcatcgtgagccccgtgcccgagagcagacttagggaatcaaaggtcttcccttccgagattactgacacggtcgccgccagcactgcccagtctccaggcatgaacttgtctcatagtgccagctctctttcactccagcaggcattctccgaattgagaagagcccagatgacagaagggcccaacacagccccaccaaatttttcccacacaggccccactttcccagtggtacctccctttctgtcatctattgccggcgttcccaccactgcagcagccactgctcctgtacctgctacaagtagtccaccaaacgacataagtacctccgtgattcagtccgaggtgaccgtgcctactgaggagggaattgctggtgtcgctacttcaacaggggtggtgaccagcggcgggttaccgatccctcctgtgtcagagtccccggtgctgagctcggtagtctcctccatcacgattcctgccgtggtgtccatttccaccaccagtccttcccttcaggttcccacctctacttcagagattgtcgtctccagcactgctctgtacccctcggttacagtcagtgccaccagcgcaagcgccggggggagcaccgccacccctggtcccaagccaccagccgttgtcagccaacaggccgcgggatccacaaccgtgggagctactcttacctcagtgtcaacaacgacaagcttcccaagcacagccagccaactatgcattcagctctcatcctctacttcaacccccactctggcggagaccgtagtcgtctctgctcacagtctcgacaagacttcccattcctcaaccacaggtctggcattttcattaagtgctcccagcagtagtagctcaccaggagccggagtgagctcgtacatttcacaacccggcggcctccatcctcttgtgattccaagcgtaatcgcctcaactccaatcctgccacaggccgcaggacccacatccactcccttactccctcaggtccccagtattccgccactggtgcagcctgtggccaatgtgcccgccgtgcagcaaactcttatacacagccagcctcagcccgccctattgcccaaccaaccccatacccactgcccagaggtggatagcgatacccagccgaaagcgcctggcattgatgacatcaagactctggaggaaaaactacggagcctgttcagtgagcacagctcctctggagctcagcatgccagtgtgtcattagagacttctctggttatcgagagcaccgtgacccccggaatcccaaccaccgcagtggccccgagtaaactattgacttctacaaccagcacatgcttgccgccaaccaacctaccgttggggacagtggctctgcctgtaactccagtcgtgacaccaggacaagtgtctacaccagtctccaccaccacttccggcgtcaaacctggcacagctccttcaaagcccccccttacaaaggcccctgtgctgcccgttggtacagaactacccgccggaacacttccctccgagcaattacctccttttccaggcccctccctaacccaaagccagcaacctctggaggatctcgatgctcagttgaggcggaccctgtcaccagagatgatcacagtaacttccgccgtcgggccagtgtcaatggctgcccccacggctataaccgaggctggaacccaacctcagaaagtgtcccaggttaaggaaggacccgtactggccaccagcagcggagcaggagttttcaaaatggggcgattccaagtaagcgttgctgcggacggggcccagaaggaggggaagaacaagtcagaggatgccaaaagcgtgcatttcgagtcttccacttccgagagctcggttctgtcaagcagcagtcctgaaagcaccctcgtgaaacctgagcctaatgggatcaccattccaggaatctcaagcgacgtgccagagtctgcccataagacaaccgctagtgaggctaagtcggatacaggtcagcccacaaaggtcggccgcttccaggtgacaaccacagctaacaaggtgggtcgcttctctgtgagcaagaccgaggataaaattactgacacaaaaaaggaaggccccgtcgcatcacctccattcatggacctagaacaggctgtgctccccgcagtgattcctaagaaagaaaagccagagctgtccgaacctagtcatctgaatgggcctagcagcgaccctgaagctgccttcctgtccagggatgtggacgatggctctggttcacctcattctccccatcagctctccagtaagagtttgcctagtcagaacttgtcacagagcctgagtaactcttttaactcttcctacatgagcagtgacaatgagtccgacattgaggatgaggatctgaaactggaactcagacgactgagggataaacatttgaaagagatccaggacctccaaagcagacagaagcacgagattgagtcgttgtacacaaaactcggcaaagtcccacccgcagtgattattccgccagcagcacctctgagcggcagacgacgaagacctaccaagtcaaagggatcaaaaagctcacgcagctctagcctaggaaataagtccccccagctgagcggaaacctctccggccagtcagctgcctccgtgctccatccacaacagacactgcatcccccagggaacattccggaaagcggacagaaccagttactgcaacccctgaaaccctcgcccagctcagataatctctattcagcctttacatcagacggggctataagcgtcccttccctcagtgcccccggccagggtacaagctctaccaacaccgtaggagctaccgtcaactcacaagcagctcaggcgcagccgcccgccatgaccagctccagaaagggcaccttcactgatgacctgcataagctcgtggataactgggctcgagacgccatgaacctgtccgggcgacgcggctccaagggccatatgaattacgagggtccaggtatggcacgcaagttcagcgccccagggcaactgtgcatatccatgacctctaacctgggcggctccgcgccaatcagcgcagcatcagcgacatcccttggtcacttcaccaaatcaatgtgtccaccgcaacagtatggattccctgctactccctttggggcacaatggtccggcacggggggcccggctccccagcctctggggcagttccagcctgtgggaaccgcctctctgcagaatttcaacataagtaatctccaaaagtccatctctaacccccccggttccaacttgaggacaacttag

SEQ ID NO: 182435 - DNA, 6405 bp, Artificial Sequence
  derived and/or modified sequence
atgtctgggggcgctgctgagaagcagagcagcaccccaggcagcctcttcctgagccccccagccccagcccccaagaatggcagcagcagtgacagctctgtgggggagaagctgggcgctgctgctgctgatgctgtgacaggccgcacagaggagtacagaagaagaagacacaccatggacaaggacagcagaggagctgctgccaccaccaccaccacagagcaccgcttcttcagaagaagtgtcatctgtgacagcaatgccacagccctggagctgcccggcctgcccctgagcctgccccagcccagcatcccagctgctgtgccccagagcgcccctcctgagccccaccgggaggagaccgtgacagccacagccaccagccaggtggcccagcagcccccagctgctgctgcccctggagagcaggccgtggccggccctgcccccagcacagtgcccagcagcaccagcaaggacaggcctgtgtcccagcccagcctggtgggcagcaaggaggagcccccaccagcccggagcggcagcggcggcggcagcgccaaggagccccaggaggagaggagccagcagcaggatgacatcgaggagctggagaccaaggctgtgggcatgagcaatgatggccgcttcctgaagtttgatattgaaattggccggggcagcttcaagacagtgtacaagggcctggacacagagaccaccgtggaggtggcctggtgtgagctgcaggacaggaagctgaccaagtctgagcggcagcgcttcaaggaggaggccgagatgctgaagggcctgcagcaccccaacatcgtgcgcttctatgacagctgggagagcacagtgaagggcaagaagtgcatcgtgctggtgacagagctgatgaccagcggcaccctgaagacctacctgaagcgcttcaaggtgatgaagatcaaggtgctgcgctcctggtgccggcagatcctgaagggcctgcagttcctgcacaccaggaccccacccatcatccaccgggacctgaagtgtgacaacatcttcatcaccggccccactggatctgtgaagatcggggacctgggcctggccaccctgaagagggccagctttgccaagagcgtcatcggcaccccagagttcatggcccctgagatgtatgaggagaagtatgatgagagcgtggatgtgtatgccttcggcatgtgcatgctggagatggccaccagcgagtacccctacagcgagtgccagaatgctgcccagatctacagaagagtgaccagcggcgtgaagccagccagctttgacaaggtggccatccctgaggtgaaggagatcatcgagggctgcatccggcagaacaaggatgagcgctacagcatcaaggacctgctgaaccacgccttcttccaggaggagactggagtgcgggtggagctggccgaggaggatgatggagagaagatcgccatcaagctgtggctgagaattgaggacatcaagaagctgaagggcaagtacaaggacaatgaggccatcgagttctcctttgacctggagagagatgtgcctgaagatgtggcccaggagatggtggagagcggctacgtgtgtgagggggaccacaagaccatggccaaggccatcaaggacagagtgtccctcatcaagaggaagcgggagcagaggcagctggtgcgggaggagcaggagaagaagaagcaggaggagagcagcctgaagcagcaggtggagcagagcagcgccagccagacaggcatcaagcagctgcccagcgccagcacaggcatccccacagccagcaccaccagcgcctctgtgtccacccaggtggagcctgaggagcctgaggccgaccagcaccagcagctgcagtaccagcagcccagcatctctgtgctgagtgatggcaccgtggacagcggccagggcagcagcgtcttcacagagagccgggtgagcagccagcagacagtgtcctatggcagccagcacgagcaggcccacagcactggaacagtgcccggccacatccccagcacagtgcaggcccagagccagccccatggagtgtacccacccagctctgtggcccagggccagagccagggccagcccagcagcagcagcctgactggagtgagcagcagccagcccatccagcacccccagcagcagggcatccagcagacagccccaccccagcagacagtgcagtacagcctgagccagaccagcaccagcagcgaggccaccacagcccagcctgtgtcccagccccaggccccccaggtgctgccccaggtgtctgctgggaagcagagcacccagggcgtgtcccaggtggccccagctgagcctgtggccgtggcccagacccaggccacccagcccaccaccctggccagctctgtggacagcgcccacagtgatgtggccagcggcatgtctgatggaaatgaaaatgtgcccagcagcagcggcagacatgagggccgcaccaccaagaggcactacaggaagtctgtgcgcagccgcagcagacatgagaagaccagccggcccaagctgcgcatcctgaatgtgagcaacaagggggacagagtggtggagtgccagctggagacccacaacaggaagatggtgaccttcaagtttgacctggatggagacaaccctgaggagatcgccaccatcatggtgaacaatgacttcatcctggccatcgagcgggagagctttgtggaccaggtgcgggagatcatcgagaaggcagatgagatgctgtctgaagatgtgtctgtggagcctgagggggaccagggcctggagagcctgcagggcaaggatgattatggcttcagcggcagccagaagctggagggggagttcaagcagcccatcccagccagctccatgccccagcagatcggcatccccaccagcagcctgacccaggtggtgcacagcgctggaagacgcttcatcgtgtcccctgtgcctgagagccggctgcgggagagcaaggtgttccccagcgagatcacagacacagtggccgccagcacagcccagagccctggcatgaacctgagccacagcgccagcagcctgagcctgcagcaggccttcagcgagctgcggcgggcccagatgacagagggccccaacacagccccacccaacttcagccacacaggccccaccttccctgtggtgccccccttcctgagcagcattgctggggtgcccaccacagctgctgccacagcccctgtgcctgccaccagcagccccccaaatgacatcagcaccagcgtcatccagagcgaggtgacagtgcccacagaggagggcattgctggggtggccaccagcactggagtggtgaccagcggcggcctgcccatcccccctgtgtctgagagccctgtgctgagctctgtggtgagcagcatcaccatcccagctgtggtgtccatcagcaccaccagccccagcctgcaggtgcccaccagcaccagcgagatcgtggtgagcagcacagccctgtaccccagcgtgacagtgtctgccaccagcgccagcgctgggggcagcacagccaccccaggccccaagcccccagctgtggtgtcccagcaggccgccggcagcaccaccgtgggcgccaccctgacctctgtgtccaccaccaccagcttccccagcacagccagccagctgtgcatccagctgagcagcagcaccagcacccccaccctggccgagaccgtggtggtgtctgcccacagcctggacaagaccagccacagcagcaccaccggcctggccttcagcctgagcgcccccagcagcagcagcagccctggggccggcgtgagcagctacatcagccagcccggcggcctgcaccccctggtgatccccagcgtgattgccagcacccccatcctgccccaggccgccggccccaccagcacccccctgctgccccaggtgcccagcatcccccccctggtgcagcctgtggccaacgtgcctgctgtgcagcagaccctcatccacagccagccccagcctgccctgctgcccaaccagccccacacccactgcccagaggtggacagcgacacccagcccaaggcccctggcattgatgacatcaagaccctggaggagaagctgcggagcctcttcagcgagcacagcagcagcggggcccagcacgcctctgtgtccctggagaccagcctggtgattgagagcacagtgaccccaggcatccccaccacagctgtggcccccagcaagctgctgaccagcaccaccagcacctgcctgccccccaccaacctgcccctgggcaccgtggccctgcctgtgacccctgtggtgaccccaggccaggtgtccacccctgtgtccaccaccaccagcggcgtgaagccaggcacagcccccagcaagccacccctgaccaaggcccctgtgctgcctgtgggcacagagctgcctgctggcaccctgcccagcgagcagctgccccccttccctggccccagcctgacccagagccagcagcccctggaggacctggatgcccagctgcggaggaccctgagccctgagatgatcaccgtgaccagcgctgtgggccctgtgtccatggccgcccccacagccatcacagaggccggcacccagccccagaaggtgtcccaggtgaaggagggccctgtgctggccaccagcagcggggccggggtcttcaagatgggccgcttccaggtgtctgtggccgcagatggagcccagaaggagggcaagaacaagtcagaagatgccaagtctgtgcactttgagagcagcaccagcgagagctctgtgctgagcagcagcagccctgagagcaccctggtgaagccagagcccaacggcatcaccatccctggcatcagcagtgatgtgcctgagagcgcccacaagaccacagccagcgaggccaagagtgacaccggccagcccaccaaggtgggccgcttccaggtgaccaccacagccaacaaggtgggccgcttctctgtgtccaagacagaggacaagatcacagacaccaagaaggagggccctgtggccagcccccccttcatggacctggagcaggccgtgctgcctgctgtgatccccaagaaggagaagccagagctgtctgagcccagccacctgaatggccccagcagtgaccctgaggccgccttcctgagcagagatgtggatgatggcagcggcagcccccacagcccccaccagctgagcagcaagagcctgcccagccagaacctgagccagagcctgagcaacagcttcaacagcagctacatgagcagtgacaatgaaagtgacattgaagatgaggacctgaagctggagctgcggcggctgcgggacaagcacctgaaggagatccaggacctgcagagccggcagaagcatgaaattgagagcctgtacaccaagctgggcaaggtgcccccagctgtgatcatccccccagctgcccccctgtctggaagaagaagaagacccaccaagagcaagggcagcaagagcagccgcagcagcagcctgggcaacaagagcccccagctgagcggcaacctgagcggccagagcgctgcctctgtgctgcacccccagcagaccctgcaccccccaggcaacatccctgagagcggccagaaccagctgctgcagcccctgaagcccagccccagcagtgacaacctgtacagcgccttcaccagtgatggagccatctctgtgcccagcctgagcgcccctggccagggcaccagcagcaccaacacagtgggcgccaccgtgaacagccaggccgcccaggcccagcccccagccatgaccagcagcaggaagggcaccttcacagatgacctgcacaagctggtggacaactgggccagagatgccatgaacctgtctggaagaagaggcagcaagggccacatgaactatgagggccctggcatggccaggaagttcagcgcccctggccagctgtgcatctccatgaccagcaacctgggcggcagcgcccccatctctgctgccagcgccaccagcctgggccacttcaccaagtccatgtgccccccccagcagtatggcttccctgccaccccatttggagcccagtggagcggcaccggcggccctgccccccagcccctgggccagttccagcctgtgggcacagccagcctgcagaacttcaacatcagcaacctgcagaagagcatcagcaaccccccaggcagcaacctgcggaccacctag

SEQ ID NO: 182436 - DNA, 6405 bp, Artificial Sequence
  derived and/or modified sequence
atgagcggcggcgccgccgagaagcagagcagcacccccggcagccttttcttgtcacccccagcaccagcccccaagaatgggagctcctccgatagttctgttggagagaaattaggcgctgcggcggctgatgccgttactggacgcacggaggagtaccgtagacggcggcatactatggataaggactctagaggggccgcagccacaactaccaccactgaacatcgttttttcaggaggtcagtaatctgtgacagcaatgcaacagctctcgagttgcccggtcttcccctctcactgccacagccctccatacccgcggctgtcccacagagcgccccccccgaaccacaccgcgaggaaaccgtcaccgccactgcgaccagccaggttgcacagcaacctcccgctgccgccgcacccggggaacaagctgtcgctgggcccgctccaagtaccgtccccagtagtacatccaaggataggcccgtgtcgcagccatcattagttggatcaaaagaagagccacctcctgcgcgcagcggctcaggggggggatctgctaaggagccgcaggaggagcgctcccaacagcaggacgatatagaagaactcgaaacaaaagcggtgggcatgagcaatgacggcaggtttctgaaattcgatatcgaaatcggacgcggatccttcaagacagtttacaaaggactagacacagagactacagtcgaagttgcttggtgcgaactgcaggaccgcaagttgaccaaaagcgaacgacaacgttttaaggaggaggccgagatgctcaagggcctccagcaccccaatatcgtgcgtttttatgattcctgggagtcgaccgtgaagggcaagaagtgcatcgtgttggttactgagttgatgacatctgggacccttaagacctaccttaagcgcttcaaagtgatgaaaattaaggtcctccgatcttggtgcaggcagatcttgaagggactgcagttccttcatactagaacacctcctattatccaccgggacctaaagtgcgataacatctttatcaccggtcctaccggaagcgtgaagatcggggatctcggtttggctacactgaaacgagcttcattcgcgaaaagcgtgatagggacaccagaattcatggccccagaaatgtacgaagaaaagtatgacgaatccgtcgacgtgtatgcattcggcatgtgcatgcttgaaatggctacttccgaatatccctattcggaatgccaaaatgccgcccagatatatagacgcgtaacaagtggggtgaagccagccagcttcgacaaagttgcaataccagaagtgaaagaaatcatagagggctgcattcgccagaacaaggacgagcgttattcaattaaagacctcctgaatcacgccttttttcaggaagagacaggggtgagggtcgagctggccgaggaagacgatggggaaaaaattgcgattaaactttggctccgcattgaggacatcaagaagctgaaaggcaagtacaaggacaacgaggcgattgagttctcgtttgatttggaacgggacgtgcccgaggacgtcgcacaagagatggtggagtcgggatacgtctgcgagggcgaccataaaacgatggctaaagccattaaagacagggtgagcttgattaaaagaaaacgggagcagagacagttggtgagagaggaacaggaaaagaagaaacaggaggagtctagtctcaagcaacaagtggaacaaagctccgcttcccagactggcatcaaacagctccctagcgccagcacggggattcccacagcttcaactaccagcgcttctgtatctacacaggtggaacccgaggagccggaggcggaccagcaccagcagctgcagtaccagcaaccatcaatcagcgtcctgagtgatggcaccgtggatagtgggcaaggctcaagcgtgttcaccgagtcccgcgtgagtagccagcagacagtctcttatggatctcagcatgagcaggcccactctactggcacagtgcctgggcacattccctctacagtgcaagcacagagccagcctcatggcgtataccctccgtcttccgtggcccaggggcaatctcagggccagccatctagctctagcctcacgggtgtcagttcctcccaaccgatccaacatcctcaacagcaaggaattcaacagacagcgcctccccaacaaaccgtccagtattctctttctcaaacatccacgagctccgaggccacgactgctcaacccgtgagccagccccaggctcctcaggtcttgccccaagtgtcagccggcaagcagtctactcagggggtgtcccaggttgcgcctgccgaacctgttgccgttgcccagacacaggccacccaaccgacaaccttagcatcaagtgttgattccgctcatagtgacgtcgcatccggcatgtcggacgggaacgagaatgtcccatccagttcagggagacacgagggaaggacaacaaagaggcactaccgcaagagcgttaggagcagatctcgccacgagaagaccagcagacccaagttgaggattcttaatgtgagcaataagggagaccgcgtcgttgagtgccagctggaaactcataaccgcaagatggttacttttaagttcgacctggatggcgacaatcccgaagaaatcgctacaatcatggtgaacaatgactttatcctggccattgagcgcgagtcctttgtggaccaggttcgggagattatcgaaaaggcagacgagatgcttagtgaggacgtgtccgtggagccagaaggtgaccagggactcgagagtctacaggggaaggatgattatggcttctcaggtagccagaagctggagggggagttcaagcagcctatcccggcctctagcatgccccagcagataggtattccaacctcttccctgacgcaggtggttcattctgctgggaggaggttcattgtctccccggtccctgagtcccggttaagagagtctaaggtcttcccttctgagattactgacactgtggctgcctcgacagcacagagcccagggatgaatctatcgcactccgcctcctccttgtctttacagcaggctttttccgaattgcgcagagcacaaatgacagaaggccccaacactgccccgccaaacttcagccacacaggcccaacatttcctgtggtgccccccttcttgagctctatcgctggggttcccaccactgccgccgccacggcacccgtgccggcaacatcaagcccgcccaacgacatcagtacttccgtaatacaatcagaggttacggtgccgacggaggaggggatcgcaggcgtcgctactagcaccggcgttgtaacctctggggggctccccatccctccggtctcagagagtcccgtcctctcttcagtagtcagtagtatcactatccctgcagtggtgagcatttccaccacgagccctagtttgcaggtaccaacaagtacaagtgaaattgtggtgtctagcaccgctctgtacccgagcgtaacggtcagcgccacctccgcgagtgcggggggaagcaccgcaactcccgggcccaagcctcctgccgttgtgtcacagcaggcagctggatccaccaccgtgggagccactttgacatctgtgagcaccacaacaagcttcccatctaccgcttcacaactttgcatacagttatcatcttcaacctcgactcccacacttgccgagacagtagtggtctctgctcattccttggacaagacatcccatagttctactactgggttggcttttagcctttcagcccctagcagcagttcttccccgggcgcgggcgtttccagctacatctctcaacccggaggactgcatccccttgtgattccttccgttattgcctctaccccaatcctgccacaggcagctgggcccacttcaaccccattgttgccacaagtgcccagcataccacctttagtgcagcctgtcgcaaatgtgccagcagtgcaacagaccctgatacatagtcaaccacaacctgcactgcttcccaatcagccgcatactcattgtccagaggtcgacagcgatacacaacccaaggctcccgggattgatgatatcaaaactctcgaggagaagctgagatctctcttttccgaacacagctctagcggggcacagcatgcatccgtgtctctggagactagtctggtgatagagtccaccgtcactccaggcatcccaaccaccgcagtggctcctagcaagctgctgacttctacaacctctacctgtcttccgccaaccaacctgcctctgggtaccgtcgcactgcctgtgacccccgtggtcacccccggccaggtctctacgcctgtctctaccacaacctcaggggtgaagcccggcaccgcgccttccaagccccctcttactaaagcccctgtgctgcccgttggcacagaacttcccgctggaactctgccatccgagcagcttcctccttttcctggcccctccctaacacagtcccaacaacctctggaggatctcgatgcccagctgcggcggacactttcccctgaaatgataacggttacctctgcagtgggcccggtgtctatggctgctcccaccgctatcaccgaggctggcacacagcctcagaaagtgagccaggtgaaggaggggccggtcttggctacatcttccggggccggtgtgttcaagatggggaggttccaggtctccgtagccgccgacggggcacagaaggaaggtaaaaacaagagcgaagacgccaaaagcgtgcatttcgaaagcagcacatctgaaagttccgtactttcttcatcgagtccagagtccacactggtcaaacctgagcccaacggcatcacaattcccgggatctcctccgacgtgcctgagagtgcccacaaaactacagcgtctgaggcgaagtcagacactggccagcctacaaaggtcggcaggtttcaggtaacgacaacagctaataaggtgggtaggttttccgtttcgaagacagaggacaagattaccgacacgaagaaagagggacctgtggcatcgcctccctttatggatctggagcaggccgttttgccagcagtcattccaaaaaaggagaaaccggaactgagcgaaccctcccatctgaacgggccctcatcagaccctgaggcggcatttttatcaagagatgtggacgatggctccggcagtccgcacagccctcaccaactctcttcaaagtctcttccctcacagaatctgtcacagtctctctcaaattcgtttaattccagttacatgtcctccgataatgaatccgatattgaagatgaggacctgaaacttgagctccggcggctgcgcgataaacacctaaaggagattcaggacctccagtcgcgccagaagcatgagatcgaatccctgtatacaaaactgggtaaagtccccccggctgtcatcatcccccctgccgcacctcttagcgggcgtcggcggcgccccaccaagtcaaaagggagcaagtccagccgtagctctagtttgggaaacaaaagcccacagctcagcgggaacctgtcaggtcagagtgccgcatccgttttacaccctcaacagactcttcacccacctggaaatatacctgaatccggtcagaatcagctcctgcagccacttaaaccttccccatcaagcgataacctgtactccgctttcacctcggatggcgcgatctccgttccttcactttcagctcctgggcagggcactagtagcaccaatactgtcggggccacagtgaatagtcaggctgcccaggcgcaaccacctgccatgacttccagtaggaagggaacgttcacagacgacctccacaaattggtggataactgggccagagacgccatgaacttgtctggccggcgtggaagcaagggacacatgaactacgagggacctggaatggcccgtaagtttagcgcccccgggcagctgtgtatctcgatgaccagcaacctgggggggtctgcaccaattagtgcagcctccgcaacgtctctggggcacttcaccaagtctatgtgccctccacagcagtatggattcccagctacgcccttcggcgctcagtggtccggcacaggtgggcccgcaccacaaccactgggccagtttcagcctgtggggacggcatccctgcaaaacttcaatatatctaacttgcaaaaatcaatttcgaacccccctggctctaacttacgcaccacctag

SEQ ID NO: 182437 - DNA, 6404 bp, Artificial Sequence
  derived and/or modified sequence
atgagcggaggagccgctgaaaagcaatccagtacaccaggcagtctgtttctgtcccctcctgcacctgcgcctaaaaatggttccagcagcgacagctccgtgggagaaaagttgggtgccgcagcagccgacgctgtaacaggtagaaccgaagagtatcggagacgacgccatactatggacaaagattcccggggtgctgctgcgactacgacaactacagagcaccgctttttccgaagaagcgtgatctgcgacagcaacgctaccgctcttgaacttcccggactgccactctccctccctcaaccttcaatcccagctgccgtcccccagtcagctcctcccgaaccacacagagaggagacagttaccgccacggccactagtcaggtggctcagcagccaccagccgcagctgccccaggggagcaggccgtcgcagggccagctccctctactgtgcccagctccacctccaaagacaggccagtgagccagccgtccctggtgggctcaaaggaggaacctcccccagcaagatcaggttcaggaggaggcagcgctaaggagccccaggaggagcgcagccagcagcaggacgacatcgaggaactcgagacgaaggccgtcgggatgagcaacgatggaagattcctgaagttcgatatcgagatcgggaggggctctttcaaaaccgtttataagggactcgacactgagaccactgtcgaggtcgcttggtgtgaactgcaagatagaaagctcacgaaaagtgagcgccaaaggttcaaagaagaagctgagatgctgaaaggcctccagcaccctaacatcgttcgcttttatgattcttgggaatccactgtgaagggtaagaaatgtattgtgttggtgaccgagctgatgaccagtggtacattgaagacgtatctaaagaggttcaaggtcatgaagatcaaggtgctgagaagctggtgtcgccaaattttaaaaggtcttcaattcttgcacacgagaactccccctataattcaccgtgatctgaagtgtgataatatatttatcaccgggcctacggggtccgtgaagattggtgacctcggtctggcaactttgaagcgggctagcttcgcgaagtcggttatcggtactccagagttcatggcacccgaaatgtacgaagagaaatatgacgagagcgtggatgtctacgctttcggaatgtgcatgctggaaatggctacttcagaatatccctattcagagtgtcagaatgccgctcagatctaccggcgtgtgactagtggcgtcaaaccagctagctttgacaaggtcgctatccccgaagttaaagagatcatcgaggggtgcatcagacagaataaggatgaacgctactccatcaaggatttgctaaaccacgctttctttcaagaggagaccggcgtgagagtggagctggccgaggaggatgatggtgaaaagatcgcgattaagttatggctccgaattgaggatattaaaaagctcaaaggcaagtataaggataatgaggcaatcgagttctcctttgacttggagagggacgtgccagaggatgtcgcccaggaaatggtggagtccggctatgtgtgtgagggagaccataaaaccatggctaaagccatcaaggatcgcgtcagccttatcaagcggaaaagagagcaacgtcaactggtaagagaagagcaggaaaagaagaagcaggaggaaagcagtctcaagcagcaagtggaacagagttccgcatcccagacaggcattaaacagctgccttccgcaagcactggaattcccacagccagtaccacatccgctagcgtgtcaacccaagttgaacctgaggagcctgaagcagatcagcatcagcagctgcagtatcagcagccgtccatctctgtgctgtcagacggtactgtggattcaggtcagggctcttctgtgttcactgagtcacgcgtctcttcccagcagaccgtgtcatacgggtctcagcacgaacaggcgcattccactggaacagtacctgggcatattcctagcactgtccaggcccaatcacagccacatggagtttatccgccttccagcgtggcacaggggcagagccaggggcagccgtcttcatccagcctcacgggcgttagttctagccagcccatccagcaccctcaacagcagggcatacagcaaaccgcacctcctcaacagaccgtccagtatagcctctcacagactagcaccagcagtgaggcaacgactgcccagcccgtgagtcaaccacaggctcctcaggttctgcctcaagtgtccgccggaaagcagagcacccagggcgtgtctcaagtggccccagccgaaccagtggctgtcgcacagacacaggcgactcaaccgactaccctcgccagcagcgtcgactccgctcacagcgacgtcgcctcgggcatgtcggatggaaatgaaaatgtgccgtcttcaagcggtcgccacgaaggtcgcacgacaaaaagacactacagaaaatccgtgcggtccagaagccgccatgagaagacttctcgacccaaactaagaatcttgaatgtgtcaaataaaggggacagagtggttgaatgccagctcgaaacacacaatcgcaaaatggttacgttcaagttcgacctggatggagataatccggaagaaattgctacgatcatggttaacaatgacttcatcctcgccattgaacgggaatccttcgtcgaccaggttcgcgaaatcattgagaaggccgatgagatgttaagcgaggacgtgtctgtagaacccgagggggaccagggactcgagtctttgcagggcaaagatgactacgggttcagcgggagccagaagttggaaggagagttcaaacagccaattcctgccagttccatgccccaacagattggcattccaaccagctccctcacgcaggttgtccattccgcgggtaggagattcatcgtttcccctgttcccgaaagcagactgagggagagcaaggtattcccttccgaaatcacagacaccgtggccgcaagcacggcccaatcaccaggaatgaatctttcccacagtgcatcctccctgagcctgcaacaggcattctccgaactgcggcgtgcccagatgacagaaggcccaaacaccgctccgccaaacttctctcacacaggacccacctttcccgtcgtgccaccctttctgtcttcaattgccggtgtgcccaccactgctgcagccaccgcccctgtgcccgctacgtccagtcccccaaatgacatctcaacatctgtcatccaaagcgaggtgaccgtccctacggaggaagggattgccggtgtggctacatcgacaggcgtggtaaccagcggcggtctccccatccctcccgtttccgagagtcccgtgctcagctccgttgtctcgtctataaccattccggcagttgtttctataagcaccacctctccgtccctacaggtgccaactagcacctctgaaattgtggtcagtagcactgccctctatcctagtgtcactgtatcagcaactagtgcctctgctggcggatcaacagctaccccgggaccaaagccccctgcagtggtgtcacaacaagctgctggctcaaccaccgtgggagctactctgacctctgtcagcaccaccacttcatttccctctacagctagtcagctctgtattcagttgagctcatcaacttctactcctacactcgctgagaccgtcgtggtgagtgcccattcactcgacaaaacgtctcacagctctacgaccgggcttgccttctctttgtccgctcccagttcctctagctcacctggcgcaggggtgtccagttacatcagccagccaggcggactccatcccctggtcattccttccgtcattgctagtacaccaatcctgcctcaagcagccggacccacatccacacctctactgccacaggtgccgtcaattccacccctagtgcagcccgttgctaacgtgccagcggttcagcaaacactgattcacagccagccacaaccagcgctgctccccaatcagcctcatacgcactgccctgaggtggacagcgacacccagcccaaagctccagggattgacgacatcaaaactttggaggagaaactgagatcactgttctccgaacactcatcatcaggagctcaacatgcgtccgtgagcttagagacaagcctggtgatcgaaagtaccgttactccagggatccccacgactgctgtcgcaccctccaagttgttgacatctacaaccagcacttgccttccacctaccaatctgcctctcggaactgtggccctgccagtcacccccgtggttacccccggtcaagtgtccacacctgtgagcaccacaacctccggcgtgaaacccggaacagccccttctaagccacctttgaccaaagccccagtactgccggttgggactgagctgccagccggtacccttccttctgagcaactgcctccattcccaggaccatctctaacccagagccagcagcctctggaggacctagatgcccagctccgtcggacgctgtcaccagaaatgatcactgtcactagtgcagtgggccctgtgtcgatggctgccccaaccgctattacagaggccggaacccaaccacaaaaggtttcacaggttaaagaaggacccgtgttagcaacatcctccggggctggcgtgttcaagatgggcagattccaggtgtcagtggccgctgacggtgcccagaaagagggcaagaacaagtccgaggatgcgaaatcagtgcactttgagtcttctacatcagagtcatctgtgttatcctctagcagcccagaaagcaccctcgtgaaacccgaaccaaacgggattaccattccagggatctcctctgatgtgcccgagagcgcacataaaactaccgcatctgaagctaagtccgacacaggccaaccaacgaaagtgggccgtttccaggtgaccacaacagcaaataaggttggccgattcagcgtgagcaagacagaggacaagatcactgatacaaagaaagagggccctgtcgctagcccaccattcatggatcttgaacaggctgtgctgcccgcagttatcccaaagaaggaaaagcccgaactcagtgagccgagccatctcaatggacccagttccgaccctgaggccgcatttctgtccagagatgtcgatgacggcagtgggtctccccacagtccccatcagctgtcttcaaagtctctgccgagtcagaatttgagccaatcgctctctaacagctttaacagcagttatatgtcgtcagacaatgaatctgatatagaagatgaagatctgaagttagaactcaggagattacgggacaagcacctgaaggagatccaggatctgcagagcagacaaaagcacgagattgagtcactctacactaaactgggtaaggttcctccagctgtgatcattcctcccgcagctcctctgtctggacggagacgccgacccaccaagtctaagggtagcaagagttcccgaagctcctcactcggcaataagagcccgcagctttctggcaatctgagcggacaatctgccgcttccgtattgcacccacagcagacgctgcaccccccaggtaatatacccgagtcaggtcaaaaccagctgctccagccgttgaagccatctcctagttcagataacttgtattccgctttcaccagcgacggcgcaatttcggtccctagcctctcagcgcctggtcagggcaccagctcaacaaatactgtcggcgctacagttaacagccaggccgctcaggcccagcctccagccatgaccagctccagaaagggcaccttcactgacgatctccacaagctggtcgacaactgggcacgcgacgccatgaatttgtctggaaggagagggagtaaggggcacatgaattacgaaggtcccggtatggccaggaaattcagcgcgcctggtcaactatgtataagcatgacatccaacctaggcggttcggctccgatatctgctgcttccgctacctctttggggcatttcacaaaatctatgtgcccaccccagcagtacggattcccagccactccgttcggcgcacagtggagtggcaccggcggtcccgcaccacagccactggggcaatttcaacctgtcggaacagcatccctgcagaactttaacatctcaaacctgcagaagagcatttcaaaccccccaggttctaacctcaggaccactta
